United States Patent Application Publication US 2008/0114160 A1 - sequence listing, part 12

SEQ ID NO: 5304 - DNA, 8144 bp, Oryza sativa
ccgccatcgctgtcgttgtctaccaccagctgcgccatcgttgttgtccaccatcagccacccgtcgtcgtcctcaccaccagtgctgaaagaagatttggggaagaagggttggatcggatgtggaggagctcacatgcaaatatgttgccactctggatggccacataagctagtcaacccggtcagagatcctttagacctcaatgagtcacttaaacaagaccgtggatcctaatgtcgatttttcaagatcatggacctaagtgacacctcgctccaactttaaggaccgaccgtgtactttactctaggtaaaagttgataaaagaattgccaaacttacaagattgtcaatgaagacaactgtgaaagggcatttggaatcgagcctgtcaagttgttgtttgatagatccctgcaagatatggagcaagattttccaaattttaactcagattacgcaaacaagttaatacatccgacatcatgaactcataacatacaaatattggagggccttgagattcccaaaagaggacgatatctcaccactcaaaccaatttttgacaggtttctgcaaagagaatatgatcagcccaatttcattgcacagttaattagctcccattagatttaatttcctcttgctatttatgcatgtgctgatttggcattctgagggtgctaataataataataaaaaagatcaggctggtgattgatggtggtatcgaccaccatagattgtattaaaatttcatatcaaataaaaaattctattggaaataacatggggtcttaattaatttttactgccatgcatggcctctttagtttcattagtatcctaaaacttaataatttctaaattcacaagcaacaagtatatcatctcttttattaatttaattttgaactttaaattaataattagcaagttataattgatgggttctctttaattattttaatctaagccattaactatgcattgtgtatacaattaaaattttcatatttacaatagtttaacaatagccatacacgtttgcactctttttatttgggatggaggtaatagttttgttttttcatcacaatagtcatgttgtttttggctaatggaatgaattattacttacaagctcgtgattcttgcagggttagaaatggcatagctgcaggtcaaattatcccacgcaagatttctagggaggcacgggtcacccatccaattctttttcacctggtacttcgccttgatcgtcatgattgctgatactgtcaatcaccaaaaaatttcatcaatgcacatgacatgcttgaccatcagctagctcatgtatgtgcatatttcagtttttctcaaattttttatgaatttagtcaaattctgttaaattgtgtcaaaatttcagaaaatttcggtccaaaaatttctgaaattttcaaaattttaaaaattttaattctaccgaaatggctgaaattttagatgaaatcgaaattgaaaaccctgagcacataccatcttgtgagtcggtgccaatgttagcggtggagatgacagagtacacctcgacggcgttgatgagcggcggcatcgtcgagttggcggtggcgttaatggtgatgttgtactgcgggtgtcgcacaaagggtttggagctgtaggaggcctcggcgtagagaaacgatggtgtgaaaccatcgtcgaacaatatgccgttgatgttgatatagaattgccgtgtggcgttgttggggaggttctcaagctcggagaagtgaaagatggcgatgtaccctggcgctgggtcgttgggctgcggctgtgagttccagaagaagtcgatgttgttggaggcgttgattggcgtgaccgctgtctgcatcaccgccgtcggcgcctcgaacaggtcgttgtctatgttctgaaccctgtttgtcgttgatatctcgttccacttggccgcatcaaaccaaggaaaccatactctgtcgtgcggatcatccggatacctggccattgaatcgatcagttgcatttcctacagataagggtaattttaccatccttaaaaaaaatattagaagatatcatattttctaatttaaaaattggtactttctcaaaaaccgtaaaatttatctacagagaattagagcaagtttaatagtatagccaactattagctccaatttatctatagccaatctaatagctcattcatacaatagttacatactacactattagtacctggacccacatgtcatacacactgtgtattggagtccatgctacagctggctataaatctgtagcccgcttcccttctctctcctcatctatttccttaaaatatgtttgcagctggcttatagcctgctattgtacctgctcttagctaaatatctggctcttatcgggaaaagtgatttcatcctttaagagatatcccctcattttgcatgttggtaatcagaaaaaatatatgaaagtatctgtaaatacgaatctaatattacgctatttatatcactaaacctatatattgtggaaaattttatgatatttgataaagtgcctaaagataccaagattttacaccaataattttgatacctcaaaatatttagtaccgggaggtaccaaattttacactaaaaaatatgatacctttcgataacttcttaagaatagtaaaattaccctatattgtgagactaacttttagttaaaatttatcgagtttgaattatcaccagtaatactgatgatagtataaataaatgatatgataataaatataaacagtctatacgcgtaggaaactttaacttagctcacctgatggaggtttcgtcagatgggccgaagttgagcctggcgagttggagtaggccctgagtggcgttcacctgcgggtagagcttgttcataagaggcctgaggtccaacccggagatgaacggtgtcccggcgccggtgttcaccaggcagacttgcacggagtcgtcgggcacgacgacgatggcctcccggttcaccggctggatcgggtccgtgatgttcaccaccgtccagaagttgacgccgatgtggaggtcaaacgacacgggcagcttgttgaggccgtcgtagttgccgtacatgaaggtggcgcggatgagatacttgaggccggccacgagcgaccggagcgtgtagcagttgcgcgcgccgtcggggaagctgcgcacgttgtagtagcgcgccgtgaccgccggcttgatgtactccggcgagacgttgtagtgcttgccgccgtcggtgaatccgtcgtccgaggcgtaggatatcttggtcttgtcgtcaatgtagctcgtcttccccgggagcccgcagtctacgctgatgaaacctgcaaaagcatgaaaaacatatgctcttttagttcattgaacattgatgtctttttgatttgtgaagcattgcgcgcattactatgaggtaggatactaggattgtactacgtacctttgctgtcaggctgggcacgagcttggagtacgccggcggtggcggtggcgaggcagagaagaaacaacgacgaccgtgccgccattgttgccggtgatgaacgacgctccattgcacatgcagccatgcatgcaggtagcaaagctgctactctctagggacgtgctccatctatttgtaatccagcattccagctagtaaacaagtgaccaagctaataatctcactgtcacaagctaataataactagccaattgatcatcacaaaactcaatcttgattaatttaaccacgtcactacgtcagcgcatctatccagattccagtaacaaagagcgcctcgctttgtgggtcatatagatattcttccactgacgagtggggctattcagaatttacactggccacctctttgtgggcccggcatgtcaatgaccctgagggaagaggcgagtgtatcacatgggccgggagttgacttgtagcccgctggtcaactgctttgctgggcgaaggacttggaggcccgagatcggtggccacggcccgtcgacttgaccttattttccgcgccggaaactatgagcaacaagattattatgcacttgcccactacgtaaaagaatttgttctctctgtcagagaatgcatctgaatctgatctggcagttttgcacaagagacaggcagcgcaagaagatatattttgcctctgacggactgcggctaattagtactaaacataattaggtacctaaaagttttagtaggagtatctacacgactctttggattaaatgatttggtgttttctaaatctccaattaaaacttgcatgcaggtactctagaacaacacaattcagttttaggctcagctgtaacggcgttaaaagaaccaggacaatattcatctcgcataccggaaactggaaacaccggttatgcaagtattcgtcaatcatgcatgagatttagtaataggattgctatgtaagtaatatcttttcaaccaatagggctccaaagaaacatttcaagatcttcatcctgctgtgcctttggtgtctctggcttcacagacacgacgtggtgttccgcaatgctcaaccatcactgctttcagccctgtcaaaatgccaataggaagttaacctctgggcggttcgctttggtccgaaagaccgtgatattattctggcttggaaaaatgtaatttcatcctctgttcatgctctaaattagttgtaatctggactgtaatccatcttgtactcaagtgctattgcttattgacagtttgaatgaaattcaggtggggaatctctcccctccagtgacttggtaaaaaaaaatattttcaaccaatggcaattgtttcttgatttgttcttatctaatgtgcagccaagtcttggcggagctggcggcacaagaaaggagcacatccaaggctacggaagtcattaagggtgtgtttggtttctcgtatgtccccagcctggccgtatccctcatccaggatgccctcagcctggctagggtaatgcaattggttgtgtttggttacttgcatgggtttatcctggatgatatgagatgttgtttgggaggagctgcgggagggaaggtgaggcaaacgagcacacccgctcagcaacgagcactcccgccggctacgagagttcgcagcagagggagcacccacgacggtgcacaggagccccaaaccctagcttcttctcctggggagtgaaatgaggaggggatgtggccgtgcggggaggtaaccctcgcctgcaacgaggggttgtgtgggtgcagttgcgctgcaccggatcagcctggatgcgcagcgatgctcccccctcgcgtttctgctcaacttggcccagacggcgattttgaatccgcctagcctgactcgcgggccggtccagccaaccaaacaagttggattttgctggcttgatgcgatgcaggtgcggtgcacccattcaaatacgccctaattgatgaaggtggaggcgcggggaaggagcaactacaagtggtcactagcggaggcggccatgtggtcgccggcagagatggctgagtagggatggagcaacccctcacggggaggaagcaacggcaagcagctggagtctgtggacagcagaaaaagtaaatagtagaaaatccttttatcaggaatttttgtctaacaaaacgaccttagaaactctaactaggaatgaggctactgagtagcagtaatgagcaaaatattaacctcttccgtgttatgcttgctcctgaattcttgaagtcatttatggcttcttggagtgcgtgatgagtcggcagcaaattattcgcgggcttgatctctctcctctcacccccatcgtcatcggctcacatcattttattacacttactcttatgagtgaatacaatggatgtgacccttgttcatgttacatgatttccattgcttgctagtccactaagtgacatggattccatttgatatctcatcttacattatcaagcaaagtacatttattgtgggaaatcataaaatttggattctaaattcttgataactatattccaagataaaaaaaattattaggtgtatattgacttttctcttcttgaagaatagtatggaagagttataaatatcaaagaatagataagtgtattgattacaaattccacacggtaaaagctctagatcttgattgtttgaaactttatgcgcttgcatttactttggtaaattaaagcaacaatattgtttcagttctgcatgtatctattttaggactagcagtctcggatcagattggcaaaggcctttatcgtgcaactggccctgtagccatggttggcactctttcaaaattatgctccatcgtgttgttttgactcacatcagtggactggtccgtgttgtacatgttataacttgagttgggatcattgttgttgccggcatagaagttgttatatgtatcttccatgccacatcgcctatcctcgagctctaggcactcctgcagctgagctaccacatcggtcatagtgggtcgttgtgtcgatgtctgtgcggtgcatttaagggcaatgtctgcggccttccacacaccattcacatcatggtcaccatgcatgtgtgcatccaccacaccttcgatgttacctcgtgccaaacgttgccgtgcccactggatgatgctaatgggccctggttcacgtagaatagacggcttccctgtgatcaactccaataagacaacaccaaagctatagacgtcgctcttggtggttggttgcattgttgcttggtacctacatgttcatccagttccacaagcttcacttaacatttgtaatagaaaacactgaacaacggtttcgagaaatatagatgagatttacatactctggatccacatatccaggtgtgccaacaagcgtgttcgtagatacatgggtgtcattaacgtgattgaatgtcttggataggccaaagtcagcaatcttcgcctcaagccttgtgttcaataggatgttggtcgccttcacatccctatgaataagtggtgggttgcacgccttgtgtaggtattctagccctaaccattatcagttatccaaataattaaactagtgatgatcaacttctagggaaaagtgtaaaaaagcatacctccaaacactttactagaattcaagtagttaccttgtgcagattctagtgctattcgaagcctctctctccaggttaaatatatcctgttgttgtttttacctataaataggtatagaatgagaattgaagatcatgagagtcatgtgaaatgatacgttagatgaagtattacaatgtatcctacaagttgatcataaacatcctatgcatacctgcaatgtgttcttgtagtgttccttctgacatgtactcatatacaagtgccatgtattccccatccttacagtaaccaatcatagagacaagattcttgtgatgaatccgggttaaaatttgagcctaacaagtgaaattaaccaattatatcccactagcaacaacttggtgtaagtataggcaaagcaaaatatcaactgcagctgaagaaattttacctccgcgaggaactccttagcaccttgattggaagattcagaccgcaatttcactgccacttgagtgccatcctccaagaagccgtcgtaaacgtacccaaaccctccacggccaagcacccgctggaagttgttcgttatcttctcaagttcattgtacgtaaatcgacgattcttaagttgtagtgatgaactatgcccgtatccgccatttgacgacacattgctcactgtctcattttgtggcttcacagaattgctcattgctgctaaaatatgtgaataagcatcactagtgttaaaaggatgaacaagtagatggacaattactgtgtttataacaaacctcaccttgctttttccgtctcaacaggcaacaaagtagtactgccactgatattatcaccacaaccagaactataactattggaataactatgtagatagctagcttgctcttcttttttgctgg

SEQ ID NO: 5305 - DNA, 2795 bp, Oryza sativa
cctgcagccccgcccgccaccgccgctcccgtcgctgccgcgctgtgccgccgccacctatagcatcacagcacccgaccgcaccccggcatccactccatctccctcctccaccgccggaaccaccttcccatcgcgaggccgagccactaccgccacacaccgccttcagccggccgctgccgccacgttagtcgtcgccgcacctcgccgcttgcgccgtcggcaacgccgtgccaagctctaccccggcccctactccatctcccctctccgcctccggaaaatcgccgcctcgcgcaccacctctctcgcgctgccgccatctcgcctccctccgtcggccgcctcttgccgccatccccatctacctcacgccgcgccaccgcctccaccgcattcgctgcatcccaccgtccctcggccgtggctccgccgtggtcgggcgtcatcggaacgccgttctcgtcgcctcccgtgccgaccgccgccatcctttccgccgccggtcgcctctccgtggtcgtctcgccgtcgccgccctcggtgagcactcctctcccctccctctttctccccttggccggccgcctcccgtgcttgcgcgcgccgtgtgccgccgccggtggccgcccagcccgtgtgccgccgtcgcttcggtcccggccgccgccgccgcccgctttgtgtgagcgctggccgggccgcgccacccggctgtccccaagccgtccgatcggccttggccgatctgggccgtccacgtggtggacgcgcgcccgaggtcgcggtggacgcggtccaccgtgtgccctccccctttgactcgctgacgtgtggggcccgcgtgtcggcgccggccgccccttgctgacgtcagcaaggaccatttcctttgtaaaaataaataataattgcgcaataaatcgagtttaattctagaaattcatttaaatggctcaaaacttctaaaattcatatctaattcattcgaactccgaattgagccattcaaattgcaaaattcatctaaaattgagctctacatgtttgtttactttttatgtactgtttctttggtttttattagagtttttcctcgttttgcgtgccagcgtgtagtttccgtcgtttcggaagtccgcggtcgcgaggaaaagagttcgggagatcaaagtggagaagcaaggcaagtcacacattccccttgagcattttgatcctaatttacaaatgttttactgtttgcaaacaaatatgcatgttttgctaattacatggggtcagggttttacctatctgctcgcttgtgccatgtttacttgatatctgttctttgtcaaccttgggtaatgaatcgactagctcatgttacttatgtgacctagctagaactatatgcttagccatgcttaattaccactagctcagttgatgggataattgcagtattagacattctagtatcttgatgagctgcgtgctcgagacatctggccatgcttcatggtcgtaattatccaactaaaatgcaactgaatggtgggctgtgggtgcatggttttgctagtcgcacccatggcaattaaggaccggttcgcgggatgccctggaagaacttatcgtacttaccacaagccagcgtgggcaacggctgggcttgtagtgtagctttcctctagccgacgcatccaggcaagggtgggcgtgatggagtttggatgggccctgcgacggcctatgcggcttccggattcacctaggcacgagaggggactgcccgctgccttgcgaggagtgggggtgaaacctgaggtgtggtgtgcttggttagagggggttatgcgaagggtcctgtcacggcctctttccggtatgtcgtggtggcatgtcggcgcacggaaacgtgtcgtggggctgtgtcttgtgggtacagttgtacacctctgatcagagtaaaactattcgaatagccgtgcccgcggttatgggcggtcgaccagattcaccgtgattagtcccaccttaataaatcgacccaatgcactgtagttcaggtgggttggttgggcctgttcaacgtggtgtagcgttgatcagtggagattcaatattactttaattactcaactgttttactgtttcgctcaataaaatgttttacaaccgcctttatgcaaatagccacaaaccgtccttgtgttccccttgcacgtctgcatcgttggtgtggcttgctgagtacggtggttgtactcagccttgctattattcccccttttcagaagtgtagtgcttctgagctgaagatggagttagaggaccaaggctcagaccccagttgagttttgcctgtggagtggagctgaagccccgctaggatcgcctttttccgctgctgctgcttttgtttcggtgtgaggactaagtgcctcttctgtaagtattttacgcgttatttacgtttggaactgtttattacttgtcgttttgtgtaccctggctggtcctggacagggatttaatacacaaaatagtctggaaatttgggctaaatttctgggcgtgacatcgcaccaccatacgcctctttgtcagccaccccctcccccccccccgggccaccttcaacacttcacctctgcacaacgacatctcacgacctagcatagctcgaccatcacactagtcagaactcaaaagggctagatccccctccgacccctctcgcacatgggaccactactccactcgtcatggagttccccacgactggatctggaagcataccaacc

SEQ ID NO: 5306 - DNA, 4859 bp, Oryza sativa
aaaatttacatatgtattattagttttgttgcgacttaaaaccataatcttcacttatttttatatatttatactaaatttccaataaaaagaatattttaaatgttatgtgaaaagttaaactatattagactatcgatgatcactaacgagtaacgactccattgtgattagtttagcgccgtcaacacatccatcctctgtaaggctgtaacacagattgccactgacgagtgagacttttctgaacttccactggtcacttctttgtaggcccgtcatgtcagtgaccttgtaactatagcttggaagagacaaaaagagatcacatgggcagggagttgactttcatggcagctggtcaactcatctgctgggtgcacgacatggaggcccgtagagtactcttgacttgttcttgagaacagcataaaaaaagatacgttcgtgcagatagaatcatttgccctctcaaataaaaaaagataggtccgttagaccatgaaagattattacgcacttgcgttacaatgtagaagaatctgttccccagtgaggcagtgattcaacaaaatacttccaaatttacaaattcccctagttagcaagattccggcgcagactgtagcacaagaagtatatagcctcatattttttatgtatatacttatgcttataagctatttggagttgattttgggttttttttatcgtagtttatttttcagcatttgcttttacatcattaagagtacgcacataaaaattttattcacaaattattttttattgtaaatatgccgcattatttgctttgtactagtagtttttggtatatacatgactggagggagtccattttaacaagaaagttctcgttgtattattgatcatcatttatctattttttttaactttagttattggcaggaaatgtttacatttttcttcaagcgcgtgcgctgcagttgcgaaattgacacgattccatctacttgatggatgatttttttttttcaaatggatctttctcgcgcgattcctcttagtagagcatgtaacgtgcagagtcgtccctcaaaatctaaggacccaacactaaatataaaacgatgccttatatttataaaatatactcatagaaaattacataacagatcagggttatatgcattttgacttgatgcggatagtttacaatgcaatgggatgggtttctactaccactactttttactcaattgcaccacagccaatgactctaaccacgccagaaaagtcagtatcaatctaatgcttatatgtttataaaggtatagtcagacgagtaggaatcattcacgatcaacggcaactagagctatgccgaagaaactctttttttctacttagccagatcgccactacatatgtggtgagtaagacgatctggctaattaagtagaaaaaaaaccattgcactaatttagtttttcttattaagtgaaaaatggaattattattgcttggaacatacgttcacctcgtcgtcatgaactacacatttttgagatagccatgattattaccaaacacttactggattcaagaataaaaatctcattctagccagatcagtgaagcagaaagagagaaaatcaaaaggaaaaaaaggagtgaagagatcttacacatattagaacgtctcgacatagattgaactcacaaattttgggggcccaaatttctggtgccctgtgtagtcgctcatctcgcacatggccaaagaaagcctggtaatgtgtaagacacttttccatctctgaatttccattgcatgctagcctactaagcttaatttgcagattccatatctttttgtactgaacttatgggtttatttccaacattgaagcaaagtagcatttagaaaaaaaaatagagaaaacatgcatgggttctgattaaaccccgttgtaaaaacattatgaatgaagttcattgattctgagttccaaactgaaaaaagttctactaaaaaatcttgaatatttgaaatttctacatttgcatttgctttggtgtaacatcatgtgaaagttccatagagatctctaccatgaaatggcattcaatcgaaatgagcaaaataatttatcgtgcagcaggaccgccagtgattgatggtatccttccaaaattttgctccatctctaatgtagagttgttctgacgcaaaccagtggattgttaagtggtgtagaagttagagtttagatcgccactattgccattataaaagccattgtttatatcactgacctggtgcttatcctctagctcgaggcactcttgcaactgtgccaccacgtcggtcatagtggggcggtgtgctgacgaaagcgccgtacacttgagtgcaatgtctgcaaccttccataggccattcacatcgtagtcaccatgcatgcttgcattcaccacaccctcaatgttaccccgtgctaagcgttgttgtgcccaatggatgatgctgatgggctctggatcacgcaagatagctggcttccctgttaccaactccaacaggacaacaccaaagctatagacatcactcttagtcgttggttgcattgttgattggtacctacgcatttggtcagtcccaataagtcttacaattagtatttctctaacaaaagaactttaaaaaaagggcttcaagaaagacaacatactctggatccacatatccaggtgtgccaacaagtttgttcgtagatacatgggtgccgttctcaggattgaaaaccttggacaaaccaaaatcagcaatcttggcctctagcctcgtgttcaacaaaatgttggttcccttcacatcacggtgaataagaggagggttgcaccctttgtgtaggtactctagccctgatcattaattcaccatgtaattgaaatactgatcaagcttctagagagagaaaaaatgtaaaatcaaactaaaaatagcattagaaattctaagtagttaccttgagcagattccagcgcaattcgaagcctctctttccaggttaagtatctcccatcatttccttttcctgcaaatataagaattggagatcatgaaaggactaaaaaaataagctggtagatgaagttagttcggacctgcaatgtgttcttgaagggttccttctgacatgtactcatacacaagtgccatatatttctcatccttacaatagccgatcatagagacaaggttcttgtgatgaatccgggttaaaatttgagcctaaagtggtgaaacttgtctatttaatgatgcccccatggagacttttcttgatagaaatttttacatagcaagaaaaagtgcagcttaaaaaattctacctctacaagaaactccttatcaccttggttggaagattcagtcctcactttgactgccacttcagtgccatcctccaagaagccatcatagacttttccaaagcctccttgtccaagaactcgctggaatttgttcgttatcttctccagttcattatatgtaaaccagcggttctcaagccgcagtgatgaattatgcccggagccattatttgttggcccatatctcattgtctcgttttgtcgctttacagaattgttcattgatcctttgtacgtgaagaatggaactagcatcagtagtattcaagaagatgaagtagagcagacaaatgatagcaagacccaccttgtttttttcttctcagtaggcaatagagtagtgtcgtcactgatactatcgcgaggaccagaactataggaacaacaatgtagatagctagcttgctcttgttttttggtggttgacatgagttgccattggtgcaaagatttgggttatttccatatctatatattaatgacataaatatgtttatgtccattttctgaaaaattgatctgcaccttttgctgaagaagactgctataagaagaatgtggtgtcattaccttagatttaaaaagccatcctgaattctcttgagaagtccaggcggaattgttccatttagttggtttcctgtcaaatctctaaaagaagacatacagtaggatattagttcaaaaggattctaaagagtacgtaggtaaaagagtaaagtacatggtcggtccttaaagttggagcgaggtgttacttaggtccatgatcttgaaaaatagacattagggtccgcgatcttgtttaagtgactcattgaggtccaaaggacctctgaccaggttgactggcttacgtgaccgtccagagtggcagtatatttgcatttcgcccccctcccccgcatccgatccaacccttcttccccatatcttctttcagtatgatttctatggtttgcggttgcaggggctggcggcggcagtgacgacgaggagggagacgggtacggcgacgagttggcgagcatgcgcaaagagggagaagggcgagtagggcggtggcggcggctggccagtggagcgagacggcgggcagcttttagggttttggagggttcgacttggggcggtgagggcgaggtggtgtcggagagggtgaggggacgatgaaggggttcgacgccaccaatgggttcggcttcatcactcccgacaacggcggtgaggacctcttcgtccaccggtcctccctcaagttcgacagctatcggagcctcaatgacggtgatgtcatcgagttatccatcggatccggcgacgacggccgcactaaggccgtggacatcaccgcgctaggcggcggcgcgcacaccggtggatcccgtcccagctgcggccagatccctacggctgcaagccgccgtctctcgacg

SEQ ID NO: 5307 - DNA, 15672 bp, Oryza sativa
catgttaatacatcttcttaatttttttataaccatttgagtgacatgtaaacaacgagtagatatcccctcgagggtgaaaatagtttccgttgtacacacgagtctactgaagtgtggaagtctccagcctactgagacagagcttttgcaccatgtggtattctctacacgctcagcttaattgccagatattaacaaaccgaaagtagaagaggaacattgatcttgcatattgtgatagagcataatactattccatcatgtaagcacggctccagagtgtaatctacaagtgctgactgctgaagcagctaatcagcctgaagaaactctcacaccttctgctcacatcagaaatacagaaaaatagcacagttcacagcgggtaaataatgcagatatgtgattttgtcacattccagcagcaatataaatcattccaactcaatgttcatcttttgtgcttgatcgtttgcactgctcaatgttcgtcttctacgctttttcctttgtagtgtttccaaagttcaaatccttcagaaattcggtgaacgccaacgacgacgacccgccgtctgccagcgccttcgcggccatttccttcgccattgtcagtctatccctgagttttttcccttcctcgaactccatgaccaacctcaccttcttctccacctcctcggccttgaccagctcctcatcgtagccgtccatcaccactccgagctgcatgccatccaccaagagcaccttgttcatcctctgctcggcgtactgcggccagcacagcatcggcactccggccgacgccgcctccaggacggagttccacccgcagtgcgtcacgaacgcggcggtcgcggcgtgccggagcacctccacctgcggcgcccacgacgtcaccaccattcccctgtcccgcgtcctctccgtgaacccctccgggagcagcattcccaggtcaggctccggacgcggcaggaagaacttggccggatcctgcggcgggctacgcaccacccagaggaaacggtggccggaattctcgagcccacgagcgatctccttcagctgcttcaccgagacggcgcccaagctgccgaagcagaggaacacgacgctcctctccggctgcgcgtccagccacgagaggcatgcgtggcgttccccgttcgccgcctcctcgcctttcgccatcaacggcccgatgcagtacaccggcggcgtggggcggtcggggatgcaggcgccttccctgagcgccctcacggacctcgcctccagccattcgtaggagttaatcagaataccccgcgcctccgggatccgcccgtagtgccccagccgcgtagcgcaggtccggtccgcgcggtcgagcacggtgtgcggcatgtcggaggccgggatcggagggacgccgggaaagcggaggggcgtcttacccatgtccttcaagctgccttccgtggtggcgaagtggtgcgggaggtggaggaacgcggcgaggtcgccggcggaggaggtgtagtagaagtacgccgggacgccggccgccgtggcggcgtcgagtgcgtcgacgcagaacaggtcgagcacgagagccgcgaccgaggggagggagcggaggaaggcgaggaggggtggcacggtgagacgcatcgtgtcgagcatctgcaggaaggcgtcgggatccgggtcggggtactcgggcggcgggaggtggtggaaggagatggaagggttggcggccgccatgcggtcgaccgcgggggcggacgaggagaagaagtcggcggtggaggccggcggggtcggcacggcgatgacgacggcgaggccgcggcggagaaggagcttcgcgagttcaaccatggggatgaggtggcccacgccgaggcaggcgtgcagcaccaccatcggattggggtctgcctccatcggcgccggagattcggcggccggcggcggagagagtgacagactgacagtgcgagtggaggggaatccgtgggcgagagaatttcggcgtcctgtgtttcgtctctccaccactagtagtggcgactgacgacgtagcgtactccatttgggttgcggcggaattgcctactgctccgtggtagcggatgtatggcccatcagcccatatagtgaaacatgacccgggctagatgcctagattgcgtcctgttgctcacgttccacccaatggcccatgtgtgaccttccttagcttctagcaacttttgctgaaagcctgaaaggaatgaaactgcagaggtgaagaatatgattagaggtttggaataagttcatttatggtctcttaacttgacaacgagttcgatttcgtccctgaaccgaaataccagatacaacgggttcctcaactatcaaaatcagtgcaaataaggcctcacgacggtttgaatagcgttttcacttttcagctgccgtgatgcctacgtggatggtttgaattgtcctcgtcttacgtggcagtgagccggtgatatggcactggaagcaaaatataaaaattaagaattaaaacaaaaatataggccccacatgttagtaaaaaaaaaaagtgggacccacatgttagtaggtcccaccctcttctcatctgcagtggatgacggcacgtcaacaccttttctcgtctccctcccagccatctctcttccctccttctccttgagctccctcacttgccgacaaccgctgccggcgacatgcgtccaactcctccccgactttctccctatcttttggcccctaaacgagtccaactcctcgccctcgcgccacaggtgcgcccctctaacttgccatcgccatccccgtccctcggtcaactccacctagggctgtcaaaaaagctcgaggctcgtgagctgctcgaactcggctcgctcaaggctcgactcgagctcgactcgtcgacgcgagcttcacgagccgagctcgaattgtttgacgagcctgtctttactttctttttcttttggcagtgagtaatagcataccgagtagtactaccagtagtattcatttatcatgtcaacatcacctagctgcttgcagagtggagtagtactcctactagttagtagtgctaggagtagtactactgcatgtctgtcattacgagcgccatcgtcaccaaaatccaacagtccatccaagcaaccaatgcgactaagctcgatagcaggctcgagctcgagcgagctcgagccgaacccatctatgagctcgaggcataaactaggctcggctcgagctcgactcgaatatgtaccaagctcgagcttagatgggtaagctcgctcgagctcggctcgttgacagccctaactccacccccgccccggcgcttcggccgcaggcaaggaaaggcaagggatcacgagccacaagttgcatttcttccaccacttgttcagtgaccctgcaatcgaggtttcaaggtagaagagaagggaggcaaacaaccagtggtagagaaatgcgaagatccggtggaatgcggggatgtggagaagacatatgatatttctccctcattgaacgcctgagaggaagcattatctttttccaatgaaacaatattttacaatacgaataatacttttttttctccatttcattcaggaagaattcaagttatccttgcccccccccccccccccccaaaaaaaagtgggaagaatgccagtgaattagtgtcatgtgccaagtggccacattccaattcatgcgctcaatatcaactctgattactcctcggaaacgagtaatcgccagcttattgtcaaccccatgtttttttgccgtctccacgtgtttctcatgtcatttgtttagtctcgaagtgaaccatcatcaatcggtgctctgattatatgcaccagataatcggattccattgagaaaagaaatatcagtatatctagaagaatcatgcgttaaacgatatcaagaatcattcagtcaggacgacccggtttttcttttcacgcagtttggaaagatgatacatacaatctttcccatctagaaggaagaaataattattcagaagtcagaactcacaaagacccccggaccaatcacagtccgtgaaaattacacggctatggactcagcagcaaacgtagtcatcatctcaagcttccacgagtcaagcgtacgtgtcaaatccggcgcatgacagtgtcgcagccacgacagtggacttgctcggccacatgtataaatcgaagaccaagaccaggaacagcggagcaggttcgagctaggtggtgtgatccattcagacaagtaactaacaaaaacggtcgtgtccgttcgtgacatttgctatagctagctagctccagctcccatggcgacggcggcggagaacaagaacgagccggcgcggccattcgcggtgccatccccgtcggtccacccggcggcgaccggcgtgggggaggaggaggaggcgcaggcggcgacggggtggcggtccatgcagtacctccggaagcggcggcgcgcgctctgctgctgcggctgctgcgtgaccaccctggtcgtcgtcggcctcgtcatcctcgtcctcgcgctcaccgtgttcagggtgaaggacccccgcatcaccatgaacggcgtgtgggtgacggccatcagcaccggccccggcaccggcgccggcatcgggagcaccgtggcgaccaacgcgacgctcaccgccgacgtctcggtcaagaaccccaacgccgcgtcgctccggttctcccggagcgagacggacgtgtactacaaggggaagacggtgagcgtggcgtacgtccccgccggcagcgtcggcgccgaccggacggtgcggatgaacatcacgctcgacctgctcgccgaccgcctcgcgtcggtgctcaacggcacggggctgatactcgggcaggagtacgacctgaccacctacacggcgatgagggcgagggtcagcgtgctggggatcatcaagaagagcctcgacgttcggatgaactgctcggtcatcttggacgtcgccggcatcgccggcgtgctgctgcccggggacggggccaagtcgggcgtgcagactaggagcgtggattgcgttgcaatcgtgagctgatcagcggttttcttgtgtgagtactgcattgtcattacagcacctcattacatatgaatatgtatttttctggatgtatattctgctactctcgtatgtatgtttttctggatatatattatgctactttcgtgtgttcacagatcgaattctctctaggaaataatacccaatagcattattatatgcctgtgtttgatggattgggtagacccgatttgggtagcagtctcacagccctgagttacatgaactttatagatgcagacgcactaccatgtttactgacgatgcataaggattaattagctaaaaggatgtaaagaaacctttgcaacgccagtaaaatggtgatttgaatagactgcatgaaaatgaaacaccatatacctctgccagcaagataggagtgcattgtcaaccacaacagcctcagagtatgtataaaacagacaggaaaataaccaattaaaggtgatatacagtagatagcattctgatagcattccaggtttcctctgtagataccagctatagaaaaaaaaaactagcttcttaccagcacagatggccgtgctactgtgctagaagcctagaaatgaacgaccaagggaatgtaactaatgaaactggacaatacataaaacttatcaatttacataaaacaaaaattatcacaaaagtttcaagaatcacatacattacattaggggggaaaagcaaaacaaaaggtaatgtggctaaaaaaataattcagaacttgaactaccgattgtccctaacgattttagctattgacttgggtaaggtcccgtgccaaagaaaattgttaggtacaaccatacagtaattagaaaataataacagcacagcacacaaactgcatgtatcaaacatgaaagaaaaagatcaacctagactatcacagtcagtgaattggaatttagaggtgtagctggcaggtactcatacaagtgcattgagtttagcacacaaaacattctaatcagtgaggtattcgtaactacatcaagtaaaatgaaaaaaaaatttccaagtttttgctgctcaaagttcaggcataactagccaacagataccaaggcatgtgcagagcatgataacatgttccacattagctcttgttgttcaaccccatatgaagttatgaacacatacacaccccctcaagattccatgaatgaaagtggggtcataatagagtccctccaagttccaactcacataaccatcttcagatggcgtcaaaatctgcaagctgtctaacctcacagtgcaaatagaataacaaggaaatgacaagttaaaatagtgcacccaaacagaatgtcaccatgagaacagcacagtgctagatgggaaattcagactaaaacaaaataactctgacatcgactattcataacagtataagggttattattcaataggtagttgtctaaatatgaaactagtgggtagtcacaactttccagttaacatgaaaaaaccttcttactctgcaattaaagaatcctgaatgacatagcacacattctcacatttagggacatacaagttcattacagctgttactagcttaattcatggaaaacagcggtatatatacctccatagaaacaaagaacattaacaccgaacatgaactaaactagtaaacacaaatcaaatgaccaaagtggggaagtatgaccatttcacccaataaggataacagttcagaattcaagctaacttaaaaaacaggatgaactgatctggagaagcaaccggcataacagttatctcaaatgttattacttatacctccctgaaaagttcaaaataactgatcctgttgaggaaaacacaattgcctaacaaggcaagtgatctacaaaagcgaataaatgttctctgctacttaatttatgactcaggaaccaaacattaattcaaaaaagtccacgctacatacatcaatgcgcaaaattatcgataatccagtagccaactgtatttaaaaccaagaaatatgtcgagtcccgacaaagaccgttagttaggatattccccttccgttacagcatgaaaatcattatgatgataaaatgctatatcctgtgataaataactttttttttcctttcatgtccttgccgccaaagaatggtaaccaacatacaagtaatgtaagtgcaataatcatatatatatatatatatatatatatatatatatatatatatatatatatatatatatatatatatatatatataactggaatgaagcaattcagatattgatcttgcacatacaactgtagggcaagtaaccttacttggtaaaagctactatatccgaatggaaaaaacaatgtatatacactgcatgtctgcttcagtgcaacgatctactgctactaagcaaaacttcctcaaagtcaaggctgtcctagtccacaatctcacctaaatggctaaatatactaatattgccatggatcagccaaacctcatctgaacaataaaacaatggatacaccatcccatcgttgataaccagtagaaaatggtgccaaaaaacgaatatagaagagaagacatgatgcacccaattccgtcacctgtggcgccggcggtcggcggcgtactgtgatagcgggacgagctccgacagcggggtggcgagcggagtggagactggagtggggatgggcgaggaccggcagaccgggcacgacgcgctccgccgcagccacgcgtccaggcacatgaggtggaacctgtgcctgcactcgggcatcatgcgctgcatctccccttccttgtactcgcagaggcagatcgagcacgcggcctcggcgtccgcccccgtcgccgccctagagaagggcaccttggggtacgaggcgatcaccgcggggtcgagcccgacgggcgacgacgccgcgccgcccccggcgccgccgcgggacgaggagcccggggagtcggagtcgtccgcgacgaagatgacccgcgggacggtgatggagatgtgcccggagctggacgcggaggacacggcgtggcgcgcggagtggaccccctggccgccgccgcggcggacgaccccggccccgccgcggcgggagcagaagtagaaggcgaggagcagcgacgcgaggaggacgaggaagccgagcgcgatggcgaccgcgtacccgacgccgagcgaggagaacgagtcgaggaacgacgccatgacggcggcggcggtggcggcggcgagaccgtggggcggaatggcatggcgtgcgggggggcgcggctggggtgggagaagagccgaggaggggcaaaacgggaagaggggtattttgttttaggtttccggaggggtggatctggtagttggcggcattaattgccggtgaggagggggaggccgaggaggaggggatcgcagttatggcgcggagctggagtgcaggacgcgcgccgtgccgcgcaccgcggtttgccggtttcctctgccgctcgctgccgagccgagggagcggctgggtgagtgagcggggagggggccaaggggggaacgaaacgcgtgaggctttcgccgcgtcgctctccttggaaggccacacggaccggcggatgatgggccacataggttttggcgattctcagcgcgcggaccgaggagaccagactagagattaatgggctgggaatatccaagtctgacaaagggacatacatttgctggttgactaagtctattttaactcccttcttatcttgcttatgattgaatcgcatctctcaaggctcaagcgcaaaaccgggtataacgcctctccaagacaaaaactggtgcaaatcgacttcttcgatggtttaggaaacgtttttttttctaatgtgacaggttggtcatgattgactcggtgagtaagcaagtaagataagagtgtaagacccacgtgtcagggactactctattttccatctctcccgatggtagcaaggcagcgataaggcggtagtagcagccggtgaggaaggcagtccggcgaggcgctcgacgaggtcgggacgagagcttgggaggttgtggtggtgcaggaggacgcgagagctcagggaagaaggagtagtgggtgttgtcggcggtatgggagccgaagaggacgacaatcttcacggtagcagagcatgtcgtggagagaggagaagggtgcaaggaggtcaaccttctaggcattggactggagatcattgttggggggggggggtgatgtcacaagtgaaccctcctagggctggcgacggagcctcgtctcatgagggccaacgtttcagcgcaggggacgatagcggggtaggtagccttgacaatgccatgagcccccagcatgtgtcggccaacacccctctcctcgccaaccctcatgtcgactcgctaggtagtggtgggtaggacctaacggctagcgagatcgctctccgcctagagatctgaggacgattggcccaccgcaggtccttgatctacttgcacaccaagagcagcaatggacacgttgcaatcatccaccatggcgaagccaagaacagcagcacaaccttgttgaagaacccgtgctttgcgtgggcggtcaccatggccacgtaggaaacgatgtcctagtcgactgggaacttgtcgaggagtgcccatggaggcgagctcatcgcgcgtgaggtagagctcgatgagcccgttgcaagcagcgcgacagtggtcaagatcgagcttggcgcattgacatggatggctggcgcaccctcaccatgctcccctcttcccttgcacgcgccgagagcctcccatctactgactcagcgagtcaacctgccacgtcagcgaaaaacgtttcctaacatcaaagaagtcgatttgcaccggtttttgaaaatgtgggaggtagggttcgacttaccgtcggtaaccgcgcggttaccactgttaccggccttatcgcgggggtacggtaatagaaaaaccgcggtaaccttcttaaattcaaataaatttaaaaaataatttgaatttttgataaattttgcacggtttcgtacggttaccgcgcggtaaccgtgcttaccgccggggcgcggtaaccctagccccggcagtttgggaaaccctagtaggaggcgttatacctagttttacggttgagggatgcgattcaatcgggagaagagatgagggagggaaacagactttgttagctgggtcgggatcgagtagttagttcctagtaggctatgtacgaaggtcacatgatcgattgggcctttttagagcttagaaacctggaaatgtcgtaatatcgtgcaaaacgtccgtttgatctcccccactccaactttcatcgtttatccatacaatcgaatgcggaggtttattcatttaacaaccggttcgttttccctctcttggggtagtttggacaggggacaacgatttcatttgatgtggcatctagatgatactcgtagtataggatgtgctagattttctttttgaaacggagggagtacatagtatttctattagaaaaaaaaaacagtggaacctacatggccgggactctatttcttcctccccttcctcaatatctctcctgccactagtggatcatgtggggccatattttttgtttttatttgatttttttttcaatcggactgccattgacatgtgtgtcacattagtgttttttttttctttatagtgtcacataaacaccacgtagccgtataggataaagataaggtcaatgtatcatataactgacacgtaggatgaaacggctttcaaattaacgatagtggtaaattggtctagtcttaagaaatggaaatcaggcgacacatgggatgaaaccgcttttcaaattgacgagagttaaatacttaaattggtccagtcttaacagttgtgggagatttcatatttgatttgcggttaagaaatggaaaccagatttgggctattgtaaagggaagcaaaataagatttttcctaatatatatctcggcctcctccactagttgactgcatgaggatataccatggcttttagagagggatcgcattccaatccacgcgttgatgagaagatcaatatagcatagcacatgataattggggaaaaaaaaaattccccgttgccggggatcgaacccgggtcacccgcgtgacaggcgggaatactcaccactacactacaacgacttcgatattcagttgtcgataggcacatatttatttatcggtatctttgcctcgtttgtaaatatgacatgatagactagtgatcggccatgccagcctggagtaatagcatatgctattacgtatttgcatgtaacacaaaagggttttaagtgtttatcgtcgcaattagatgacacaaaagagtataataagatctaggccggctatatacaccattatacttaaaaaaaagctaaatcgtactttatttgttttacattataagatattttggataaatgttagagcaaggtcaatagtgcagcccactgctagctccaaatcttctatagccaattcatacaatagttacttactatactattaatacttggtcccacctgtcatacacacattacgtcatggagtccgtgctgcagctagttacagatctgtagcccgctgcttttctctctcttcctttatctctttaaaatatgtttatagctggcttatagcctgctattgtacctgctcttagtgagtttagatgaaacatagagagactaaaacatcttccgtataatgtataaaacggagggactacgtaacagtgtcgcccacacaactgatggtacactttgtccctttgcctttgcgatgccttccgaagagacactgggctacgagcctacgagagcacttgagcctaacctggacttggcccgcaagaatcagccagccaggcccacaccacaaaatcctcctccttttcaaactccgcaccttcgtctagaagcttctaactcgcccactagctcccttccccttggactctttggagttgttggaaggaacacgcgcggacgcgcccacgacccctccccacggacggatgccggcgaaagcgcaggcacgccacgcgtcgtcactcgtcacggtgccagtaacctcctcgtgatctccacccccttcattacttccccgtgctaaaccccaacagaggtcccacacgatcgctgacaggtgggccctccctgcgcgtgcaagccgattagcgctaattacccgtcgtctcgaggagttattaccacgcttaaccgcgccaattacttcgccgggttaacgcaggacttaatcacgcggttgatcgtgcccgatccaacggccaggatcgcctcactccgcgcataaaacccaacgccacgactacggagaaaaggaggaaaaagaaaagcaaaaaggcaaaaagagttcgtgcgaaaaaaaaaagaaagaagagttcgactgttcgagcgaggagggagaagaagagggggagagagagagccagcagctagccatggcggagcacaaggaggaggagtcgttggtggagtcggtgatggacaagatctccgacaagctccacggccgcgggggctcgtcgtcgtcgtcgtcggactccgacggggagaggacggccgacttgaaggccaagatctaccgcctcttcggccgcgagaagcccgtccactccgtcctcggcggcggcaagcgtaagacccaaagcttaaagctctttttcgcttgtaggcgtctgtgttcttgcgagcgtgtagatccgaccgcatcggggttttcgctccgctttttctgagtggggctcgtttgttgtactttctcccggaactacgagcgtgtggagaacgtcgcgatccgtgatttctgaagtcaaatttatgctgcgttttcgccacaatgtgagtaggttgtgatcagattagtatttgttcgtgtagatttcgcatctaggttgggatttaaatgcaatagaatagtaactgagcggtgatgttgatgcgctatattcctttatgcttaaaccctgagattctttgtttggtagtgtagctgggtatcttattgtttatatggggatttgctctcctctgatgtgcttatgtttgtggttgcagctgctgatctctttctatggaggaacaagaaaatctccgttggggtactcgctggcgccacggccatctggctgctgtttgaagtcatggattatcatctcctcaccctgttgtgccactgtatcatcctcaccctggccatgctcttcctctggtccaatgcctcaactttcatcaacaagtgagcttcctgtaacttcaactgttattcacaacatatcaaacttaaattgtcagtggcatgttaacttgatctagctttttattggcctatagattaatgttgtgtaattgtgataccttatcatgttaacttcatgtagttttttattggcctgtagatgaatgttgtgtaattgtgataacgcttcttaggacatccttttatcggcatgttaacttataatgtattagtagttttttattggcctgtagatggatgttgtgtaattgtgataatgctccttgggacttacttttatcgccctgttactttgtggatctgtagtcgatggtcacaatgcctggaatgttacacgttctaagcttgtggctgtaatatgttgagtttgtggaatgcataaatggtgaatatgtttagtttgtggctgtaatttctgtcttgcaatttttttaggtcccctcctaacattcctgaagtgaagatcccagaggacctggctgttaatgttgctcgctcactgagatttgagatcaataggggctttgctaccttgagggagattggtcaagggcatgacctgaagaaatttctgattgtatgtcagattggcaacatgattaccttttttaagccttcattgtttaatggtatctcttcgacatgctcaatttgcttatgctggtcctctttattaaggttgtcgtgggtctctgggttctctctgttcttgggagctgctgcaatttcctgaccttgttctacataggtaattattttggtacaacaactgtacaagttaccacatttagcactgttaccaactacagttttctttcttgcagtctttatggtactgtacaccgtgcctgttctgtatgagaagtatgaggaccaaatcgatgcttttggagagaaggccatgatcgaactgaagaagtactatgctattttcgatgagaaatgcctctctaagatccccaagggtccgttgaaaaacaagaagcattagaaattgtaggatgagccgtagaaggtactatgctaatttatcatccagcctgatcactaattgtcggttttaaaggatggctacgattccatgcctttactgatagtaaatacctacattttggtgtggctagtagttgcgatgtgctgaacttcaatgaattcgaattatgccagcatgctctatctatatcctgttttcaaactcatgtttaactcaacttccgcccctggaagctgttggtactaagtgctatcaatatgtgacttatctttatggtattccatttgaaaggcttgggacctatggtaaagtggttgtttgatgtaggctaatccagaggtttgaccgttgagtaggagttgttttgctttggcctccataatgtccaaatgcacgattcttatggatgggttatgctacctgagtttttttaagtactatagtgagcatccattcttcaaaaacaatagtcttaaggctctatagggtgcgtggtgcgtcatacagttatttggcttccattttgtacggtgggtataccttataatgatagagcttttctattagcttatacttctaagttttaactcggtgtgccgtttcattcagtcgctaccaacgatgcacataccacactcagaaaactaccagaaattaaagagttataacaagttcacaatccacatctcaagtcgatgtatacattgttttccttttactatgacaacgaccaaaagcgtgcctggggataattttcagaatcgctatctgtatcatcactttctgtcgatgaagctgctagatcagcgatgtccaatatgtagtcagcaaccttgttcaggaaagtataaaacaatgctgtcagcacattgtagtgaagaagggaaaaaacattaaattttaacatttaaaaattgttgctgcaatgaaatgagcagtgaattttagacttcattatctatctgttgggttcaaaactatcataaaacactactattaacaataaataaaagtacttactgtatgaggtaatagaggtcctagttttactccatcttttccattattaaggcaatagtgtggagtagcacacgtcaagtcgcac

SEQ ID NO: 5308 - DNA, 19899 bp, Oryza sativa
aaatagtctggaaatttgggctaaatggctgggcgtgacatcgcaccaccatacgcctctttgtcagcccccccctcccccccccccgggccaccttcaacacttcacctctgcacaacgacatctcacgacctagcatagctcgaccatcacactagtcagaactcaaaagggctagatccccctccgacccctctcgcacatgggaccactactccactcgtcatggagttccccacgactggatctggaagcataccaaccctagtaagggatgggctccttaaagaagtcaaaggctggctagaaagttcttgttcaataattgagcattcatccttttataactctattgaaggaaaatattagcattttcacttcaagtacatgcacatagagttctgtcaaatggatcttacttttgtgttctcccttaggccttattcggttaatcccaccaacaaggggattgagggggggcacacctcaatacatgtggaattattcctcatcaatctcttttaatccatatctcatggggattaccgaacaaggtcttaggaaggtatacaatgtgtgactccatccacctgaaatccacccaaaggaattttttttaataacagctaaatgtaccgcaaatagacaggtggtagactaccaatagaagatgagtaaagtcactagattatagtccatcttggcgaataaagttagcttcagttccatcgaaactaaacccttcaggaaaaaaaatgcatgcaaattgtggtatgctagcctactaagctatgcagattccataaattttggcatcccaacactaggcttatgagtttatttccaacatcaaagcaaagagcatttagaaaaaatagaaaatgtggattctggttactacaaaacatcatgaatgaacagataaattggtgtttctcttcctaaagaatagtacaggacaataatgccactcaaagaagagacaagtatatgaattctgagttcataaccgaaagggtttatactgaggatcttgagtttttgaaattaatttgtacatttgcatttactttggtaaaacaacattgttaaaacttccatgaagatctttcccagaaaatgacagcattcagatcagatgggcaaaatgatttatcgtgcagctggaccggtggccgttgatggcatccttccaaaattacgctccgtctcaaatgcagcgctgttctgacttacatcaatagagtggtcagtggcatacatgtcataacttgagttagagttgctgttattgtcggtatagaaattgttgttcgcattgctgatggcacaacgcccctcctcgagctcgaggcactcttgcagttgtgccaccacatcggtcatagtgggccgttgtgccgatacttgtgtggtacacttgagtgcgatgtccgtagccttccatacaccatttacatcatggtcaccatgcatacgtgcatccaccactccctcaatattaccctgtgctaggcgctgttgcgcccaatgaatgatacttatgggctctggatcacgtaggacagccggcttccctgtgaccagctccaataggacaacaccaaagctatagacgtcactcttggtcgttggttgcattgttgcctggtacctgcacattcaattagttccacaagccttaaactttgtgtttctcacataaaacactaaataacaacatcaagaaatacatatggattaacatactctggatccacgtatccaggtgtgccaacaagcgtgttcgtagatacatgtgtgccattctcaagattgaacgtcttggataagccaaaatcagcaatcttagcctctagcttcgcattcaatagaatgttggtagccttcacatctctgtgaataagaggcggattgcaccacttgtgtaggtactctagccctgaccattaaccaggaaatttaattactgatcaaccttctagagaaaatgtaaaatcaaacctcacgaaacagtattacaattttaaagtagttaccttgagcggattccagcgcgattcgaagcctctctctccaggttaagtatctcccgttgtttcttttacctgcaaataggaagagaacacagaagggggagatatcatgaggactatcaaatgagccactagatgaagttttacaatgtaccctgcgaattgatcgggaacaacaacttaagtacatacctgaaatatgttctcgaagggttccttctgacatgtactcatagacaagtgccatgtatttcccatccttgcaataaccgatcatagatacaaggctcttgtggtgaatccgagttaaaatctgagcctagacaagcaaaacttgactaattaatcatacttttcttagtagaatctttatgtagcaagatcaaattcaaccgaagaaattctacctctgcgagaaattccttatccccttggttggaagattcagaccttaatttgactgccacttgagtgccatcttccaagaagccatcgtagaccttcccaaaccctccttcgccgagcactcgctgaaagttgtttgttatcttctctaaatcattgtaagtaaaccgtcggttctcaagctgcattgatgagccatgcccatggctgccatttgtcggcacatagctcgctgtctcattctgcggctttacggaagtgttcattgatccttcataagcgaagaatggaactactagcatcagaaatgttcaaggacagagaaatagagttgataattgctatgtttgtaacaagcctcaccttgcttcttttttcgtcccagaaggcaaaagagcagtattgtgactgatactatcaccaaaaccagaactacaggaacagctacatagatggcaagcttgctcttgtgttttgctggctgacatgaattgtcgttggtgcagaggtttgggttatttccgtatctgttgatggaatgaagatgtttagccaaatcagtctattttgtcaaattgactgaatttggacattcaaagattactaagagaagagtgggggtgtacttaattactttatatttagggtaccatcttgaattcttttgagaagtccagatggaattgaaccattgagttgatttcctgtcaaatctctaaagaagccatatgcccataaattatatacatatgtcagttacaaatgatgctaggcaataaagtaaaatttgacaggagttgccaaacttacaatactgccaacgaaggcaactgtgaaagtgcatctggaatcgaacctgtcaaattgttgtttgacagatccctgcaagatatgaagcaagtcttttaacgcaaaattccacaaacggtcaacaaattaacattctgaacctcataacatacaagttttgaagagccttgagattcgcaaaagcggacgatatctcaccacttaaaccaccggatgacagatttctgcaaaaggaatatgatcagatgaccgcgagttccatacttccataattccattatgcaagtccaatattcagtactccctccgtcctaaaaaaaaacccacttaaacacggatgtgacacaacatagtacaacgaatctggacatgctcatgtccagattcgttgtactatgtagtgtcatatccgtgtctagttggttttttttggacggagggagtacatgtggactgaattacttacatgtctgtgattcttgcaggtttggagctgtcatagctgcatgtcaacttatcccacgcaagcgtctttggaacgcacggatcacccatccagttcttcttcacctgatacttttccttgatcaccatcatggcggaagctgtcaagtgcacccatgttttcgatcagtaacacgcacaaaccatcacaccgtacgttttactcttatgtattctaccgtctgtctatctacataccatcctgaccatctgtgccaacggtggcggtggagaagacggagaacacctcgatggcgttgatgatcggtggcagcgtcgagttggcggtggcgttgatggagatgttgtactgcgggtatcgtaggaacgggttgctgttgaagatggcgtcggcgtagaggtacgccggcgtgtagccctggctaaacaccatgttgccgttgaggttgatgtagaactggcgcgtggcgttgctggagcggagctgcagctcggagaagtgcatgacggtgatgtaccccggcgccgggtccttgggctgcgtgtagggtacccaggcgaactcgatgttgctcgaggcgttgagcggcgcaatcgccgtctgcatcaccttcgtcggcgcgtcgaatacgtcctcgtccgtgtgctgcaccggcctcgtcgtcgatacctcgacccaatatgatggcgagacccaaggcatccatattctgtcgtgtggatcgtcggggtacctggccattaatcggttgtgttccgtttgatcaattcattgtaccctcttggattgactatttatcatctttctttttcaactgtgtgtgcccaatggtaaagatcaaagatgtaaaccatttctattatctagaaaaaaacttggatgaatcttttaattactcacctgatgaactcggtagtactaattgggccaaagttccatctgccgaacaaggacaggccccgcttgtcgttcgcctgcgggtagagcttcttctcgagaggcctgaggtccagcccggagatgaacggtgtcccggtgccggtgttcacgaggcaaacctgcacgaagtcgtccggcacgacgacgatggcctccaggagcgtcgcgccggaggggtccgagatgttgaccatcatccagaagttgacgccgatgtagacgtcgaagattggcagcttgctgaggccgtcgtagttgccgtacatgaaggtggcgcggatgaggtacttgaggccggccacgagcgaccggagcgtgtagcagttgcgcgcgccgtcggggaagctgcgcacgttgtggtagcgcgccgagagcgccggcgtgatgtactccgccgagatgttgtggaacgagccgccgtcggtgaagccgtcgtccgccgcgtaggatatcttggtcttgtcgtccacgtagctcgtcttccccgggaggccgcagtctacgctaatgaaacctggagttcactttacatttaattagcaactgcgaaagtatgatagcttgtgcatattgatttcactgtgaagcgctacttaatgcccgatgaaaatttgtgtttgtacctttgctatcaggctgggcacgagcttggagcacgccggcggtggcggcggcgacgaggcatagtagaattaaccacgaccatgccgccattgttcccggcgttgaacgccccattgcacatgcaggcggtgagctactagaactgtaatctctatgtgaccgtgctctagctatttatagctagccttttttttttcgggctatgttcgttggtgggtattgggaacccatctcccacgtactaaaaacgaaacggtctaacgtaggattaattaagtattgtttttttaaaaaaaatggatcaatatgattttttaaataactttcgtacataattttttttttgaaaaaacataccgtttagcagtttgaaaagcgtatgtgtgtgcagaaaatgagatggagggagttgggaacctaattgaaacgaacgcaaccttaggctgtgtttgagggagaggtgattgagaagattgggaagatacgtaaagcgatgtgagccattaacgcatgattaattgagtattaactattttaaatttcaaaaatagactaatataattttttaaagcaactttcatatagaatttttttgcaaaacatataccgtttagtagtttgggaagcgtgcgcgcggaaaacgagttacaatctctccaatctcatttgaaataacgcagccttattccagtgaataaccaagtaatcaagctaataatcttattactatcacttactccagctagtactactattatagcctaatgatcatcacaaagactccatcgtgattagtttaaccacgtcagcacatctgtctagtaacatagcttgccaagcgccgtcttcacacatatatgtggactgtcactgacgagtgggccttttctgacattttactggccacctctttgtaggaccggcatgtcaatgaccctgcaagtcagcaaggctgcaagcccgggaagagagcaaagacgagcagatcacatgggcacgtagttgacttggatggcagctggtcaactgcttggctggggcacgactcgaggcccgagatcggtggccactggccacggcccataggcgcttgacttgttctctgaactgggtacccctgatgggctatggatcgccgtggagatagggtagcgatcagattcgctctccacctcccccctccctccctcaacctggttttcttttttggcaccgcgttactttcctattttagtaaatttatacacctaaagtttacacatctaacgtttagagaccaaaagtttataagtcaaaagtttatatatccgattcaaatttgaatttgaattcaaatatttttttatatatagtatttctatacatctaaagtttatacacctaaagtttatatagatctaaagtttatagacctaaagtttataagtcaaaagtttatatacccattttaaatttgaatttgaattcaaatatccgattcaaatttgaatttgaattgaaatatttttcatatatagtatttctatgcatctaaagtttatacacctaaaagtttatagatctaaagtttatatacccgattcaaatttgaatttgaattatatcttattcaaatttgaatttgaattcaaatattttctatatatagtatttctatacatctaaaatttatagacccaaagtttataagtcaaaagtttacatacccgattcaaatttgaatttgaattcaaattttttatatataatatttctatacataaatttttctaacttttcgctgggcgggtgggggagcgatcacccgcccattagcctttccgctctgaactggaaaacatgcagatagaatcatttgccatgaaagatttagttcctcttgcttgtctgccttttaaaacttatttacgttgtacctataataacatgatagtcttatgtacattctcatgaggttagaggtcaggtttaatataatcattatctaaaagaaagaaagattattatgcaattgcgagaatgcgaggtaggtagaagagtttgttctccactgattcaacaaaagcagtactacgaaattgaaagtcccctagctagcaagatttcggtgcagaaaagtataaactagtactctcttcgtagacatacatatagttttatttagcaattttacagttcttgagaagttttatatcatgagataaaaaaattagtgtaaagtttggtacctcttgatacctacctaggtaccaaatttataattgaaaaagtggtaactcatggtactttctaaagaactataaaattactctattttttaaaaaaatgaaaagaagtgttagagtactaagaaggaatttagcatccatcattgatagagaatatgtagtctagtacttgcagttatctgagtagcaccccaagatcctgagttcaaatcttcgtaggagcgaattccgttcccaatttaaaaaagctgcatacatcggttggatgtagatgccagctaaaaaatactctttacaaaactagcatggtggcccacgcagattgtgcgactagtatcattatattttctctcatgtaataacatatatattttctcaatgtattattaaaatatattaaaaggacaacataattttaaattctgtactagctttacgaaactactaatgcgtgtaatatttatattgtattttatatacgtgttagttattaattatttttaatatcaaattttagatatctgtaaattatattcctatatggactctagactcgtctttcaatttttttttaattccaaatttttgttatccgtaaattgtatttttatatagactataggctcttcttctaatattatttatttttaattctgattttttattttttttctaattgtatttctatgtgtactctaaactcatctttcatattctttaatttttaatttcgaatctcagttacttctaaattgtattcctatattgactttagattcttcttcccatatttttttaattttgaattttagttatttgtaaattgtatttttatacagtctctaaactctacttttaattttattatgtttattctgaattttagttagttttaaattcctatacggactctgtgctctacttctaatattccttatttttaattccgaatttttattatttcttagttatatttctatatcgactctatactctacttctaatattccttatttttaattctgaatttctattatttttttaattgtatttctgtatggactctatactcttcttctaatattctttattttttaattccgaatttcagttatttataaattgtatttctatatggactctagtctcctcttccaatattcctttttgttaattccgaatttcaactatttctaaattatatttctatatggactctgttttttcttttctccgattaatatgagaatttctaggctgtgagagtgaacgtggaggctcttttttctattcctttaataagttaatagataaaaaaaatattgatagagaagaaaatggtgagaaaacctagttaccttcagttgcatcaaagctaaaccgaaaaaaggcatgcacacaaattgtggtaagctatgcagattccaaaagttttggatcccagctctaagcaaagcagcatttagaaatatggattctggttaccataaaaacatgaatgaacaggtacattggtgtttctcttcctgaagaatagtaggcgacaataattccactcaaagaggagacaagtacatgaattctgagttccaaaccaaaatcttgagtttttgaaattaatttgtacatttgtattttaatttggtaaaacaacattgtttaaaccttccatagagatatctccctggaaatggcagcattcagatcagatgggcaaaagaatttatcgtgtggcgggaccgggggctgttgatggcatccttccaaaatttttctccatctcaaatgcaacactgttctgactcacatcgatagagtggtcagcggcgtatgtgtcataacttgagttaggtttgctgttattgctggtgtagaagttgttgtttgcatcattgacggcacaatgctcctcctcaagctcaaggcactcttgtaactgcgcaaccacgtcagtcatagtgggccgtcgcgctgatacctgcgcggtacacttgaatgcgatgtccgcaaccttccatacaccaattacatcatggtcgccacacatacatgcatccaccacttcttcgatattaccctgtgctaggcgttgttgcgcccaatggataatgcttatgggctctggatcacgtaggacagccgactttcctgttaccagttctagcaggacgacaccaaagctatagacatcactcttggtcgatggttgcattgttgcttggtacctgcacattcaatcagtaccacaaaccttaaactttgtgttcctcatagaaaatactaaagaacaacatcaagaaatacatataaattagcatactctggatccacgtatccgggagtaccaacaagcgtgttcgtagatacatgggtgccattctcaagattgaatgacttggacaagccaaaatcagcaatcttagcctctagcctcgcattcaatagaatgttggtagccttcacatctctatgaataagaggcggattgcaccacttgtgtaggtactctagccctgaccattaaccaaagaatttaactactagccaaccttttagagaaaatgtaaaatcaaacctcaagtagcactactacaaatttaaagtagttaccttgagcggattctaacgctattcgaagcctctccctccaggttaaatgtctcccgttgtttcttttacctacaaataggtagagaacaaagaggggtgagaccatgaggactataaaatgatccactacatgatgttttacagtgtactccctctgtttcatattataagtcgtttgacttttactttttgatcaagtttatagaaaaatttagcaatctaaaatatcaaattagattctttaaatctaacattgaatatattttgataataagtttgtattgtattgaaaatactactatatttttctataaacttgatcaaatttaaagaagtttgtctaagaaaaaaaagtcaaacaacttaaaatataaaatggaaggagtactctgcaacttgatcgggaacaaaaacataaatacgtacccgcaatgtgttcttgaagggttccttctgacatatactcatagacaagtgccatgtatttcccattcttgcaataaccgatcatggagacaaggttcttatggtgaatccgagttaaaatttgagcctaaacaagcaaatgttaactaattacttggacttttcttagtagaaatctctatgtagcaagatcaaattcaactgacgaaattctacctctacgagaaattccttatcaccttgattggaagattcagacctcaatttgactgccacttgagtaccttcttccaagaagccatcgtagaccttcccaaaccctcctcggccgagcactcgttgaaagttgttcgttatcttttccagatctttatatgtaaatcgtcggttctcaagctgcattgatgaaccatgcccatcgctgtcatttgtcggcacatagttcgcctcattttgcggctttatagaagtgttcattgatccttcataagcgaagaatggagcaactagcatcagtaatgttcaagaacagagaaatagagcagatagttgctatggttgtaaccctcaccttgcttctttttttgtcctagaaggcaaaagagtagtattgtgactgatactatcaccagaaccagaactacaggagcgactatgtagatggcaagcttgctcttgtgttttgctgcctgacatgaattgtcgttggtgcagaggtttggattatttccatatctgttgatggaatgaagacgcctagtcaaatcaatctattttctcaaaatggttgagtttagacattcaaagattgctgtgagaagaacgtggtgtacttaattactttatatttagggtaccatcttgaattcttttgagaagtccagatggaattgaaccattgagttgatttcctgtcagatctctaaagaagccatatgcccataaggtatatgtagatgtttgttaatacaaatgatgctaggcaataaagtaaaatttgacagaagttgcgaaacttacaatactgtcaatgaaggtaactgtgaaagtgcatccggaatcgaacctgtcaaattgttgtttgacaaatccctagaagatatgaagcaagactttgcaaattttaatgcaaaattcttacaaacaaggttaacaaattaacattattcaactcagaacgtacaagtattgaagagccttgagatccccaaaagaagatgatatctcaccactcaaaccactggaggacaggtttctgcaaagagaatgtgatcagatgaccctgtttcatacttccgttatgcaactccaatattcagtacgtgtggactcaattacttacatttttattacgtgtttggagttttcatagctgcatgtcaaactttcccatgtaaattctgtcggaatgcacggatcacccatccaattcttcttcacctgatacttttccttgatcaccatcatggcagaagctgtcaagtgcaaagatgatttcgatcagtaacacgcgccaaaacaattaggccatttcacttgtgtgtgtgtgtgtgtgtgtgttctctatcgtctatgtacataccgtcctgaccatatgtgccaatggtggtggtggagaaaacggagtacacctccatggcgttgatgaacggtcgcatcgtcgagttataggtggcgttgatggagatattgtactgcgggtatcgtaggaaggggttggtgttgtagatggcgtgggcgtagagatacactggcttgtagcccttgctgtacatcatgttgccgttgaggttgatgtagaattctcgcacatcacggctgggggggctgagctccagctcggagaagtgcatgatggcgatgtaccccggcgacgggtccttgggctgtgtgtaggctacccatgcgagctcgatgttgtctgtggcaaacattgggacaatagccgtctgcatcaccgccgttggcacctcgaacaggtcgtcgtatgtctgctgcaccggcctcgtcgttgatatctcggtccaatttgatggcgagtcccaaggtgtccatactctgtcgcgtggatcgtcggggtacctggacatgaatctcttgaaaatatagcaccttgaattgactattcatcgattattttcaccagtgtataccggccaacaggcaaaagctgaaaatgtaaaccattttctgtcatccgaaactcaaactgaggtcatttatactataccatactaccgtatattagggtggtcatactaattactacctccgtcctagtaatcgctttgactttttttcttttaacgtttgaccattcgtcttatttaaaaaattagtgcaaatataaaaacggagaagtcatacttaaaaagtacttttgataataaagcaaatcataaaaaaaattccataattttttaataaaacgaaagatcaaaagttataaataaaaactcaaagcgacaagtattctgggacagaggtagtatccaatgattccattctattctattaaaattgacacttgttttatcggtattatagtacaccatcggtataaatattatatggatattatggggaaaatatgcatatttataatttgttgcgcgcgcgtgtgtttggagggacgacaacctccaccaccactatcgttgctatttgataatttaacatttattaaaatgggcttccattatttgacatcttgacctaatttcatttactcagatagtcttacatgtcatcctcacaagtatcaattagagcaattggacaacgaaaaaaagtattaaattatcaaatttctcaccgacggtgccatgcccatgggagggcttggcattcgtcatgaatgtaatcgacaagcgaacgaggctggctgcttgattactccgctcgccactggccgatccagtgaatacccctcgccgtcggcctcaacatccaggcaccgctgaggacgtagagaggcgacgcgatcagattgaggagaccaggcgcaagagggcttccatctccctccgccgtcaccgcctctcgcctcccccttatacggctcatgtttaggcgaagcagcccgcgtatatcaacccgctatcaccccctcctcatcgtcgcttgaagcaggtacagtggcgtggattcttttttagttggattccttttcatttctcgggtactttttcctctgctcacgactgtcgaaagtcctaacgggcgatcgatcgctgggcacgatcggtccccctccccacatcgatcaccctctcctccacgtggtttcttttttttactacattactttcctattttagtaaatttatggacctaaagtttgtacacctcaagtttacacatctaaagtttatacacctaaagtttagagacccaaagttcataagtcaaaagtttatatatccgattcaaatttgaatttcaattcaaatatttttatatatagtatttctatacatctaaagttcatacacctaaagtttatagatccaaagtttataagttaaaaatttatatacccgatttaaatttgaattcaaatattttttatatatagtatttctatacataaccttttctaacttttatttttttatttttttaaaatttatggtgtagtaggaagagaagaaggggaggaggaagggggagcatataaggggggatgggggcgatcacccgcccattatcaccctcccacgactgttctagatgagattacgtattttgtaaaaaaaaaaaacctctcaaaactatcgatttacatttaggtctgttatcgttttttcaccgttaatatatcatcggacggctgcggataggtgcgaacacgtggcatgcttctccagccgagaatccggccgggactctatctgtggtgcaacatggcccaatgaatagacgggtttcgaaccctgaaatcgatctataagatacctaaagacactagcatgtccagcgcttcactcttgtcatagtgatgagcaaattcagaacatggaggaataataactaaagaaaacaggaattagttgcaatttgtgtcgttccattcttcttcaattccatctcaggatgcattaccggtccaacaccaatatactattcgtactaatagcttgataaactgatgccttaattgtattagcgtgtagagaggctttgatttgtcttgtgaaacgggtacacccaggattaaaatgctgggtctgccactgttgggttacttgatctggaaagatgtgatcggctgttcttttgacggcagaagagagagaagtaacggaagtaaaaacggcatactttaggtgctacagaatcaaaaacgtaaacttttgataatctaaaatcaattttcactcgtgcgcaccagggaatcaaaaacgtaaactttcgatgatctaaaatcaattttcactcgtgcgcacctgggaaaaattttccagtcggtcacccatcctgaaattactccagattaacctcagagttcttttgagatcggcttccgaaaaaaactataacttgttggtatgagtattctattaattctattaagccctgggtcgggatgtcacattaaatttcacctaaatggttaaatcaacatgcacgtaaaggactcaaactcggatggatcgttactcacctgatgatttcggtattactggtcggcccgaatttccatctaccgaacaaggacaggccttgcgtctcggttgcctgcgggtagagcttcttcttgagaggcctgaggtccaacccggagatgaacggtgtcccggtgccggtgttcacgaggcaaacctgcacgaagtcgtccggcacgacgacgatggcctccaggagcgtcgagccggcggggtccgtgatgttgaccatcatccagaagttgacgccgatgtagacgtcgaagattggcagcttgctgaggccgtcgtagttgccgtacatgaaggtggcgcggatgaggtacttgtgcccggccacgagcgaccggagcgtgtagcagttgcgcgcgccgtcggggaagctgcgcacgttgtagtagcgcgccgagagcgccggtgcgaagtactccgccgagatgttgtggaacgagccgccgtcggtgaagccgtcgtccgccgcgtaggaaatcttggtcttgtcgtccacgtagctcgtcttccccgggaggccacagtctacgctgatgaaacctacggcgagtcggcgacagcgacacacattagctagcgataactgcgaaattatggacaatctatgctagatcttagttcattgattggcatgggttgtacttgtagctttgctgtcaagctgggcacgagcttggagtatgccggcggtggcggcgagggcgaggcactagaacataataaaggctgaactctctttgtgatcgtgctctacctatttatagccagtcttaatccagtgagcgtaaccatgcaggtaatcaagttggaagaaaattgcgtaggactgaagtcctacccttatctgaaggacttgattcctctgcacgacacctgtcccacatgaatctcagaatagcctttctccctcatctctccagttcccatttatctatcttcctatcgtcggcgaggcgtcaaggtcaagcactcaagcccgagcaccaagcgcaacgcgctcgtgccctgtggcatcaagctcatgaggacagccgaaaattagagtcaaatttgcctgccgacctgccgcgagaaaaatctttggtttggaataagctgggttatcgattagatcgaatccatctccatgaaccgcaaaaagtttgcctcagtgaaattgttcagtcagtagatttttctttcctttgcttttagtctgtatggtgcactgcactgctctggtggttgaagttgattgagctttcaaggatttctgtttgccggtgaatcttctagcttccatgattacaaaattgactattcacaattcttggtgagtgcctcatgtgcaagcttggatgctacttagttcctctgacacattgtggatgccactcgattccggtgacaacggcagccagccgcgagctccaaggctgctggtcggacgtgagcgagaagaggaaatatggggaattgaagagaaaagagagttagcctattcaaagatttgcgcaagaggtgccggcggcgaggtgaccggcaggcggcggggcgtaggaggcggcggcgagccgtagagatcccgacggcgaggcggggctcgcctgcacacgggccgccggatctggctcctttctcgccggatccggcgcccccctccctccctcccactagatctggcctctccggcgaggaaggccagctcccgacgacgagacaggtacagcagaggaggcagtggcggcggggttgagggcgcggtggcacgtggtgaaggggcaggcggcagatgtggccctcggtgacggcatcaggcatggggagtccagcctgtgaggcccgcgtctacgtcagtgagtggcgccggaggcagtgaaaaggagaatgtgtggaggtacggcggtgcttgaggtgtagggggaggctggacgatgaggggtgacggagggaggctggcgcggcacaggtggcgccgacggcagcgggaggtcggcgtggcatgcgatgcggcgggcggaggcatgagcaagtgcatccatggccggcggggcacgcccagcgcgacgagtggctgtgaccagcggcgggatgtgtaggcgtggtggtgaccggcgatggtcgtggattgggcttaggtgctaaagggatggtgtggtggtcgggcaatggtcgttgtacaggatggttgtgtggagttttgattggaatcgctggcgaaagccttgccaggccatgggccggcatgacgacaacgacaccattaggcgtcgttccccttcttgaaggcgtcgttctggcgttgacctctcctggcaccaagaaccttcccccgtgcaacggtagtcattggtggactcctgcattgcctctgaagctctacaagcctaaggtgtttgacaaggtcttctctgtcttggttctgtttcttgctctacggcaagtgttcatcattcttatttggttactgctgggtagagtcagagctgcttcgctgtaggggtgcgacgaagttcggcaacgatgacacactgcaatctctttataagattgttgatgccagctgtatgtaggaagtggttccttggttgtttgggctaatgtccttcatgggtatcgtttatgcttgttcttttggcgttagggtagcattgcagtgaagtcgaagctgttgtgtcgtttgggcggcaagctcagtaacgaaaacatgtgtgggctgttgtgtcgccactatgacaagcttggtcgatgccttgtgtcgggctccgtcgttgtaatttaggttatgttagctgttagtgtggtgttgtagttgtggttttcgttcaattttccctaattaactggacactgtaaagtttggtcctgtttactccttaaattggggcaccttattcttaatataaaacgtcggcaatggcctgatcgttgaaaataaaattgtgtaagacatgtgtcaagtagagagacaagtcctttgaacgaggtgtaggacttcggtcctgctctgtaattttcttccgatcaaggagagatggattctaatatgtgatgtgaatgtacactcttttttttttcatgtaaactaaatggttataaaataattttttaaaaaaataacaagatagattatgtaatatattacttcacaaattaacatacaagtttaaatttgacttctctaagtaggaaaaaaataactagtcgattttgaagttgcatattcgtagagtgatacattacatattattaatacctatcctgtcaactttttttaaaaaaattcataaccatttagttgacatgtaaaaaagggtgaacgtccaaccaagtgcttaaaatagttttctataatcaagataattatatcactatcactagcaaatagttaccgtctccatgttttaatatcgggaatgctaggggacgggataccgtcccccaacgggatagctcctctccacaacacgattcgcgtccctcgccgctgccgcgcccgtcccccgtcgcctccgcgcccgtccgccgccgccgcgcccgtcccctgtcgacgccaccgccgccgccgctcccatcccccaccgccgtcgtcgctattctccgccgccgccatcgccgccgcggcgtccgtcccctgtcgtcgacgccgccgccgccgccgcgcccgtcccccgctaccaccaccgtcgccgcgcccgtcctctaccgccaccatcgccgtcctcgtctacaagggacggctgcagggggcgaccgcgtgtgtcggggtgctcctccccaacggtatgcccagctatatctagtaggaatcacctgatacctggtaagtatcatccgatacctcgcaagtatcacgtgagacatggtagaaatcgtctgatacctcatgagtatgacgtgatacgtggtagaaatcgtatgatagatgacatgtatcgtatgatacctcgtgagtatcacgtgatatgcggttgaaatcatctgatacctgacaggtttcacatgatacctcgcgagtatcacgcgatacgtggtagaaaatcgcatgatacctgataagtatcatatgatactttgcaggtatcacctgaaacgtgtgtagaatcgtctgatacctgataggtatcacacctgatacctactcaggatcatcatgttatgtagaatcgtctgatacctaataggtatcacacctgatacctactcgggatcatcctgttcgaaaacgggattccgttatatagcagccccctttaatatataacgttgttggcttttagcttagcgtttaaccatttatcttgttaaaaatttacatatgtattattagttttgttgcgacttaaaaccataatcttcacttatttttatatatttatactaaatttccaataaaaagaatattttaaatgttatgtgaaaagttaaactatattagactatcgatgatcactaacgagtaacgactccattgtgattagtttagcgccgtcaacacatccatcctctgtaaggctgtaacacagattgccactgacgagtgagacttttctgaacttccactggtcacttctttgtaggcccgtcatgtcagtgaccttgtaactatagcttggaagagacaaaaagagatcacatgggcagggagttgactttcatggcagctggtcaactcatctgctgggtgcacgacatga

SEQ ID NO: 5309 - DNA, 27933 bp, Oryza sativa
tgtaatgaatgatattttagcctttgggaataagttaggtagtttatcaaatttatctacaatagaatagccttacctgcatactttttgtggaaagcctctttccagttaaaaccaggatccggagatacttgataaatgctattctgtacatgataatcagtgttctgtacattaccagctgtaggtgtgctattgcagtttatatggcagatgccgaagaaaagggagtaattcatttcccacaggtggttgtcatttgcagcagaattccaaggccttctaagaaagatagatagttgtcaacaataaagtaatgcttaatgaattacacggacaagagaaaaaagaaataccagcagacaagaccagcagctaccaaggagcgcatgtcaagaaaactgaaaatatgaacaagcacatcgtatggtatatgtggtacacctgcaaaatgggcacaaaacaacgcatcacgatgactgccattagttagtaaatatttgtacatttgttcttttaaatcttgacaggacactgcagcttcagtaggtaaattagtttaaaactgccgaaatctatcctagcaattgaaaaatgatgaaggttgaaagcacagacaacatttaccagtttctaaatcgttgtttaccatcctaacagatcagtaagcatgatagtgtaaatgcacatcatacaacacacttgacaggagcctgtcacatacctggatcttgttgaaccctagctcgccgtttatgtgcatcaacagaccgcttgatctctgaaacagcatgcgccttcttttgctttggtagggaaccgtctacagcttggagaagaccattagctgcgcttaacgcatatcctgtctgtacactaccgggtaaaatgagttaatacaagctcctgtgtgccaactgccaatataatagaacaatgacattaagccagaaacatagcatgctaagtgagcatttgcgtgccattcgtctttagttctatgccttctataatagaacacataatcacaagtcctaacagacatcatgaatttatgagcgacaagcacgacacatttccaaaaaaaatctaacaatgcatgacctaaaagtacacaattttccaacaaattcgaactatgcacgagtcatgaccttaaaattcaacaggtcagtgggatagtgaggtggacgcggctgttatagacatagccatcgacagacacattatctggagaaattgcgcataagcgtgtatgctcaaaatcacaatttgtaagggatcggtgctttaattgatcgagcttggtgcctacccgctcaaacaaagtttcataattggacagatcaacataagaaagcaatgcctcttcacgagttgctagagggctagagctggttccactagacagaaacagtgcaaaatcactggaaattcgtcagaattgtgcacatctggggagcggcacgagcttggaagagaaaggggcttactcagggaggagccggaacgcgagcagcacgtcgccggcgacgagagcctgggcggccttggggaggtcgccgtacccgattcggaggagcgcggcgatctcgccgcacgccgtcgggtagtcccacggccgcgacagcgcggccgatatccccatctccctgtacctctccgccgcacccgtctccctccgccgcggctgccgccgcctcaccggcatcgctgcgacctcggaggggccgttccctcgtggatccgcccggacaccgcgagccgccgcgccgcctcgtcgttccgacggcgagatgttccgggcggcctggacgccgccaccgacgcggcccttgtggtggtttgggctacgcgcgtgaccggagtacacgtgtcaggcttccatggatgggtgtgatgtaatgggcttccggaattcgctgaccgtgatgtttggcccgttaggcggcccaggatgacccagtttagaacaaaatgttgctcgacttactaatctttgtacgtgttttagtgtaaactttgactgatataaattcatgtttaattacatagcataaaagtgataatgttaaatgcataacaaaaagtacttcattatacgtttagagagtcattttgaaaaatatttggcttaaattacagtaagtacagacgataatatagatttgatgatagtagaaagtaatgcacctgttggttttgccatcttaaacgatgccacgtctgttacatttttattcttagtaaacacatgtagcattaaaaagtactgtagcagtagacattttctgagcatgtcacaacgtacaacttcatcttacaaggttctgagctcactcacattgcaattctaatgaaccgagaccattgtttggcctgcgtcaactgtgtcgcaaacttgcaatctatgctgatttctatttccctacgatagctgaccttcctagcacatcttaggagaaaactcggtctatgacaaacacggccaagtaagccatgcaatttctgtttcttggcctaaaaacgacgtctatctgacaaaatttcccaatgtgttctgcacaatgctcatgccgaatccaacttgttctgcttgagaaattccaggtccttgagttgccgctgcgctgcttccttggacacggtcttgacgccggggcccttcctctcgccggcagccacctgcttcgccatggaggtcactatcctctcgaccgcctgcctcccgacggaggggaagacggcgttcagcattttgcacagcagcttcacgtccacgtcttccaccatgtcctgcccgaagcagcacacgtagatggcctccagggccttctccgcccgcgcttccattggtatctgtggcgccggagccttcagctttgctcttttctgcaataaaattcatcttctcttagggaccaatttataggacatatagtatgcattcaaatttgcagtgcagggacatgttcttccagaaaagttgctgaattaagcatggctacctcctttgccgtcttcatcatgtcgaggaacgtctcctcctcgaactcgatgtcgttggagaggcggagccgcgcgacgccttccaagatctcctccgttttcagcagcccgccaccaacggcggccagccagcagcacagcagaacgtagaagggatctcctgcctgtcaaacaacggaacatatgctcaccaaatcaattaaaagaacatttttggcatttctgcttggttttgcatcatttttggcattgagaagaagaaatcgacggcgagaggagcgacgggtaccttgccgcggcgttcgttgaaatcgtagaaggcctgggagtccatgacggtgcacttcttgctgacgcggcggcggaactcggcgaagtcgatcatgtcgccgccgacgccaccctcgtcgctcaggatgcgcgccacgaggcccaccacggggagagccccgatgaggcggcccgcgatggaggacggcgagttggggttcggctccatgtacgccaccaccgttccatgccgccggcgccggttgggggcggacggcgatggccggcggtggcgcggcaggaaggccgaggcgagcgagaacctgtgggcgacgggtaacgtccccattgtgtgtggtggacgtggcgcgcgccttatctgctcatgcgcctgcttgactgaagccagcttggactttgggggtggcttggctagttggcttcgctactgtgctacactgcgctacacttgtggtagttggttcggtactcctaatttgcacgcaaaacagtcacaatcattgaattttattgagtaatttcacaaaactacatgtattttgatcaatatatcataaaactacagatttaaaaataggaaaaagtatgaattacctccctaaactattgcgacaacacgaattaccccccgaaccacaaaatcggacatattacacctcaaactattgataccggataaattaccccttgactcaatcctgagcggtttttcttctacacgttgcaccgacgtgaaaatacaatcagcaaaaagaaataaaagaaaatataggacccacctgttagtacccctcttccccctcccctctcttctctctcgggcgtgcgtgaacgggcagcgggcagggtcgcggcgcaggaggcgaggtggcggcgaggttctctctccacctcgttccctctctctttctctgtggtgccgtcgggagagccgagcaaggaggaggcggcggatcctaacaggcggtggaggaggcgaggcgaggtggcggcgaggttggctctgcaagcgtagtggaggaggtgaggcgagcgtgacggcggagaagtcgaggcggttctgctcgccgccgtctcgagatccctcggcgaccctcccacgactctccctgccggcgccgtgaacgaccaccgcactcctcccccgacgagcgtgtgagcggcgacgcctctctcgtttccgcctccatgctgggcgcgctcgtgctcctcctatatggcgagcgtgtgcgcggatcgcccgccgttgcgagctcgccgtggaggcggcgagatcgacgacgagctccactacttgccttgatgcgccagagatggagaggggggaggggcaaagaggaggggggagaagaagaggattggctgatagtgggccccaccatatttatttgttatggctgacaagtgggtcccatatatttttcttttgttttggctgatcagactgccacgtgtgcatccacgtaggaccgaaaccaccctggatcgatctaggagggtaattcgtccggtttgtaaagttcaggataaaaaaattagtattgaagtttagggttaaaaatcggacgactgctattgttgagaggggtaattcgtacttttttttcttgaaaatatgtatcacaaaactatagattttagatattatattagaaaactacagaattaaaatcagttttattacaaaactataacttttgaaactttaatatgttatggatataaactctaaaatatatagttcttttataatttaatcattaaatctgtagttttgtgatacgatactttaatttgtaattctaagataaatttgacactaaatttgtaggtctgtgatacacatatttaaatatgtattttttataatagtttaatcaaaatatatgtagttttattatatttgttttcacctagtactcctaccagtacgcgatgaacgattacacccagatctgagcagttccaaattggccccttgaacaggcttgcacgttttgagcagttgagctttaggggacaccggaacatcacagtttgctgcaggatggttagatattttcagggtaaggaccattttgagcacaggtaatcgttattcttaatcatttcattgttggtcatacactcataatggtgtactctggtccatttcacatcaagtggctgggcattggcaatctggtacatccattcttcccttgggcactggtagaaagaatcaacctgcaacattcagatcctttgtctgaatgaatgatctaactcactcgtaggagtactagttacgacggggtaagtggctagacacggtgaaacggcaaaatcgacaaagggccgggaagattatgaacaatatccttcgtcagatgtgaaacagcacacacaacagatgagcctacaactgacgcgataaaagagggattaatcataacccagcccagcaaaaaaccgcgggaccttgagcggttgaggcagacgagatcatccataccacgcgtgccgtgcgctgcgtccattcccgctgctcggcacggcacgtcacggcacatcgctcgcttatccgctcctcccgcgcggcgcgcggctccgcccgcctcccgctgttcccgtgtgcccaaccacctgtggcgcccgtacgtgggcgagtacaccacgcttcacgcatcagctatgtcggaacaggccgcgcggcccccgcgccatggataaggcagacgcccccacccaagctcaccggcccgcgcggcgctgcagcgcgccaggtcgtccgtctttatccgtcccttgcctcggcaacttggtgcgtttcccgtcgttggcgtcaaggtagccgcaggtgcggtagatatccgaccagcgaagcgctccaatcgccgaacaatccggcggtaacgttaaatcgtagtaagaggaagctctcacggaggaagtggtcctgtcgaccgggtcaccgggagctcacagactcagctgatgtaatcgtggcagccgctttttatcaccgtgttgcagtacaatacagtagtatatacatgggtgtttgggagagaggggctaaactttaggtcccacatacaggctcgccgtggcataaacaaagagggaaacgcccaggtgtctcgccaccaggcgcgactcgacacaagcagtgatgcaagctgccccctgcttttcccccatcctctgctagctgtactgtgccgacttgcctcattagggaaagtgaaacaaaccacctctgattagccccaaagcaacggaggcacgaaggtttgactactacttttcagtatgactgtatgagcgagcctccgcccgccaccgataaaacttccgtacaaaaccacccgagacgcgacgtggcggcgggcatgcagcacccgcatccacgaccctccacgtactggccccgcgcgcccacgtaccccctcgcctcgcgccaaaaccacccacgctaacccgatagctcggcaaccaacaaagggatgctacgcaataccgccttgccttcctcctctccccgccgaaacccaacggcgcttctcgccaagccgcgcttgctataaaggccactcgccacccaccacaccgggtgtcacctcaaagtacagtttcctcttttttttttcttcggtggtgttgggagtggacaaggtagtgtgagtgagtagtgagcaccatggcgagccgagagcacctcctgctcgacccggcggcgctggccgtctcttgggctgaccccgctgcggtggagatcccgcccgagctcctcgccgcgctgggtgagtacctgtccgccaggcgtagcgacggggaggccgaggccgacgccgaggcggaggctgatgatgagttcatgatgtacgagttcaaggtgcggcggtgcgcgcgggcgcggagccacgactggacggcgtgcccgtacgcgcaccctggcgaggccgcgaggcggcgtgacccgaggcgcgtggcgtacacgggcgagccgtgcccggacttccgccgccggccgggcgccgcgtgcccgaggggcagcacgtgcccgttcgcgcacggcacgttcgagctctggctccacccgtcgcgctaccgcacgcggccgtgccgcgcgggcgtcgcgtgccgccgccgcgtctgcttcttcgcgcacaccgccggcgagctccgcgccgggtccaaggaagactcgccgctgtcgctctcccccaagtcgaccctggcctccctctgggagtcgccgccggtgtcgccggtggaggggcggaggtgggtggacggcatcgatgaatgcgacgcggacgcggagatggaagagttgatgttcgcaatgcgggagctcggcctccggaaggtgaggccgtcggcatcgtccgtaacgccggtgctaccgccggtgacggacgaggacgggccggatttcgggtgggtgtccgagcttgtgatgtagaagcacccgacaagctcaaagacatcatctctctcggcggcgacgattaagatgcagaggcgcctcgcagaacagcttcattaattaagttcacttcaattcgatgatcatttcgcaaattgcatcattcttctgtacataaacaaatatggtgcaagttaatctgaacacagcaatccgtaactgtaagtgtggcgtgcgtttgcctgcctttttttttcgaaaatcttggggagctagtagcacccttgcttttcgattattattattattatctaccagtgtagatatggagtgtaatatgctaatagcctctgcctgtttcgtgatattatcacatttgatgtacttaattatgctaaattcgatgcttttttttatctatcttcctgtggttaatcaccaggtttcgagtcatcagctgctttactgcatgtcttgatcgaattcgattcgacggaatacacgattggtgctcggagaagatagttcttcttgcttcggcttggctatcgatagagatctatcaatgtcaccatcgctgagtcagacaaggtacgagaaacattccccctggcggttccggttttggagtaaaagcgaagaaatttgagataacccatatggtccccggcataacatagtacaatgccatcataggcaggcttcgcgaagttgtctcgattcctatctcctgccaaccagcttcctccctactgaaaaagagaacagggagtgcacggattcatgttgccagcgtcaatcgtttttaatcactacctaaaaatatcttacaaaaatccactgtttaacagcgtggcttctaaattcagattacacgattcagttggcggtttcagctgaatttcgttcggtttgtgcgtagtcgtccgaaaggactcatcgacgcgacgcaggctggccttttgcggctaagatcaagcaaaaggaccacgggacggacgcatgactagtcgaagagcgcgagagctatccgatccgatcagatcagatcagcctgcgccggatagccagcccagccctgaaaacgaaacgccgccggattaggggaaaaacaacgggtgcgccctttggccccctttgactcgtacgcccacgcgcggcaccaccggcaacttggcgggcgggcgcgcgaccgaggcggaagtccaagtcggcagccactttttcaccggatctctcgtggtctcgcccacgcgcgaccacggtttagccacaccagcttcgcttcggttggctcgcccccggcgcaacggagggggtgtgtgcgggtgtgccgtcgctttgcgtgcgggcacgacgccgatccggttgcgttcaggtggcgagttcccattgttcggccaccaagttgggctgcaacgtgcgttacccttttcccgtttcaacttcgctttgtgctgtcacgacaaggccctggtggttggtacaacggggggagtactaactgctttgcactggatgacatgcggggcctgaccgtctctggagcttctgaaaagctggattcctagccggaggagccgctttattatctgtgggtgcgatgttagagagttcaatccgcctccttattggctggcggaaatatcttacgggggtgcatgcatccaggggaaaagagaccgtggtggtaccaataccatccgacaacgctttcgtgatggccaacggtaccattgttcagccgggttgccggactcttgctgacactgactagacgtgagagacagtccaatggcatggttacaggccgcctacagtttagctctgttgcgtaaccaaggtttgcgatatgccaagacgagattaaaactccctgtttgtgttttatgagatgagactaaaataaaggacatatgttattgtagatcacgatacaggctactttctaagctatgaacgtatagcgccgtccgatggactgcaaaattgtttcatactcccttcgtcctaaaatatcttaacctaagacgggatgagacttattctagaactacgtcagattcatagttctaggatgggatcccatcctagtttgctatattttgggacggagggagtagttctcttctgaatgagaataataacatgattttttaataacttcttgggatgttatatgtccagaagtggaggacgaggtgcatgtttgtttaacgtacaacgttgatctattcaatgacaaaggtactatggtaccgatgaactgatcaaatcgaaggaattagaagaagagatataccccccttatcctgtatgagtgataatatacataaggtaaatagagaacatattatagattcatgtttaaatcaaatgccttaaattgaaattaaatgttcgaacatatgcacttgctctacttatagaaaaataacttttcaattgtcacctgaaaattttcatccgtcggtctctttttacccgtgagtgcgtcttcatcgcatcgatcactcacgtttcctcccggcccatgtctgttgcctccaattctgagtgactgagtccgcctctctctcccttttcccgtgtggccgaatccagttctggcgttcctgcgtgtcgctggctgaccgccgatcacataagagtcatgcgaccccgagaaccaccgcctccccttggatctagctgcaccgagccctggggcattagatctggactagatcggcgagactacgatgatgggggcaacgacgaatgatgacgatgatttccactcctgattcggctccggcctgaagaatgacgatgctctagggacactgaggagacgaggactacccgtagtaagatgatgaccaagaacattcaacaattggatcgtgtcagccacggtgatgggctgctagacgacgtcttgcctgattcaggtggtcagggagaaaactcgttcttcggcagcctggcccggtcggcaagtgttattcggcaaggtatgcaatgcattgcgagcttagcaatgttcctagtggttagcgcttagcaggtagtagacttgaaatgtgaaacacaccgaaatatgtcatatattatgctaactttaccttggagtgttatatactttcataatttatgttgtatcttcctattcagcatcaaagacttcaagattggagttggaattgtctctttagtaacgtttcgctgaatgatatgttcaaattatttaggaatcatatacaccatgtatattaaggagtgatacactatttgtggtgtgtcgtggaaccatatacctattaatgtccgaatctggccttatttaagactttcatcacgtggaaattctaataggctagtatcctggtgtgcaacgtatctaggtgtgtatctcgtgtaactatataagaccgtgtctgattatgttttagtgattacaacatatgattttcttctggtatttaggctgaagtgactatgacaatcaggttaaagtgaccgaaacacaatagccaactactatgcgagccaacactatctgttatacaaatactacatataaaaggtatagcatttatttgtttacactatgttttgtctgtcatcccgattcaaagtctgtaattggttcgatagtttgacatcttccatcatacactcatcactgcattgctgaattttgacaaaaaaatatccattgatgagactaaacaaaaccctatatcccacacttgcctcgcaaatctaacttgtccctacctattgcaatcttcgtttttgtttattccgttgcaacacacgggcaatttgttagtagatatgggataaatagaaaacacattatagattcatgttataatcaaaagccttaaattggacatgttaaatgctcgaacatcttaattggacatgttataatcaaaagccttaaatctgcacttgctcttaaaaataacttcacgaggaaacttgtagaactccatatgacaaaaacatggtaaacacaactttttataatggaaatactttatatttcttgccaatgtagcacacgtaaggccaatacatatccgtaaaaaacaattggcatttgggacaaataagaaaacaaagtaacttcatcgtgcaacaggaccagtggccattgttgggacccttgcaatgttatgcccaacttcaaacgcatcattactctggatcacattagtggattggtcaacaccgtatgtattataacttgagttgtggttttcactattggccgcgtagtctttcagatgtctattttcaagttcaatgcactcttgcaacattgccaccacgccagtcattgtgggtcgatgtatagactcctgcatggtgcacttgagtgcgatgtccacaaccttccacacactgttaatgtcatggtctccatgcatgcgtgcatccaccacatcctcgatgttgcctcgtgccaggtgctgctgtacccattggataatgctagtgttatctaggtcccgtagtagggctggcttccctgtgaccaactccaacaacacaacaccgaagctataaacatcactcttggttgtgggttgcattgtcattaagtacctacatgtttagccaatgtaatgcatattagtacttgcactagaaaaacaatagaaaaactataagtggtatttggaagaccaaattaaataaggtagatgggattacgaactctggatcaacgtatccaggtgtgccagcaagtgtgtttgtggaaacatgagtgtcattgttgcgattaaaagccttggacaaaccgaaatcagcaatcttcgcctccaacatcgcattcaatagaatgttggttgccttcacatccctatggatgagaggtggattgcaacctttgtgtagatactctagccctacacatcacgatgtcaatattcacttttttagcaaaatcaagtctccaagaaaagcaatagcagcattaggtttagcattacttgccttgagcagattctagagcgatctggagccgccgtctccagggtaagaatcttctcctgctgttttcttctattgcaggcaaagtaaatgaagtgtatcatatcaaccaaaagcatttcaaatgatctagagataaataaaagtaaaatatcaatggcttatcattatcattatcattatcattctttttttgggtcaattttggagctgttgtaccataccatgcacgtagaatctaaatattttaggtactgcaatgtgttcttgtagagttccttctgacatgtactcataaacaagtgccatgttatccccatccttgcagtatccaatcatggaaacaagattcttgtgatgaatccgggttaaaatctgtgcctaagtgatcggttgcaactttcaattttcactctagaaagatcaacaattagtcaaaagagaacaacatatacctctccaaggaactccttgtctccttgcttagagtttttaaacatcaacttgactgccactcgagtgtgatcctccaaaaacccatcatagacacacccaaaccctccccttccaagctctagctggaagttgtctgtcatcatctctagttcccggtatgtgaaccgacggttctcaagctgtagtgatgaactatgcatgtggccacgatttttcgaagcatactctgccttctcattttgtggttctgtggaattgctccttggtccttgatatgcaaaggatgcatatgaaatgggttagttttgtttgtggatattccttagctattaataaaccacatgatgagggatttgtagaaagcctcacctatcctttttcttttcaggtaaaagagtattagatatattggtactatcaccataaccagaactatgggaacaactatgtagatcactaacttgttgttccttttcacaagcttgcatgaattgccattggtgtataagtttggattatttccgtctctaccaaaaaatgaagagtttttaagtgcatcttagtacttcccaaggacctcaaagaagctcaaagataagataaatatttgcactatgtttttgtcgtggttggtgtgttaattattgggagacgggttgtgctgaccttagatctagggagccatcttgaattcttttgagaagtccagatggaattgatccactgagctggtttcctgccaaatctctaaacaaaatcatatagtattagtacgagacaacaaaaggtgctataaaaattggaattaggcaaatcttgatgttttacttacaagactgacaatagaggtaattgtgaaagggcatctggaattgagcctgtcaaattgttgtttgacaaattcctgcaaaacatggacccagtttttcccccatatatatttatgacagaaatcccctccaaaaaaagcttataaagagcttagaacatacaagtattggactcccttgagattcgcgaaggaagacgatatatcaccccttagatcacttgaggacagatttctgcatggagcaaatatatctatatcaatttcattgtacatttaatcagtgcattctgctttatttttttctcatttatctttgtggtgaagacaagtctatatagatgtgaactacttacaggctagtgattcttggacggatggaagtggaatagctgcaggtcaaactatcccaagcaagtgtcttcggaacacacggatcacccatccagttcttcttcacctgatactttaccttgatagccatcatggcagaggctgttaaatgcgcccaatgttttcagtaatacacattaaccatcatcctgtcgatctcacttattcttatactcctactagctaaatacctatgtcttgctatagataaatatgaattagtattgttgggaataaatattgtgaggtttttagaacaactcatccctgaggatgtctttgcacaataaacttgtattttagagataaataacatataaccataatatgcagaaagacgattttgtaatttgaaagtacatcaaggagtggtttgtaaaagatatataaaagagttggtgaggtgtagctggtaaaactatataaaacaatatgtggtgtggcaaatccgctgacaccaccattacattcttttagggcatctctagcgtgaagttgtgtcgacgcgtgcatgcggcaaaaaagaaaaaaacccgaaccaaatacaccgtgagatgtggctgctatttgttagagaggaaactctcagtcgaggagtcgatttagccgattaaaaaagccatttcttcatcagtttgcatgaggaagaaatgatatggctgattttacgtggtcctggcaaatcgatgctaacgctagaactaccgaaccaatttgaacttcgtttctattagcggtgcatatcgaacttaggactggagatgaccttagaagaaaacagcagcagagccgaggcctggccacaatgggcaggtgcatggactcccgggaaggtgcatggactctgttgcatgcaactggttgaatactactccccccgtttcacaatgtaagtcattgtagcatttcccacattcatattgatgttaatgaatctagatgcgcatgacttacattgtgaaacggaggaagtactaagtactccttagttgtttaccaaattagctaatcaaaaccatatacaaactaatgaaaaccatattagccagcaaactagaaaagtataagcctcactacaccacatatgttcatgtcaatagtaaataatttatagagatatatgaactagaaaggtggctcgcgcctatgtgcgagcatttatattgttgaaaggtaacattttagtttgttcagagattgtctaatagatagcatactaaaggggatctatttttttaacatatctcaaaaaccattcatcgacttttgaatagaagatgaattaagttcatacaacttttgtatcgagtaaatattaaacaaccgcaagctaattatcatgcataccattttgtgcacataccatgtaaatatggctacaaacaaaaattacgagatcagcaaactcaaagtttttgtgattaaatcgcctcatgaaggcacgtgtgacaaacaaattaaagatagattaaaagttggatttttccctctatataaattcaacaatattttctccatagttttatataactttaaagggttttggtgcacacaaacacctacacaattgcttagcttggtagtgcaaaatatcagtttgaagttaatttcttctttttcgcatgttaggttattttgtttgaaacaatatttatttgaaataaaaccataactatataaatttaattagtatgtgcagtttactcataaattttgaagtgttttatagtaaagtttatttctaccatgtaatacggttatataagaatatagttttgtcatgcatgtaaattataatcattaaattcaatatgatttatgtcaccataatgaatgaaactttgtaaatgcaaccatgactacttaacaaaagaaatttttttgcctatttttttaaaattcaaataagcacatattcataatcaaagaaacactcttcgtacaactgacacatcatagcatcactcggtcatatatagatgtaaactatttgtcattagtttcggcccgctcattgctcggtggtatcctctattcacccatcatcttgtgatagtcctatagaccatattttatcaaaatttatctacttatttattttacataaggggcaacgccatgcttctactccctcgtgtatagggcgcaacgtccaaaattctttttcccaaagcatgttcttaattaacacatgtaaataggttattgcatgtgtgatatatatatgtatgcgacacatgttttttttctagcttcaccccgtttatatacgtgtagagagaaattaattatattaaactcgcggtgcttgattcttcttcttgctacattacatctttgatttgtttttaagttactaaaaaaacaataactatccattgatgatttgatacatcttcgcctcggcaaaagcagtagcgttgtagacttgcagtggtcatgatcaccttagctgccttaggtatgacatttcatcatacgtctcgacggcaaagatacacatgtgcattgtgcagatgtccagagagaggtcttccaagacttttttttaaacaaaagatagatctaatggtctaaatagtaggtccattggtttatgtgaaaatcgatggataaatattcttattaaaaatattttaaaataataggtacataatataatataatggtgtaaagtttattttcaaatattgtagagctaattcatttatttctacatgtaaagagttatatgctgatatattctatgtttgtaaagtaacttttatttaaaatttattatcactaattgttgttgttgttgttgttgttgttgttgttgttgttgttgttgttgttgttgttgttgttgttatctcaactatatatcaactaattaaaatattcgtaacttttcgatcgtctcctcatccgtcaatgcactcatttttcgtccgtccacccctccccccctccaaaaaaaatcctagtcgttccgcaacgttcgagatgagagtcgaagaccaaaagaaaatcatctagagtccgcatcaacaaccaaatgcccgagcgatctagcgaaaatttatcacagacatagatacaaaatccaataggacaatcaagcgaaataggaaaaataaaataaaaacgtcgctgaagccgctcacaccgtcatcgccatcggatccggcgcgggaagccaccaccaccgtcggatccgacgcgggaagccggcgccaccggcatcgtcgtcgccgtcaaatccaccgcgggaagctaccgcactccacccctctctcttcttttccgctcgcgaatggagttgtgccttcgttgtcttcgtgccgtgtcggcgagataggagggagaggaagagagggactggcgacgccggtgaggggaggaggagagggggcggcggaggaggagcggcgccactggtcgggagaggggaggggagggggagaggcgctgccaggaggggaggagctaacggtggggggatgggaggggaaggtgtgattagggttagggttttgatggatttagaatcgatccaagccgtccatcaaaccgaatggctcatatagatcccgtgtcgagccggcctccatatcgggccgcaacactactgggccatgcacgcttcatagtccgggcgcgcaatagcaggccgatagggtctaatgggcctttttcccctttttttacaactttttttttatttctaaggatatatttttttgaagggctcatatcatgaaaaactaaatcctaatcatctaatatttttttagtttacccgttgcaacacacaggcatcttttctagtatataaaaaaaatataaaggttgtgtactaacgtatgcacgtacctatggaacataatggatggagaggtggaattgtagtcgccttttggtttgttttaagattaatctaatctaacggtttataatattagacccgatttaagtgaaagatcgagggatatattttttctcagattattttttaattttctccaattaattaaagcgtcacgtgacggcgtgagagtgttcagagaaaatttgatggacttttagtattagattagcgtgtatctattattattaagtttgctcgaaaatttaatgatccgtcactgaaagagtacatatatgtgcacgtaccgtcctcggaatccgtggcgacattgattgtgggcattacggagaacacctcgatggcgttgatgatcggtggcagcgtcgagttggaggtggcgttgatggagatgttgtactcggggtatcgtaggaagggttttttctcgtagattaagtcagcatagaggtacaacggcgtgtagctctcattatacaccaacctgccgttgaggttgatgtagaactggcgcaaggcgttgctggggaggagctgcacctccgtgaagtagaagttggcgatgtaccccggcgtcggatccttcggctgcgtgtaggcatcccaagcgaactcaatgttaccagaggcgttccgcggcgtaatcgccgtctgcatcacccgcgacggcgcctcgaatatgtcattttctatgttttgcaccatcgtcgtcgttgatatcacggtccagtcgaagggattgatccaaggcacccattctctgtcgtgtggatcgtcggggtacctagtcacaatcgaatcagtacgttgattcactgcacgtataaggattcagcatcttgggttgactatttatctgatcaactcagatcgatacctacttttttttaaaaaaaacactcagatcgatacctgatgatttcggtattactagtcgggccaaagttccagcgaccgaacaaggacaggccctgcgtctcggtcacctgcgggtagagcgtgctcttgagaggcctcaggtccaagccggagatgaacggtgtcccggtgccggtgttcaccaggcagacctgcacgaagtcatccggcacgacgacgatggcctcctccagcgccgcaccgtcgagccccgtgatgttcaccatcgtcaagaagttgacgccgatgtagaggtcaaatacggggggcttcttgaggccgtcgtagttgccgtacacgaaggcggcgcggatgaggtacttgagcccggccgtcaacgaccggagcgtgtagcagttgcgctcgccgtctgggaagctgcgcaggttgtagttccgtctggagattaacggtgtcatgaattcgaccgagatgttgtggtttgtgcccgcgtcggtgaagccgtcgtccgggacataggacaggttggtcttgtcgtccaggtagcctgtcttcccttcaaggccacagtctatgctgatgaaacctgcaatgcaaactctgagctatgaataatgctcatcaaatcgtcattcgctagcttgcctatctaaactgtgcacatgtgcgagcgtgcagatcaagagggcggacgaagagtggagcatatacctttgaggtcaggctgcgcactagtttgaagtacgccggcgtcggccacggcaaggcagaggataaacaaccatgatcgcgcggccattgctctcgctgttgattgctccaaagagcatccgagcaagcatgcagctagctactactactactagagatcatatacataataagactataggtgccccaatcatatatagccagcctttaactaaacaagcaacagagataatttgggggatagcacgatcctgtttggccgcctctttgtgggaccgcgacgccatgccaactaagagaggaatagtcagcgagttgacaacaatgagagctgagttaatcgtcagcgagttgacaacgatgacagctcgtcagctgctagccacttcgctatataattcttttgaaagatctctgtccatggtatagtggaatgtatattcttctcgtttcctctccatttttgaggcgaagcatataatgtagcagtagtacacaagaagaaggtgtcacatagtgatattaattgttccaggaaaagtgatgttcgtgccttcgtggattgtatactttagaacgtatataggcataacaaggtactgctgccccactaatcaaggcagtggaatgaactaagcatattaacattacaaggttgacattttcttaatgaacccgcaaaaataatgatgaacaaccctatttaaaattactcttattttgaagatcccgttagagttacaacaattaattaaaaatgagtacaggggcagggaatgtggacatgtggtcacaaaaaaaaaatggccataaaagaaggggagaagaaagaaatcgaggaaaatagaacagagaaattcaaaggatagaaggaataaaaaagagtaagcgttgcaagctgttgtgacaagtatttaacaactggcataaacatccctacaattatttaaaattttactatatccatctctgatgtcttcttttgtgcattgaaataccaagtgtaaatatactctccatataactcaataaagtcacagttcatatacgccacaaatttcatagtttccccgttattcagaatattgcatattagtctactatgtaaacacaaattgggagtatgttctaacccaaattttggcattatgcatcaaagtggcctaggttgcactaggttggcatatatgatataaattctgtgaaaccacgagatatagcacgaacatatgttggagttgacttgtaggcactatttatgagcaacataaataaagctatttacttcctccgtttcacgatgtaagtcattttagtattttctacattcatatttatgctaataaatctagatagatatatatatgtctagattcattagtatcaatatgaatgtgggaaatgctagaatgacttacattgtgaaacggagggagtagttgctatcattttggtatatttgactgagtcttaataaagctttcattattaaaaaaaattatgagcaacatgcatgcatgtccacttatttttcacaaaccttcaacttaacacaataacagcctgatcatttgtacattttgtacttcctcaggccaaataataagaccatcattgaagaccacacgtacaaatcaatgtagtaagaacccatagaaatgggtaaagcaggcttcttgtcgtgcaacaggaccaatgtccctagttggcactaccctaagattatgcttcatcccaaaatagtgttgccctagctcatctcagtggtatatgtgttataactcgagtttgggtctatgctgctccctgacatataactgctactcgtgtcgcctttaaagctggtttcctcaagctctagacactcttttagctgtgtcaccacgtcagtcattgtgggtcgctgcccaggagcatgtgcagtgcatttcagagccacatctgctaccttccagatacagttgatgtcatagcggtcgtctggcatgtttacatccaccacaccctcgatgttgcctcgcgctaggcgttgccgggtccattggatgatagtagtaggttccgggagctttataatgggcggctgtcctgtgatcacctctagcaacaccacaccgaagctgtatacgtcaatcttctctgaaacttgtagggctgtggcatacctgtgccatgacaaaacatatcactatgaagtgtactatttggtcaataatcatcaaggcaactagaacgtggtaatatgcatagtaagatcagcatactcgggtgcaaggtagccatatgtgccaaccaccctgactgtggatacatgtgtgtcaccgtcgcatttaaaagccgttgtcaggccaaaatcggcaaccttggcctcaagatttgcattcagcaagatgttcgatgacttcacatccctatgcacgaagcgtgggctgcatgccttgtgtagatactctagtcctgtgagcaacatttttgcaaagggaaaaagggtattcttgttatttctcaatatcagtatgatccatatacaataatactaacatagaactattgtgctagaatgtgtaccttgggcagattctaatacgatacggagcctttccctccatgttaaagatctacctttgcgatctttgcctgtcgatcagaagatcgtaaatgtatttttcttccaaagagaaaatatcattcatattgaaattcgggaatatgtgttttaattgtttatgaaaaatggttttctgtaccttttattgtgcaaaggctatgacttagtctctttccttagttaaaaagaatatacaaatgaaatacttagcaaacctctaagcttatcttccagagttccttctgacatgtgctcgtacacaagtgccaaatgtatctcatctttgcagtaaccgattaatgcaacaagattcttgtgatgaattttcgttaaagtctgagcctgaacaaggaaaaaaaagatcaccttctagagtcggaagaaagttttcatcattcacttgcaaaatgctgatgctttgctatgaatttctgtattcacatgtttgaactattccatagtatcagaatatataatatgccaattgtaaaaagcattagtgggataacatattcactgtcatcatcactagatcatttaaaagctgtatagatatactattcttgatcaagcattacctctgtcaggaactcactatatccttggctggaagactcatcccgtagtttaactgccacatgagtaccatccttcaagaagccgtcgtagacggggccaaaccctcctttgccaaggactcgctggaagttgttcgttatgactgccaagtccttgtacgtgaactgacggttgtgcagttccagcaggctccctccactgccattctgactgtgtgactgcacgccattccccaaaatctgtggcttcacagcaccctttgctgtccaggcaaaatgaaaccagtattatcgactgttaattgcatttacatgtaggaagttgattagtactacttgattattgatgcgctttaatgccaaagctcacatttgttcttcttcttcctgatgaagaaaatcaggaacactgcaactgctcctatcaccactactggaacagcaacatagacggcaagcatagagttgctcttcttttgtgggagctggcatgaactgctgttactgcaaaggtttggattattgccgtacctatcaaaaagaagagatggtgaacatttgttttttgaatgatggtttaacaattttgatcaagtgcaaaagaaatattggaaaaaccttagggtcaaggagccatcttgacttcttttcagaagactagaaggaattgatccattaagctggtttcctgtcaaatctctggatcacatatacataacgttgaagtcaatatttgattttcacaggcacatgcttactcaaaatttatgaacttacagaacatcgagattttagagtggtgattatgacttatggcaataaaattgtatgactaaattattagagaaagatgtcaacatggatcggactgcttacagaaccgcgagaaattgtagctgtgaaatgacattaggaattgatcctgtcaagttattgtgtgacaagtccctgaaataaaatataggcgcatataaagtgcaaatttaactccaaaatcattgtaaaaatggattaaaaacttcttacttacaaattcttgatttcttttagattggcgaaataagatgatatatcgccacttaaaccggcatacgacatatttctgtagaaatgcacaatggtttagaaagcagagtttttgaaatagcattgtttgcgtttgtgcagaaactgaaatgaaacttacactcctgtgattcttggaggggttgaaatggcatagctgcaggttaacccatcccaagccagtgtctttggagcgcatgggtcacctgtccaattcttgttcacctgatacttggccttgattgcagtgatggcagaaactgcattgtttcagtgacagtgcaaaggagcagtggagcacagttatcagatcattcacaaatcacaaataaagacaactaaatgtaccaatcaaccgatggcagaaactgcatgcattatctttgttcagtaacacagcacaaagaggcgcaattatcagatcatcacgcacaaagaaaaatatttaccatcctgagcgtctgttgcaaggtcggctgtggagatgacggagaaagcctccgcggcgttgagtatcggcggcagcgtggagcttcccgcggcgttcaaagaaaagttgtaccgggtgatgccccggtagggtcgatctccgttgtacatggcgtcggtggacagataaaccggcttgtatggggctttggtccaaatcacgccattgatggtgacgttgaactggcgaacggcattgccggccaggagctccagctcggtgacatacaaggtaaaaatcgacctatatttgtagagacacccaagggttaattacgaattcagcatgcaattacaattgaaatttgaaaaaaaaattgtcgttaattgctcattaggccgtgaagtttgggacaaatttaagaagtgattgacttgtacccgggatcagggtagacgtgattgggtttggtgtcccaggagaactggatgggaatggaggagttgcgcgtcgtgatggccgtctgcatcacgacggacggcacgtcgaacacgggggcgatcgtgttctggaccttgtccgccgtggagatgtccgaccactccgccggcgggttgctccacggccaccacacgcggtcgtacgtgtcgtcggggtacctgatcacggtgctcccgctcgcgccgaagttcctccggtcgagcaggaccaacccctgcgtcgcgttggcgggcgcgtagagcgagctcggcaggggcctcaggtccaggccggagatgaacggcgtcccggcgccggtgttcaccaggcagacctgcaagaaatcatccggcacgacggcgatgacctcggcgttccccagccagtcggcggatggcacggtcaccgtctgccagaagttgaccccgaggtggaggtcgaacaccggcggcttgttgaggccgtcgtagttgccgtacaagaacttggcacggaccaggtacttggaccccggcacgacggacgggaccgtgtagcagttgcgcgcgccggcggggaagctgcgcacgttgtacaggctcctgtccgtggtcgtcgtcggcgtggcgaactccgacgagacgttgtggattgtgccggcgtcggtgaaggcgtcgtcggaggtgaacttcagcttcgtggcgtcgtccacgtagctggtcttctccggcaagccgcagtctatgctgatgaagcctgcgcggtactcccgatgcatgaacagcatgtacacgagtccaaaatgccggcgagttggcgatcgaagtttaaagctcaccggacgtgtcaggcgcgccgccctggccgcgaacgacgccggcgacggcgaggccgagcagcagcagcagccaccaccgagccgccattgttggtcgatccattccgctacgtgcgttgtgcgcacatgcatgccaccaaccagttgcaattagacttgacatagtatgtgttaaacaacaaagattgactctgaacaaattcgctaactgcatcggccagtggacagcttggacatcaccgaacacggtcaaagtcgcgaagaagaacaaattaagtagacaaatgaacgctgattagtggggctctgccatttaattaacatggtacaactgtaggtaaccatggcaatccctctgttcagtttgattttagagtggactaagaagccactttgtgtaatttgcactaataaaccttatagtcagaagaagcaggaaatcacatggatgatcctgtagttgactttgctgggagttagtcaacgacttagctggaactcaggctctactactctagtttatcacttcagccttttttttttcaaaacaacctccatactagacattgcaaagtttcgtatctatacagtaggaaaaaatataacggtcccatcgtttcgcttatacggcatattcgcaaacgaaaagtagtttgtgaataaaacttttatatatgtgttcttagcgatctgaaagcaaaggctgaaaaataaacttcgatgaaaaaaacctcaaaaatcaacttcaaatttaaggttaaaaattaaaattgtggctgataagtataagcataagcgaaaagatgagatcctaagattatatcctgtgaggctataatctaagaaaataaaaaagaaaaacacaccaccccccatgctggcaacttatacacacaaattattaataccagctagccaccgttgtgcacgatctgttgttgtcaacccttcaaaggggggacaaacgcatcgccctactcttctctaaacaaaatatcatcttcaagcttctgaacatccccaagaaaaaggtagttatgggagagagtcagaaagaagagaatcaactcatccctcgcataacctgaagacatcctagagtaccatcgtagaccaaatcgattggagactagaaagatagaaaatgtgatctcctagacaatatatgcttccatgaaggtcgtgacgtcgccacgtcgcccgcccgcccgcccacccgcccacccaagacctagacaagatttttacctggaggatcccaccatgaagggagagatggatgtttctcagcaatgccccatgggggaaatgaggcacccaaattaaggcattgcgaccaccctaacatcgtaaccccatgttctcccgctatccaacctgcaccaacaatgtgccctgtcgcatgtaacgccccgattttcgttcgggtttaaaaatcattaaataatgcattttctagaaattaaataaaagttaaatcaatttaatcaagtaaaataatgggagaattaaaattttcccttaaaaatcattggccgggaatattttgtaatattctttgtgccctaatgtactctccggaattttccgtgaattttcggagctcgagaaatagttttaaagtcacgaagatcatttaatcaattaaaataaaaagagaacaaataaaatcctccttcatctctttgggccattttcggcccaaattcctccccctccttcctctcccgcggcccgcgcgcctcctccctctctcgggccggctcccttcttccttggcccgctcgcaaaagtctgttttgcgtccctccttctctcccttcgccgacaggtgggaccggcggtcccacccgtcagctcctcctcctacctctcgccggccgacgccaaccgccatagccgtccacgtcgccgcaaaatccggcgccctcccgcacccgagctcgcatccaacgacgtgggcacgatcccctccacgtccctccaccatttcccccactctccccgcgaaaatcggcgccggttaacccctccaccaccccacgtcggcgccccacttcgccggccgattccgccacgtccggcctcgatcccgcctcccctcccctat

SEQ ID NO: 5310 - DNA, 35813 bp, Oryza sativa
cagatatgatcaccagtgggactcataccgagcccgcatgtgtagagtctttgtttcctccacagtagggtgaaaaagtggaatgctaggggatgggatacgtccctccaacgggatagctcctctccacacgcgattcttatccatacactcacttgccgccatcaccgtcccccgccgctgccgcgtccgtcccccgtcgcctccttcgccgccgccgcgcccgtccgccgctgccgcagcgcccgtcccccgccgacgccgtcgctgtcccccgccgccgtggcggcgtccgtaccccgtcgacgccgccgtcgccgccgcgcccatcccccaccgtcgccgcgcccgtcccccgctaccgccgccgtcgccacgcccgtcatctgctgccgccgtcgccgtcctcgtctacaagggacggctgctggggcgaccgcgcgtgtcggggtgctcctctcccaacgggatgcccaactatatctagtaggaatcacctgatacctgataggtatcatccgatacctcgcaagtatcacgtgatacatggtagaaatcgtctgatacctcgcgagtatcacgtgatacgtggtagaaatcgtctgatacatgacaggtatcgcatgatacctcgtgagtatcacgcgatacgtggttgaaatcatctgatacctgacaggtttcacatgatacctcgcgagtatcacgtgatacgtggtagaaaatcgcatgatacctgataagtatcacatgatatttgcaggtatcacctgaaacgtgtgtagaatcgtctgatttctgataggtatcacacctgatacctattcgggatcatcctgttgtgtagaattgtctgatacctgataggtatcatacctgatacctactcaggatcatcccgttcgaaaatgggataccgttatatagcagcccccggagaaaaatcatgacttctggatagaagctatcttgccacgatacggtagcacgacaactcgagagaatctatcattaatgcgatggacatgctcaatagctggtgcatgcaccgcatgttcgcatccgaaagaagcatgaaatcccgtgagacatgtctataccattcttgagcaagcgaaaactccaggaactttaatttaatttctctacctaatgtcttattttaataattacatctattcttcttttttattttagatttattcttaatatcagtacccagctctaagtccttatattttaattaagagtaaagtccttatattttaaaacagagtgagtattttagttcttaatagtgcatttatttgctgtttgttgatattggtgtatttttctataagacgattaaaattagagaattttgactctcaacaaaactaaaattacttacaatatgaaatgggagtatatttcataacttcagagaaccttcactgaaaagaatcgatatggcccaaaaatgataaggacggagccacagaccgttgaagtatactcctttcattttttaaatagatgatgccgttgacttttggacacatgtttgatcatttgttttatttaaaaattttgtgcaaatgtataagatataaattatgcttaaagtcttttaataataaaacaactcacaataaaataaattataattatgtaaatttttgaataagatgaatggtcaaatgtgtgcttaaaaatcaacggcatcatgtattgcaaaataatagagggagcatttttttcttcgtgccccagaatgacaaggactatacacggaaccatggactgatgaactactggtctatttgtactccctcttcccttcagaaagcctcctttcattttttaaatagatgacgccgttgacttttggacacatgtttgatcatttgttttatttaaaaattttgtgcaaatgtataagatataaattatgcttaaagtcttttaataataaaacaactcacaataaaataaattataattatgtaaatttttgaataagatgaatggtcaaatgtgtgtttaaaaatcaacggcatcatgtattgcaaaataatagagggagcatttttttcttcgtgccccagaatgacaaggactatacacggaaccatggactgatgaactactggtctatttgtactccctcttcccttcagaaagcctgtactgtacctttatgagccgggtcccgctcctgaatcctaactagaactagaacacatgtactttataccggcttctgaataacatgtaaatctgtagagttagtacagtagatacatagcattataaaaacagaggaggaagtgtatttcggcttgttctttcctagccactctcctatccgactagatggattctaattgtccgaatgaacattcgcttgtatgtcaacaaaatgctttcaatatttttaaatgataagatagattaatatgtaatatttcgctccacaaacatgtaagttaaaattcaattttgtataaattgtaataaatataacaatttagacattaactagcatatgtatattcatgttaaatttgttatttttttactcataaaaatcaaatttaaacttatatgtttatggtgggtgatatattacattgttttgtttcttttcgtgctgactccgttctgacttccgaccacttcaccaaactgggctaattgaccgctttactattgaggcattgaccaccgtcttttgatccacaagttttcttcgtctccctctagagaacttttatattggcagaatatactatcaacaaattgtaccatagaagtcatcttgttaacgtgaaggaaaaccgtagtgcgatattaagtacgatgtgtattgctatcaataggaagcagcgatatataatattcatcagtttttaggtgaaaatctttgaagtgtaaaagtagtataattggggtataattacaatgtaactctcgtatgtaattgagtaaaacatgttggtgcttgactagctagggttgcaagcttgctactcccactagcgcacaaatgtgcgaattttttaatttcctctcttcacgcaaatctcggtacaatattccaacgatcaaaattcataagttttgaggggaaaacatcggcgtaattttttttagcaattccgatcaatgaatcaacgcaatgcccatcaagccatgaacatcgaaaataatgagtgaatgacaacgttgtaccgaccgcgccgatgtgcaatcctggtccaacaatgccctccgagcctcccctcaacatattttgctctacaaaagttctctactaactcggaagagcaccactcatcccacatcgatcgacgccaaactagctagctactagcaaattgaagccaagatgaagaagaccatggtgctctaccctggcctctctgtcagccacttcctcccgatgatgaagctcgccgacgagctcgtggagcacggatacgccgtcaccgtcgcactcatcgacgacccgctccaaaagcaaatcgccttcacggccaccgtcgaccgcgtcatctcgtccaagccctccatatgcttccacaggctaccacgcgtcgaccaccttcccgccgtcaccaccaacgacggcgaattctacctccccgggtatctggacctcgtgaggcgacacaacgagcccctccatggtttcctctcttcccatttccgcggaggcatacaggccctcgtcgtggatatgatgtccgtcgaagcgctcgacatagctgagaggctcaaggtccctggctacctcttccacccatcgaatgcaagcctttttgccttcttcctccagattccgtccatctgtgcagagagtaaacggagcttcagtgagctaggagacacccctctcgagatccctggcctccctcccatgccggcctcccacttcatcgacaatcggcccgaggagccgcctgagagtgaagtgtacaaggccgtgatggatttggttcgcaggtacactaataaatgctccaatggcttcctcgtgaacactgtcgactcgctggaggcacgggtggtgaacacgctcaggcacgcacgccgtcaaggcggccgggcgttgccgccgttctactgcgtcgggccgttggtcaacaaggccggcgaaaggggagagcgacccgagaggcacgagtgcctcgcatggctcgaccggcaaccggaccgcaccgtcgtgttcctctgctttggtagcaccggcattggcaaccactccacggagcagctcagggagatcgccgtcggcctggagaaatccggccaccgtttcctgtgggtggtgcgcgcccccgtcgtcagcgacgatcccgacaggccggacctcgacgcgctcctcccggcggggttcttggagcgaaccagtggccaaggcgccgtcgtcaagcaatgggcgccgcaggtggacgtgctccatcaccgggccaccggcgcgttcgtgacacactgtggatggaactcggtgttggaggggatcaccgcgggcgtgccaatgctgtgctggccgctccactcggagcagaagatgaacaaggttctcatggtggaggagatgggcatcgccgtggagatggtcgggtggcagcagggccttgtcacggccgaggaggtggaggccaaggtgaggctggtcatggagtccgaggcaggcgtcgagctcagggcgcgcgtcacggcgcacaaggaagccgcggccgtggcttggaccgacgttggctcgtcgcgcgctgcgttcacagagtttttatctaacgcagacagccgacagacatcgtgagttcgtggccgtatcgtgaactccggacatgggtggaggcataagtctaacgggtgaccgttcgagcgcagcccggacacgctagcgcattcggcccagtccacatgcattaggccaatcatgatatgctattccaagaaaaacgtactacctccgttttttaatagatgacaccgttgactttttctcacatgtttgaccatttgttttatttaaaaaatttacgtaattataatttattttgttatgagttgttttatcactcatagaactttaagtgtgtttatatcttatacatttgcataaaatttttgaataagacgaatggtcaaacatgtgagaaaaagtcaacggcgtcatctattaaaaaacggagggagtataaattttgttgtatatgtaaaatttatatatacttggtacttgctgaatacccataatttaccaaaaataaaaatatattataatattgtctaaaagaaatacagataagattcctataggatgtgttataatccttttgctatagtaaatattcaccttgttttggtttaatatatactccctccgtcccaaaaaagacaaaccctggtttccgtgcccaacatttgaccgtccgtcttatttgaaaaaattatgaaaaaaattaaaaagacaagtcacgcataaaatattaatcatgttttatcatctaacaacaatgaaaatacgaattataaaaaaatttcatataagacggacagtcaaagttggacacgcaaacccagggtttgtctttttttggggcggagggagtacgtggctatccattgaatttgattgtcttctaatattaagaagtagtaccccatcacatattatgagattcaccaatcacatgcgccttgttgtcacgtcgtctatctttgaaaagataattagttgtaaattgaagcaccgtaaatgcgaaatcaccatgtgcctcgctgtcgacgggtacatcatctaccactgaaagaataattagccataaatacgagcaccggtgccaaatctagaacttgtacctggatgaacacgttccaccaccagaaatataataaattgagttacactcacgttgtagatttgatagtaagttcaacaatactatctttgtcccaaaatataagatgatgtggcagagctatagtttctatggcaagctaaggtctggtaatgcgttaaatgtgacataactaacttgtgtcttggtaagttaggacaaccatccgaatagccccttatatttctttttctttatgtatcagagagtttcttctcacatcattgaggcgcactgtacacctaacagggaagtggatttcttttctgggaggacatctccttgttttgtagtgtttgaaaagtcatcaaaaaattataaaaaatgccaacaaatagatttgtatatgataatttttttacaaatatacaagttaaaattcgacttatacaattcagaaaaaacaacaaatttgatcacgaattacatgttctattcgtagtaaaatttgttattttttttccaattgtacaagttaatttgaacatgtatgtttatggagtggcatatcacatattgatatatcttaatttttttaatttttttaaatattttttcgggtgacataaaaaataaaggacatccccttaattcatgtagactttcccaccaaaaagaacttaaatggtaggagctcaggctcagcacccacccacccccacactacccatctcatcaaacagcgttccgaatcatcaatgatcgcgttcattcgtcgagctttaactgccaccaagctttcttctcccctcaaacgccagatcgtcgggagaccactcagtaatttccgacgtagactgcaaaccagctagaaaattcagagcccacaatgaagaagaccatcgtgctctaccccggggtcgccgtcagccacttcctccccatgatgcagctcgccgacgagctcgtcgaccacggttatgccgtcgccgtcgcgctcatcgaccccgccttccagcagcacaccgccttccctgccaccgtcgaccgcgtcgtctcatccaagcccaccgtacgcttccacaggctcccccgcgtcgagctccctcccgccaccgccaccgacgacggcgacttcctcctcctcgggtacctggacctcgtgaggcgacacaacgagtgcctccatgatttcctctgctccatgcttcccggaggcgtacacgccttcgtcgtggattctctctccgtcgaagcgctcgacgtcggcgagaggctcaacgtccccggcttcgtcttccacccggcgaacttgggcgcctttgccatcttcctccagcttccttcgatccgtgcagagggtgagccgagcttcagggagctaggagacaaccctctcgagctccctggcctccctcccatgccggcatctcacctcttctcccaatttctcgaacacccagagagtcaagtgtacaaggccatgatgaacgtgagccgcaggatgttaccgacttggaagagaagcaagatattttcagagaatcagagagaattcggaagaagaggagaagaaacagagagaaagacagagatgtagagagagagagagagagagattgagtttgtattgagttggaaattctgtctttacatgtcatcctcccgattctctctccctcctttatatacagctagttaacccagtttccacccttatacttcgggttgggcctagttacacgaacatgccgttgctgggccgtactctgaacagagccagcgatcttggacacttgttcctgttcatcatcaggtgtgccggtgccggatgtaacattcccccttccttgaaacacagcttgactccaagctgtggcagaaggaaagcgatgccttaactcctccagatcttcccaagaagtggtggaagacgaagtaccagaccaacgaactaaagcttgaacaatcatcttatcaccacgacgacgtagccgctgttgcagaacctctactggagtagccagatgcccagaatcaggatccaatcgtggtaatgttgattgaacaacttcagaagcagctactgctttcttcaattgagacacatgcaccactggatgaatcaaactggtagcaggtaattgcaacttataggcaacagaacccacacgctgaaggatctgaaagggcccatagaacttgaaagccagcttctgattagcacgagtcatgacaaattgctgcacataaggctgaagcttcataaaaacccaatcagcaaccgcaaacacacgatcagtacgcttagaatcagcctgactcttcattctttgttgagctcgaaccaaatgatgatgaatcaaactttgcatgttatgacgatcctgcatccaactatccaatgcactaggcaccccaaccgaatccactgagagcccaaaatgacgaggtttatgaccaaacattgcttcaaaaggagtcaacatcaaggcagaatgaaatgaagtgttgtaccaaaattgagcaagagataaccactgactccacctagatggacaagcatgaacaaaacagcgcagaaacatttccaaacattgattcacgcgctccgtttgcccatccgtttgtggatgataagaagagctcattcgtaattgagtgccagaacgccgaaacaattccttccaaaaaaatactggtgaacactcgatcacgatcagaaatgatggccagcggtagtccatgtattgaatgaattctgtccatgaataattgtgccacagacacagcagtgaatggatgggataaaggcaaaaaatgagcaaacttagtgaacttatccacaatcaccaaaatgctattataagaggctgaacggggcaatccttcaataaaatccattgatatgacttgccaagcatgttcaggtatttgaactggttgtagtaaccctggataaggcacatgttcaggtttagcttgttgacagactacacaactgtgcacaaaatcctgcacagtttgccttaaacctggccaagcaaacagctgcttaacgcgctgataagttacttgaattccagaatggccccctagagcagcagtgtgcaaatttgctagaacttgctgctgaaactgccgattattgcccacccaaacacgtttcttgaaataaagaataccattttgcaactcaaaatgagcagaatgaggtgtaccttccttaaaagaatgcaaaagctgaagagcttcgggatcagatttataacccgaaacaacatcctgtaaccaatccggtagaccaacagataatgcactcaaaattggaagaccatcagaagatctacgagataaagcatctgcagctccattctctaatcctttcttgtaaacaattcgataacgaagacccaacaacttagtcattgctttatgttgccaagaggtggttaatcgttggttatcaagaaaggccagactgcggtgatcagtgcgaattaaaaattcctcgtgttgtaaatacgagcgccaatgatcaacagcaagaataatagccagactttccttctcataagtggaaagaacttgagtccgaggtcctaaagccttactcaaaaatgccaccggatgctgatcttgcataagcacagcaccaattcctcggtcagaagcatcagtctccaccacaaacattttctggaaatcgggcatgaccaacaccggtgctgatatcagactctgtttcaaagtgtcaaaagctttttgatggtgttgagtccagataaaaggctgccctttacgcaatagctcagtaaatggcttactaatgatgccaaaatgtcggacaaacttgcgataataccctgcctaacctaggaagctgcacacatctttaacagatacaggaactggccattgccgaaccacctgaatcttttctggatctgttgaaactccatcagcactaataatgtgccctagataagacagttgagtctgtgcaaaagaacatttggataatttgactcgtaactgatgcttactcagagtctcaaacacctgacgcagatgattcttgtgctcctccaaagtgcgactgtataccaaaatgtcatcaacaaagaccaagacattttgacgcaattgatcagctaaaactgtattcatcaccccctggaaggtagctggagcactcgtaagtccgaagggaagcaccttgaattcaaaatgaccattgtgagttttaaaagctgtcttagcctcctcaccaactgccatccgaatttgatgataccctaaacgcaaatcaagcttagaaaaccagcaagctcccgccaattcatccattaactcatcaattattggaagaggatacttgtttttgacagtgatagcattaagatggcgataatccacacaaaacctccacgtgccatctttctttttgactaacaaaacaggagaagaaaaaggactagcacttggctgaataattcctttttgtaacatatccttaacttgtttttcgatctcatccttttgagcaggtgtataacggtaaggtctcacattaactggcacagccccaggaatcaaaggaattgtatggtcataatctcgagcaggaggtaatccacttggttcctcaaataaatgagagaattcctgtaccaaagactggacagcatctggaattgaggataactggtctgtagaatcactgagggcagcacataagtgaaccaaacctgccactgagtcgatactgtgcagatgctgtaaatgctgactagaaatcaaagcacaatcagacgtattggactgcaccccacgcaacaaaacttcatgacccataactatcaagtgaatagacttaagctgccaatcaatgtgcattggactatacttagttaaccaatccatgcctaatattgcatcataacctcccaaagccaccactttaaatgtggtcaagaacttctgaccactaacaaaccattcagcagaaggcatttctttctgacaatgcaacacctgtccattggccaccttaacagacagaggatgagctaagaactgaactccagtaagacggtcagccaattgatcactgacaaagctagccgaactaccagaatccacaagcatcagtatattcaacccctgaattttgccttgtaaccgaatggtagactgagaatcagtaccctgaacagcatgaactgacatagctaacaatgaagaatcactatcttcagaagatatgccagcctgatcctcatttacgttgtcaggaaatagtgcaaagagctcctgaacagcgtgaagctgaactgttcctgaacatttatgtgtcggcgaccacttttcggcacataagtaacacaaaccttgtgcacgacgaaacgatcgaagtgcactaaccttgtcagaaagattagtaccccgattgagctctccacccttcttctcctcagatttcagagccttggttggtggcaatggtaatggatatgcatttttaaacttctgcgatccatccccaaatttcctttgctcttgattccgctcagacaactcctcctgtaatagagccaaaaccagagcagactccaaatccttggggcaatgtaacaaaacagctttgcgaatgtcaaaacgcaacccttctatgaactggtgaaccaaattcaaagtgttatacataggatcatacgtcaacaactgattcatcagatcatcaaaccattcataaaactcgctcactgaaccggtttgtttaatctgatcaagctgtcgaatcagttgccgatgttgatttctatcgaattttcggttcaccgcttcacagaatcgaccccaatcgacaaaaacttcatgagcacgagatgaacgtagccaagacgctgccctccccatgaagtaaatggtggctacccaaacccacaaatttggatgagttccataaaccccaaaataatgctcacaacgcaacctccaaccctgtggatccgagccatcaaactgaggaaaatccaactttggtagtctatgattgaacccttgctccccatgcaaatcccgatttccccgactcgaatttgcgccaaactcaatcccatgaggaacagaaaattcagtgggaatttggtacgtacccttgaccggaggtggcccgagagtatgaactacccccgatgccttcccccggtgaaaatttgcgacgcggtggccatctggaccgagttcgctcgccgctgttccggaaaacaacggcggcgtgctgggcgtaggaagcagaggagtttggtgactcccttcctccgccatccttgacgcctgcgaggtgttcgacgaattgccgccctcctcgctctgcttctccaacttgaggacatgcagcttcagctcctccatgtcgtgctgcaacccttgtatagcagcatcaacttgaggtcgccatccagccacagatttgtccagtttgagcagcatctcttgtgtctctccttgcttgacgaccatggttccgatcgccgcttgaatctccaacaaagtcttctcgaatccctcgttttgcttcgccatgtcgtcgacttggatctgaagatgagttttgaactgaggtttctccaggattgcggctctgataccaaatgttaccgacttggaagagaagcaagatattttcagagaatcagagagagttcggaagaagaagaggagaacaaacagagagaaagacagagatgtagagagagagagagagatattgagtttgtattgagttggaaattctgtctttacatgtcatcctcccgattctctctccctcctttatatacagctagttaacccagtttccacccttatacttcgggttgggcctagttacacgaacaggccgttgctgggccgtactctgaacagagccagcgatcttggacacttgttcctgttcatcatcaggtgtcggatgtaacacaggaacgcgcaatgttccaaaggtttcctggtgaacacgttcgagtcgctggagccgcgggtggtgaacgcgctcagggactcgcggtgtcaccacggcggcccggcattgccgccgttctactgcatcaggccgttggtcgagaaggccgacgagaggagagatagagcagagaggcatgagtgccttgcgtggcttgacaggcaaccggaacgcagcgtcgtgttcctctgctttggcagcacaggcgcgggcagccactccgtggagcagctcagggagatcgccgtcggcctggagaagtccggccaaaggttcctgtgggtggtgcgcgcgcctcgcgtcgccatcgacgacgacgacgactcgttcaatccccgtgccgagccggacgtcgacgcactcctcccggcggggttcttggagcgaaccaccggccgcggcgtcgtcgtcaagctgtgggcgccacaggtggacgtgctctaccaccgggcgaccggcgcgtttgtgacgcactgtgggtggaactcggtgctggaggggatcaccgcgggcgtgccgatgctgtgctggccgctgcactcggagcagaagatgaacatggttcttatggtggaggagatggacatcgctgtggagatggccgggtggaagcagggccttgtcacggccgaggaattggaggccaaggtgaggctggtgatggagtccgaggcaggcagccagctcagggcgcgggtcacggcgcacaaggaaggcgcggccacggcctgggccgacggcggctcgtcgcgctcggcgtttgcccggttcatgtcggacatggaccgtacagccaacatccgctaggacaacgtgaattcgtgaccatccaagacacaggatattacgcctttccagagtatcgtgcatgacgctcgcccaaatctgtcctttcttttttttgtttctgattaagcctaatgacgttttcactccttttttagcaccattttcccctgaaacgtacgtgtgcgcaagaacgggtttccccgtgcacacggccacgcctacgtgttcattgaatattttctcattgtaaactttactaaatatgttttaaatgtatatgtagaaagtttccttataataatggaaaattaaaagtgctcgtgggcatgtgtaacatcccagcttatgacttaataggatttatagaatactcatatcaacaagttgcaacttttttccgaaagccgaacaccgactaggaaattcttcccgggtgcatacgagtggtttggggcaatttcgggatgggtgactgactggaaaattctttccggatacacacgaatgagggcagtctatgacatctgaaagctgccagatgtaagcgggcccggcctgggagaggcaagatgttacagcatgggaaagggaaaaggctgaaacgagaacataatattgatcattttgactttgatctatcgtacttttgagttcacaatctcactgtaaatttacgaagattttatccatcatataaatgctcatattttttaaattttttttatataagagtacgtcaaaatggttaacagtatggttttataaaattttagaatttacgtattaaaatttatatagtttttcttatttagaacataaattatgtgctacgtactaggagttttatgatatagtgctatcaatcataaaactcagatgatcataaaactcgaccaagagaacagacagaaggaaagaaaagcatatgatcacactgctatgatatagtgctatcaatcattcaagaatgcaataaacacagatgagtaaggccctgttattttcttatgaagattatgattttccctccatttccattagcatgcttttcaaactactgaacggtacgtttcgttatggaagttgctttaaaatatcacatatatccatttgtgcatcaactttatctccatcaacttggtctttatctcgttttatgtgaaaagcattggccccaacccgcaggcctacatgggctgcagaaagggctgtcagggattgcacgttagagtatctccaacaatctctctatcccactctccaagccaaaatttagccattatagacaaaaaaaaacgtattccagcagaatttctatccggcttgccaagccatccggctggctaaactcccccagtgagtggccagatttggccatgctatttggcttgctaatggtgagccccaccttccttctctccccgtctgcagccgctgtagttagtcccgtcgccgtagccgaggaaagcggaagtgggaggcgccccactgcggcgcgatagcaaggagggaggatggcgagccggagccgaagctttgccgccccgctgcccctaccctccctttccctgccctcttgcgccatctcccgtgctcgcctcgttcgccatctgcacaaccgccgttgtgccgtggtctggatcgccatccactcagttgcctatcgtcgctgaggtctgggccgccatccgccaccaccttcatcttcaccacctcccgtgctcacctctccgccaccatcgtcatcggggccgccatccccaccgccaacttcgctgtcggcgtccacggatatggatcggaggacctcgttggaggcagcgggtgcaccgacctcgagcgcattggggaatgctatggcggcgtgggcggggaccaggggtggcagtgtggcggtggggatgagagaggcggtggtatggagagagaggagaagaataggagagagggagaggaggggttgaaaaagggtagtgagcctaacatatgggactcactatttaggttggacagtgtaatagagagtctattggagtgaaatacaaatttggccatccaaatttttgacaaactggccaaatcaatatttagagtcaaatttgaagagactgttggagatgctcatacccaccagctcgatggagttgttgtgtacatatgtgtgtgaaatcgttgtaggaatcattgtcttgagttatatgtcgtgatgaacaattggccatggtgatggttagtccgattgttgaattgttgtggttgtgttggtgaagggtcggtgtacaggtggtccaaccagagcttaagtccgattagaccggatgcgcatgggcggccgaactgatggctgaggtgcaattagaccagaacattcttgattatattggattttgagttatttttttatgttaattccgtgatgtttatggcttccaattatttcgtatgtgtattgtgtttatgctaatgtgagtttaagttaggaaagtcggatatggtttcttcgtttcccatatataagtgttgcttaaggctgagaactgtctatggtggattggaattgacttaagtatagttgtcctaacgatcaagaagattatacaatatgctaaggctaaagattgaacaataaactggagatggagtttttgtttggcataagcgagatgtgtgtagataaaagaaaaagtcaaagttgaaaagagtactagctgaagtaggatttagggtttgaatttacaaagagataaaataatacatggtttgggaggcttttctatatatagaagtaggattcctaatttaagtaggattttggcttttgtggagtgcctttatgtacaaataaataaggttgagcatcaagaggtaacacttttttaaggtgaaaaattagggttatctttaggtcttgactctcgagttgagtttgaaagttgagagagaagtgcttggagacactttataaacacatcttgatgtaatataaagttgatcagcttattttgtcgagttgtgtttttgtcttctaccagttgtcttgcacgagcaccagcggttagactggaggaacactgactgtcagatcgagatcccatcaacagtcgaaccaacgatgtaaagatggtcagactaaaattccaacaccggtctaccaactttctgaagctagctcaaggaacgtattaatggatgaacaacccaacccttagggtccattctatattttagagctcggttctttcaacttaaaaaagatttttttttatgatctccttgttcaccttctctggtagtcttgcttcttatgcttaatcctacaatatgaactacatcgtgttaagtgattccatctaaaaacaatccactatttcccttaaattcagcatgtgctctgtgaagaggccaccaaccttgtttctccaccgttcccatatggtgatgaaatgcgcgattggagtctgtgttaatattatctactcgccgcgctcgatctcaatcccctttcagccgacgagcaggggcaatttggtctcatcaagtagaattccaacgaaaatggaattgaaaatgacgaaaatggagaaaatggcaaagtagctgtgatctcgcgctttagattggcattttagcgaaatgcgtttttgggatggcatttcagcgaaaccgctttttgaacgtggccaaatgtccattttctccatgggaaggggagctggtggtggcaggggagcgatggggcgaggggaagggaaggaaccgatgggggcgatgtgcggtggtgctggtggcgacaatggacttcaaaggaggagaaatgtgactgtggatctaggtttttgactgggagaagaagggtagagagaagggttttgtccccttttagcccgtgcaatccattttttctagcctattgtgcgctcgacttggtgagctaatctaaatttctgcccccgtgatgtaccctttgccgactgttggcgtgaaggcaattgttttgtcgacagataatacgttgcccatgaatcaccgacattttgtttgtctcaaaagactagaatcgccgacacataatacgttggcagtgctatatacatatttgcctacaaatgatgtgttctgtgtaccgacgttttgccaacagtagtagtcagttggtgaagatgggccatcatgtagtgattgtctaaaataaatataaataagtttacctatttaagtacagttatggatttccgtatccaacgtttgattgtccgttttatttaaaaagtttataaaaaattaaaaaaatagccatacataaagtactatttatgttttatcatctaataaaaaaaatattaatcatcaaaattttaaataagacagacggtcaaatattgaatataattggatataaacagtttaaaactatactcttctaggatagagccacggaggtaatattaaacttgctcctaggagagtatagtaccactacccacctcaccaaacagacccccatcataaatggctgatttaattgggctgtactccctccgtcccaaaaaaagataaaccctggtatccgcgcccaatgtttgaccgtccgttttatttgaaaaaattataaaaaaaataaaaagacaagtcatgcacaaagtattaatcatgttttatcatctaacaacaataaaaatacgaattataaaaaaatttcatataagacggatagttaaagttggacacgcaaatccagagtttaactttttttagggcggagggagtatatatggggcaatctagttctcttctcccctcaatcaaacgagccagaggtaggtcgggagaccactctacagtctaccctccagtgcctccacagtacaaactagccagaaaaattcaaagccaccatgaagaagaccatggttctctaccccggcctctccgtcagccacttcctccccatgatgcagttcgccgacgagctcatcgaccgcggctacgccatcaccgtcgcactcatcgaccccgtcttccagcagcacatcgccttccctgccaccgtcgaccgtgccatctcatccaagcccgccatacgcttccacaggctcccacgcgtcgagctccctccggccatcaccaccaaagacaacgacttctccctcctcgggtacttggacctcgtgaggcgacacaatgagtgcctccatgacttcctgtgctccatgcctcccggtggtgcacacgccctcgtcgtggaccctctgtccgtagaagccctcgacgttgccaagaggctcaacgttcccggctacgtcttccacccagggaacgccagcgccttcgccatccacctccagcttccattgatccgtgcagagggtcagccaagcttcagggagctaggagacacccctctcgagctccctggcctcccacccattccggtttcttacctctatgaggaacttctcgaggacccggagagcgaagtgtacaaggccatcgtggatttgtttcacagggatattcaagactccaatggcttcctgatgaacacgttcgagtcgctcgaggcacgggtggtgaacgcgctcagggacgcgcgccgtcacggcgacccggcggcgttgccgccgttctactgcgtcgggccattgatcgagaaggccggcgagaggagagagacagccgagaggcacgagtgcctcgcatggctcgaccggctgtgaaaatcagaggtgcagaagcgttgaacctcgttagtggccgcacctttgttaatatatggtgataacaaccatcaccgtggtttttacatccatatagcatgcagtctgttttgatggatagaagaggctaacaacctaacaaactctatcttatccaatctaacagatctcacacgcatgtatacaatatagtttcacagcccccctcaatcacaaccttcccaggttgagattgtgcttaaagttctctaactgtcttacaggcaaagccttggtaaaaccatcagcaacttgatctcctgtaggtacaaaatcaatctctaatagtttctgagatactctttctcgaacaaaatgatagtcaacttctatatgctttgttctggcatgaaaaacaggattagaagaaagatacttagctcccaaattatcacaccacaacttggccataggcggactctgcacttgtaattctgtcaataaagtctgtacccacataatttctgctgtagcattagcaagagctttgtattctgattcagtactagacctggaaactgtagcttgtttgcgtgcacaccaagatacaagattatctcccaaaaaaactgcaaaacctccagttgatcttctatcatcaagagatcctgcccagtctgcatctgaataagcactaacaagcatagacttggacttgcatagtttcaacccaagtttagtacactgtttcaaatatcttaagattctcttaactgcagcccaatgaacagtggttggtgcatgaagaaattgacagactttgttaactggaaaggcaatgtctggtctagtcagggttagatactgaagagcaccaactacacttctataatttgttgcatccagaggccctagtaagtcaccctcatgagcagataatttctcactagtagacaacggtgtacttactggtttacaatcaaacatatttacccttctcaggagatcacaagcatatttatcctgtgtaagaattatttcatctgttaccttgtttacttctatacccaggaagtaatgaagatctcccaaatctttcagggcaaactcctttttcaaatcctgcagaagagctgacactgcctcctgtctggagctagtgactattatatcatcaacatagataagaacaaatatgattagtcctcctttgttataaaagaataaagatgtatccccttttgatccttgaaaaccaagatcatataatttcttgctgagcctggaataccatgcccttggagcttgctttagcccataaagggctttatcaagcttgcacacatatccaggaaaagattcatcctcatatcctggtggttgtttcatgtatacctcttcttcaaggaatccatgaagaaaggcattctgtacatctagttgtctcatgcaccaacccctagacacagcaatagacaagacaatcctgatagtagcagctttgactactggactgaaagtatcttcataatctataccgtatctctgtttaaatccctttgcaactaggcgagctttatacctgtctagacttccatcttgttttcttttaattttatagacccacttgcagtctataacatttctaccttgcttaggtggaactaggtgccaagttttattattcatcaaagcctcatactctatatccatagcctttttccagtttgtattttgcaaagcatcagttaaattttttggttcaccagtcacagtaagaaaggtattcttgtatttaactgtgccatcggtatataccttctcttttcgaatacctctttgcagacgagtagttgggcgagacggcgcttgagtcacttcctcccctgtcgcgaacggctcggatgcagagatgtgtgatggtgacgggacatcatcattgctggcaggcgtcgcggtggcgtgactaggttggctcggcgaagagctgtcggccgagtgatgcgtcatcacgtcaggagaggcaggaaaatgtaccacgtccagggatgtggcagcgccgggttgactggcagcggtatctgatgcagacggtgatgcagcggtatcctgatggatctgttcagccagattttctgtggcaccggaagaatcatctgcttcatcattttctgcagaaacaggctgcacattgcttccaaaaatttgattagcaggattaacaggaatattagccatattgtcatctagctgttgttccccaggatttgatgttggatttaggagatgtgaaggaagcaataaaatttctgaacgaagtctagcaccggcgtttgtgtgaagtttagcaaagggaaaatttgtttcatcaaagataacatcacgggatatatagacacgacctgtggagggatcaagacacttgaaccccttgtgtagtgtgctgtaccccaaaaaagtgcactgctttgatctgaactgaagtttgtgtgtattatagggtctcagatgtggccaacaagcacagccgaacacccggagagaactataatctggggtttgattaaacaagtgctcaagcggtgtgaggaactgaagtagttttgtaggtgtcctattaataagatacacagcggcttgaaaagcttcatcccaaaattttagaggcatggaagaatatgcaagaagggtgagaccaacttctactatatgtctatgctttcgttcagctgagccattttgttgatgagtatgtggacaagaaacgtgatgtgtgattcctatctttgtaaagaaggagtgaagtttttcatattcacctccccagtcggattgcatggctattatcttcctattaaacaaacgttcaacaagagcttggaattcatgaaacttttggatgacttcagacttatgcttaatcaaataaagccaagtaaatttactataatcaccaataaagctcacataatattgtttgcccccaacagaagtgagggcaggaccccaaacatcagaataaataagttccaaaggatgactcgacatactagaagatctagaatagggcaattgatgacttttaccctgttgacatgcatcacaaaccgactgtttatttgactcagctaaacaaggaagattatttttgctaatgactttctccacaattggagaggctggatgacccaggcgactgtgccatcgctcaaaggatggcttgatggctccaaaggcttcttttagaggacgaggacgttcatgaggtgatgaagatggaagagcgtacagtcgcccccggcatggtcccctaaacagaagtttcttcgtggccagatccttaagattaaaatatttagagtaaagctccatgtaagcagaattatcagagacaagtctattggcagaaacaagattcttatttgcattgggaacatataggatattgcgaagatgaatatcacgatttggggttctaacagtagaatgaccaatatgactaatttccatacctgcaccgcttgcggtgtgaacttgatcttgccccttgtagcgatcgcgaaccgtgagcttgtccagttcgccagtcacatggtccgtcgcactcgtgtcgacgtaccaatttgtatcaatcccataagatgttgccgatcctgcatatttttcatcgggaacaaaatcttcatcatagcgataccagcagttgattaccgtgtgtcccctcttgtaacagagttgacatttaggtctgttgtcgacgcctcccggtggtcgtgcgccgccattgttgccgcgtcccctgccgcggttagcgccattgttgttgccgccacggccgcggccgccgttgccggtgttgccgccgcgttgttgtcctccaccaccgccacgtcctcggttcgccaaattgacagaagagtctccaccgtgacgaagcgcgagacgctgctcaaagctgagcagctgagagtaggcttctcccagcgtcatggtgtccttgccaacgatggtggagatgacaggttcatacgtgtcgtcgaggccggcgatgatgtaggagatgagatcatcgtcatcaacgatcttgccggcagccgtcatctcatcagcgagggccttcatcttggagacatactcgttgatggagagagtgcccttcttggtgttggagagagcgatgcgagtgttgatgaagcgcgccctcgtgacggaggagtacatctcctccagcatctgccatgctgctgcagccgtgccgcaggtggccacctgtgccagaacgtctctagctagggtggagagcaggaatcctagaacctgctgatcggttgcaacccaatcatcaaattctggattgcgaacagtgacttctttctctcccttgtcgcctgctgtcgtcgtgatcagggcgttgggagttttggtggcaccggtgagatgcccctcaaggcgagctcctcgtacagccgccatgacctgcgctttccatagcgcatggtttgatttggagagtttctccgagatcgcgttcccgccgagaggattcccggccgccgtcttcgacgaactcgccatgagttggattagatgcgattttgtggatggataggctctgataccatgtgaaaatcagaggtgcagaagcgttgaacctcgttagaggccgcacctttgttaatatatggtgataacaaccatcaccgtggtttttacatccatatagcatgcagtctgttttgatggatagaagaggctaacaacctaacaaactctatcttatccaatctaacagatctcacacgcatgtatacaatatagtttcacaccggcaaccggaccgcagcgtcgtgttcctctgctttggtagcaccggcacgggcaaccactccaaaaagcagctcaaggagattgccgtcgggctagagaaatccggccaccggtttctgtgggtagtgcgcgcccccatcgtcgtcaataacgatccggagaaaccatacgaccctcgggccgatccggacctcgaagcgctcctcccggcggggttcttggagcgaaccagtggccagggcgccgtagtcaagcaatgggcgccgcaggtggacgtgctccatcaccgggcgactggcgcgttcgtgacgcactctggatggaactcggtgctggaggggatcaccgcgggtgtgccaatgctgtgctggccgctctactctgagcagaagatgaacaaggttctcatggtggaggacatgggcatcgctgtggagatggtcgggtggcagcagggccttgtcacggcagaggaggtcgaggccaaggtgaggctggtcatggaatccgaggcaggcaaccaactcagggcgcgggtcacgacgcacaaggaagccgcagccgttgcatggggcgacggcggatcgtcgcgcgcggcgtttgccgagttcctgttggatgcagacagccgacagtctcactagggcacctatggatctggcacatctaccttcaattcaaacatactatgtatctttgttattgttatatgagtccgataaactttaaaataagtattttatcattgacacgtgatgtgataaaccatgaattcacgtatcaacatgataaaggcacggtggcttttaagtcagaggatctcaatccaacatctatttgtcttttaattttttgtgttgtctaaaatactataaaaaaattatcgtttaatttaataagttagatcgatatatgtgatatatcactatacaaataagaaaaaataaaattaatttatacaattaaaaaacaaacaaatttgactcccaatttaacgcatagttccagtaaaaattgttttttttctaacgtgcagatccaattttagcttataggtttagaccccgtttagttcctaaatttttttcccaaaaatatcacatcgaatctttgaacacatgcatgaagcattaaatatagataaataaaaaactaattatataattaggggggaaatcgtgagacgaatcttttgagcctaattaatccatgattagccataagtgctacagtaacgcacatacgctaatgacggattaattaggctcaagagattcgtcttgcggtttccaggcgtgttatgaaattatttttttcatacgtgtccgaaaagcccttccgacgttcggtcaaacatccgatgtgacacccaaaaatttttctttacgcgaactattatgcagtggcatatcatatattcatctatcttcatacacacgatataaacaagaagatatcctctggtaggttaaaaattcatcactatagtactttctcagtcctaaaatatagctatttttagcacagtaccttgtcccaaaatgaagctatttttccaactacctcctctcaaccaatcacaatcattctccttcacctactttttcttttcaaccaattacacaccttctctaatcattctcacatacttttttaaataccagtaccaaccttaaaaatacctacattttaaaacggaggaattatttatcaccctatccatctacatgtgccctccgtcccagaataaccgtttcaggaattgtcacttcagttcagattttttgtccctaacccagcaggccagttagtactcacacgtgaacgttcctgctcgctgttcgtaatacggtagatgcgttttttttttaatctccaggatcagaaatgataccaccagtctcagaagatagtacatgtagatgagttaaatttccccccaaaaaaagttaaatttgttattttatatttattactcatatattaaatttgaatttaaatgtttatggaatgacatatattatattgatatatcatgtcagttttttaaatatatatataataactatttgaatactacctctgtctcaaaaagtagttttgcactacttatataccacatttgaccgtccgttttatttgaaaaaaatatgattcgtatttttgttgttattagataataaaacatgcatagtactttatgtgtgactaatttcttttaaattttttatattttttagataagacgggcggtcaaacgttgaacacagaaatccacaactacaattaatatgggacggaggtagtaccatatacttcctccgtccaaaaaaaataatctagtattagtattagatgtgatatttttaagtacaacgaatttagacaaaagtctgtctagattcattgttgtattagaaaatgtccaatccaactaatttaacttatacaagttgatacaaaaataacatatttaactttgtatttaatgtgaattttcacattcaaaattattattttgtttatacactatgaatttaatgtggattttcacattcaaatttattattttggtttctaattgtatagatggaatttgaacttgctcgtgtatagtcagtcatatatcacatatgaatctatcttattaatttttttaaaaaaaataatgactttttaatcgacatgcacaaaacgagtaatgtctcatatgaaaaaaaaatccagcaccatctacacgtaaccctcaatcctcccaatacaatataacgaagccaatcccaacaaggcgacatggggcatgtaacggccggggctacaaaccgtgtaaaaaatgaagggattatcttaaaaaaaactgctgcaagttaatggctccgaatagtttttttttgtcttttttgttttcgttggatatacttccgtatcggtttccaaaaattgtcttaattattccctccatatttattttgagatagaggttgtagctcggttcggatccgttttgtagcaagttacccggccggtattcaactgctcgctgtttgtagtaatacgggaagatgtgattttctttttaatctccaggataaaaatgatacagcggtcgagctttggttggaggaaggactacagcctacagggaaaacgccgtttgcctttgtccattgaatgcttttgttgtggtcggtcaccttcgatcggatgcatttctgattctttcttcttggaaaagaagggctaaagattgtcctacggggctcggtgctgtagtatgggacaaaggcagaggatgtgaacccgtatgactttatttctaactctgtatcacgatcaccggactaattgactttcccgactaataataaactctatcacgatctctatctgattcgtcgtgtccttattttactcctgtagacatcaccactgacggcggttcctaaaaacaatcaggcttgtgaatctcgaggcctaccggccaattaatttaatcacatctgttagttggtggcggcacagacgaacgactagaagccatcgatgtgtatcctgccttgcctgcgtgtgatgatcatactgtgatcccatcttgtgcagtactccatccgtttcacaatataatcattttagcattttacactttcatattgatgttaatgaatctagatatatatatttatctagatttattaatgtcaatatgaatatgaaaaagctagaatgacttacattgtgaaacgaaggaagtagtatacgccagacgtgagctctcttccttcctcgtctaccagtttactgaactgctgactttagtgaaagagtagtcctcataattcctccaaaactttataaagccaacgtgaaatttgtgttggttatgcaggtcacattggggcgtgtcaacgttgctcaccatggcttaccatacaacccctctatatatacttgtggctgtccgatttgagggcatttgtttccgtcttttttacatcccgtttgatcggaagttcggaacagcagcgagccatgacgacaaagacctttgtgctgttcccgtcgctgggcgtcggccacctgaaccccatggtggagctagccaagcacctgcgccgccgcggcctcggcgtcatcgtcgcggtgatcgatccgcccaacaacgacgccatgtcggccgacgcgatggcgcgcctcgccgcgggcaacccttccgtcacgttccgcatcctgccggcgccggccagcccggaccccggcgcgcaccatgtcaagcgcaacctcgacacgctccggctcgccaaccccgtgctccgcgagttcctccgctcgctgcccgccgtcgacgcactcctgctcgacatgttctgcgtcgacgcgctcgacgtcgcggccgagctcgccatccccgcctacttcttctttccctccccggccagcgtcctcgccgtcttttcccacctcccgtattactaccgcaacgcgccgtcgttgagggagatggataaggcggcgctcatccgatttcccggcattccgccgatccgcaacgtcgacatgctggcgacggtgaaggacaaggagagcgagacgaccaagatcaggttgtaccagttcaagcggatgatggaagggaagggcgtgctggtgaacagcttcgactggctggagcccaaggctctgaaagcgctcgccgccggtgtctgcgtgcccaacgagcccaagcagagagtctacttcatcgggccactggtcgacgcccgcaagaaggtagggagcggcgccgagaggcacgcgtgcctcgcgtggcttgacgcccagccgcaacggagcgtcgtgttcctctgcttcggcagccagggcgcgttcccggcggcgcagctgaaggagttagctcatgggctggagagctccggccaccgattcctgtggaccgtgaggagcccaccggaggagcagtccacatcaccggagccggacctggagcggctgcttccggcggggttcttggagaggacgaagggcagaggcatggtggtcaagaactgggtgccacaggcggaggtggtgcagcacgaggcggtaggcgcgttcgtgacgcactgcgggtggaactcgacgctggaggcgatcatgtcggcgctgccgatgatatgctggccgctgtacgcggagcaggcgatgaacaaggtgatcatggtggaggaaatgaagatcgccgtgtcgcttgacgggtacgaggaaggagggttggtgaaggccgaggaagtggaggctaaggtgaggctggtgatggaggccgaggaagggaggaagctcagggagaggctggtggagacgagggacatggcgttagatgccatcaaggaggctgggtcttctgaagtggcatttgatgagttcatgagagatttggagaagagcagcttggagaatggagttcgcagctgatcaagcagagtatgggtcatgactgcattagtgtaccaatggcgtcagttaccacatgaaatgtttgcgatttttgttaagttagaagcaaagttgtccgcatagcgatgtttttttcgtcctccgatgacggacgcaattgtctcccgtgtccaaaagttgcagtgtcaaccatttctgtataagcaaattaaaataatgcatagtcttcaaacctgaccaatactagcgaccaattattcagagccacacaaacaacatgaacccactagactggaaatcactggctctagtcaaatgcaaattctctaagctaactgaaatgcgaaattaaaaaataaggaatactagaagaagagtatagagtccatatagaaatacaatttaaaaaatagaaaataggaaataaaaaaaggaatattagaagaagagtatagaatccctacaggaatttagaattgaataaatttcagaataaaaataataaaattaaaagtagagcttagagtccatatagaaataaaatttgcaaataactaatattcaaaattaaaaaaataatatgggaagaagagtttataattcatataggaatataatttagacatactgaaattcgaaatttaaaaaataaagaatattgaaagatgagtttagagtccacatagaaatacaattagagatcattgaattcagaattaaaaataaataatattagaagaagagcctagagtctatgtagaaatataatttacaaataacaaaaattcagaattaaaaaataagaaatattaaaaagacgagtctacagtccatatagaaatacaatttagaaataactaaaatttaatattaaaaataattaataactatcacgtatatacagtacaacatgaatattacacattgatagtttggtaaagttagtacaaaatttaaaattatgttatcattttaatatattttaataaaaaaagaaaatataataatgctagcctcgcaatttgcgcaaacctctatactagttcttattaattttttaactcatccctaattatatggatctggtccgttacaccgtacagaataaaaactttcttttcttcgtcattgctcacgaaaacggccgtgacgtgagctacctggtctctccttcctcacgtagacttctacaaagcccatgtgaaatttgtgtcgatcatgcaactcaccgtgaaacgtttcaatgttgctcgccatggccttctttgccaagaaatgggttaccattcaacgccgctcgcactatttagcttgtgggttgcgagattatattggtaagccaatttgagagcatttgctacgtttttatgcatactgtttgatcggaacaactcgtagccatgacgacaaagacgtttgtcatgtacccgtcgctgggcgtcggccacctgaaccccatggtggagctagccaagcacctgcgccgccgcggcctcggtgtcgtcgtcgcggtgattgacccgcccaacaacgacgccgtgtcggccgacgcgatggcgcgcctcgccgcggccaacccttccatcacgtttcgcctcctgccggcaccggacagtcctgacgtcggcgcgcacccgatcaagcgcagccacgacacgctcaagctcgccaaccccgtgctccgggagttcctccgctcgctgcccgccgtcgacgcactcctgctcgacatgttctgcgtcgacgcgctcgacgtcgcggccgagctcgccatccccgcgtacttcttcttcccatcccaggccagcgcccttgccgtctttctccacctcccgtattactaccccaatctgccgacatttatggagatgggcaaggcggcgctcctccgctttcccgggatgccgccgatccgcaccgtcgacatgccggcgatgttgcgggacaaggatagcgaggcgaccaaggttaggttgtatcaattcaagcggatgacggaagcgaagggcgtgctggtgaacagcttcgactggctgcagcccaaggccctgaaagcgctcgccgccggcgtctgcgttcccgacaagcccacgccgagggtctactgcatcgggccactggtcgacgccggcaggaaatcaaggatcggcggcgagaggcacgcgtgcctcgcgtggctggacgcccagccgcggcggagcgtcgtgttcctctgcttcggcagccagggcgcgttcccggaggcgcagctgttggagatagctcgtgggctggagagctccggccaccgattcctgtggaccgtgaggagcccaccggaggagcagtccacatcaccggagccggacctggagcgactgcttccggcggggttcttggagaggacgaaggacagaggcatggtggtcaagaactgggtgccacaggcggaggtggtgcagcacgaggcggtcggcgcgttcgtgacgcactgcgggtggaactcgacgctggaggcgatcatgtcggcgctgccgatgatatgttggccgctgtacgcggagcaggcgatgaacaaggtgatcatggtggaggagatgaagatcgccgtgtcgcttgacgggtacgaggaaggagggttggtgaaggctgaggaagtggaggcgaaggtgaggctggtgatggagaccgaggaagggaggaagctcagggagaaactggtggagacgagggacatggcgttggatgccatcacggaaggtggatcttctgaaatggcatttgataagttcatgagagatttggaggagagcagcttggagaatggagttcgtagctgattaagcagagtaaggctcacgattgcattagtgtatcaatggcgtcagttaccatgaaatgtttgcgatttttgctacggaattgctattaagttcagaagcacagtagtgcgcatagtgatgttcttttcatcctccaatgacggatgccattgtctctcgtgtccaaaagttgcagtgtcaaccatttctgtataagaagattaaaataatgcagtcttcaaacctgaccaatactaacgaccaattattcagagccacacaaacaacatgaacccactagcgtggaaatcactggctctagtcaaatgcaaattctctacgctaattgttagtcatccaaaatagtcctgagtaggctagagaatagagatagcgcaggatggacagtgacaacttacaagaggatggaaccatcactgaaattcaggtgcctgggaataccaaagaaggtaaaaatcatgtcttctttttttttttttttgaaacgaaaaaaaaaatcatgtcttcctctctggccatacttgtcaattaggaaatctggaagtaacagaccgctagcaccagatgctgcgtggtttaaccttattgaacgaaacctaaacaagtttctgctagtccataatgggtgtaagttgaaactgaagcactgaatctgctaacctgactaactgtgacaacctgcaataaaacaccaaatcggacagagcataattcagagcaaaagtgtcacctctcagcagcaatcttgtcgagtcgccgatcaggcacaagggatcatccctgatcatcttcgacgcttcatcatttgcagcgctgcaaatcatccacgaaatcagagaacgccgtgcacgacggcccgccgtctgccagcgcctccgcggccatctccttcgccattgccagccttcctctgagcttcttgccttcgtcggagtccatcaccagcctcaccttcttctccacttcctctgccttgacgagctcctcgtcgtagccgtccatcaccaccccgagctgcatcccgtccaccacgagcaccttgttcagcctctgctcggcgtactgcggccagcacagcatcggaactccggccgtcgccgcctccaggatggagttccacccgcagtgcgtcacgaacgcggcggtcgcggcgtgccggagcacctccacctgcggcgcccacgacatcaccaccattcccctctccctcgtcctctccaagaacttctccgggagcagagcacccaggtctggctcagaacgcggcagggagaacttggccgggtcctccggtggtgggctccgtaccacccagaggaaacggtggccggaattctctagcccacgagcaatctccttcagctgctccgccgagacggcgcccatgctgccgaagctgacgaacacgacgctccgctccggctgcgcgtcaagccacgcgaggcatgcgtggcgctctcctttcgccgcgtcctcgcccttcacgatcagtggcccgatgcagtacaccggcggcgtggggcggtcgggcacgcacgcgccgtccccgagcgccgtcacggccttcgcctccagccattcgtaggtgttgatcagcatgccccgcgcctccggcatgcggcggtagtgatagaccagcgaagcaccgatcacgtccgcgcagtcgagcacgttgtgcggcatgtccgacgccgggatcggagggacgccgggaaagtggaggagcgccttccccatgtccttcaagtcgccctccgtggtggcgaagtagtgggggaggtggaggaacgcggcgaggacccccgcggaggaggtgaagtagaagtacgccgggacgccgaccgccgcggcggcgtcgagggcgtcgacgcagaagaggtccagcacgacggcggcgacgggcgggagggagcggaggaaggtcagaaggattggcacggtgaggcggatcacgtcgagcagctgctggaagccgtcagggtccggctcggggtagtccggaggcgggaggttgtggaaggagatggaagggttggcggcggcgatgcgcgccaccgcgggggccgacgaggcggcgacgtcggcggtggaagccggaggggtcgggacagcgatgatgactgcgaatccacggccgaggaagagcttggcgagctccaccatgggggcgagatggccggcgccaaggatggtgtgcagcaccacggtctgactctgttttgaattgggctccattagagcgagccggcgacacggtgagtctatgcgagtgttaagggaggtgccttctcgcgaaccacttgaggggagagtttaagcctcggttgctcgtataatttctacaaaacttcaatgctcagcctacaggtttgaaactcgcactgtgcgctgctatataacggaatcccgttttcaaacgggatgatcccgagcaggtatcaggtgtgatacctatcagatatcagatgattctacacaataggatgatcccgagtacgtatggtgtgatacctatcaggtatcagacgattctacacacgtttcaggtgatacttgcaagtatcatgtgatacttatcaggtatcatgcgatttctaccacgtatcgcgtgatactcgcgaggtatcatgtgaaacctgtcaggtatcagacgatttcaatcacgtatcgcgtgatactcacgaggtatcatgcgatacctgtcgtgtatcagacgatttctatcacgtattgcgtgatactcgcgaggtatcatgtgatacttgtcaggtatcagacgatttctaccatgtatcgcgtgatacttgcgaggtatcggatgatacctaccaagtatcaggtgattcctactggatatagctgggcatcctgttgggggaggagcacctcgacacgcgcggtcagtaccctgcagccgtccctcgtaaacgaggacggcggcggtggcggcagcgggggacgggcgcggcggcggcggcggcggtggcggcggcggcagaggcggaggcgaggggggacagtcgcggcagcggcgggggacgacgacggcagcgagtgagcaggaatcgcgttgtggaggaggagctatcccgttcggggacgggataccgtcccctagcattcccgatgatttaagcttacaagagtactactccgtggattctacagaaaaggggatacacatcgctcattgctgacctcaattttcattcctgccaaattgctgtcagttatcgtgtattctccagcccaagagtgtccatgagtgtacagttgtacatagggagtgaattttcatccctggaggggatatccactcgttgtttgcatatcactcaaatggttatgaaaaaaattgaaaaaaattaagaagatgtattaacat

SEQ ID NO: 5311 - DNA, 27434 bp, Oryza sativa
ctcaacgcagcagcaacagcagcatatgccagcatccacacaaatttttcgtaaccagcagaagagagatcaagaacatcaagaacaaggttacgaaaaatgccggtccatgcgtgcatgcatgacagattcgacagaaagctaatcaaactgttttgtgtgtgtgtgtgcgcgcgcgcgcagttggcttccggctcgccaccggcagccgcgcgcggtcgtacgccatgcgcgcccgcgtgcgccgcgcgcgacgccggcgaccgaacggctcgcgtgcgcgcggatggaaaacgtcgggagcgcgcccgggcgccccgcccgtgacgctgaggattgagatccatccgtggcattggaccaagtagaacatattgcatccaactccaagtacatagtacatgcgagtgtagaggaattcaacctcgatcccaagtggacaaatcttcgtgagttgtgattagctagcatgcgaaacaggacatgaatcaaccgaaaatactgatatcatcagaagttcaaagaaattactgccagttctcctgcaggtagtattttaaaatttaaggggtcgttaaaattgatgacatttcaaaccatatcactttttttaaaaaatattaaatagtgtattcatttagtttattgtcaaactctagtaaagacataagaaatcctaccaaaattttagcaatatcgctaaattgctaaaatttggtaaagtttattttggagtgaagtacatgggtggtctctaaacttgtgtaggtgtgttatctagatccctaaacttccaaaatgtatttttagatccctaaacttgtcatgtgtgtcatataggtcctaaccggttcaaaccggctccatgcgctgacgtggcattgccatggtggcacctacgtgtcattgaaatccacatgtcaagcatatataaaaaataaaattaaaaaccatattttctcctcttaggtaaacataaaaaagacaaaaaatctaatataaaaaataaaattaaaaaccatattttctcctcttaggtaaacataaaaaagacaaaaaatctaaggtagagaggagaaaatatgcttttttaattttattttttctatgtgcctgacacgtggtacgtaggtgctatcatggcatgccacatcagcgcatggagcgggttagagctcctctggacctagatgacacctcaagacaagtttgaggactcgaaaatgcattttgagattttagggacctagatgacacgcccgcacaagtttagggaccgctcatgcacttcactctttattttggctacaatcttaacatgccctaaactatatcctggtctttatttcgaagaaacttcattcacttattacaatattttcttaaagagaacaaacactcatgcaacagtataaactgaataataaaaccaataaataaggagaaaacaactactgatcatctatttgtgaatctccatccgtagttggcgaaaatctataactgtaacttctaagtttcgacatatagaatatatgagcttcttattctcttcacacttttgaagttatgcccagcaatcgagccaacgtgttaccttgaaaagtgtgtgtgtatatataatgtttatttcaagatttatttaaaactatatcatttctacttaattatagagccaaacacaaagcaaaggctccaacaaatatgagattcttagttttcgcagctagtttacacggccatagtatatatatttgctagcttcctccgttgttcgtgaggtcaagaagaggtccactaccgagccatggaagccgtctgccggcgaaagaggcggtggacaagggcaacgacaccggcgagcaggcgaggcggtgtttactagtttcgagagtgaatggaccacacattttttatcaaacgggtgagatatgtcctcactcaatttcgttaggttttcatattgccccctcattcaaatcgctctggtagacacatggatatattccgaaataaaaatactatagaactggtatatcgttccaataaaatagctaacatcattatggtaggtagcagatctagtatctactaggtattatgtttggtacaggagatactaaatccagttcctcggtattatgctaacgtcagcatgatgcctattgtaccagatctgatatctaccagatatcatgtttgctatctccgatactagatttgatatttacagtaccatgctgacacctagttataagatctcataactacgagggtatcatgtttgatatcagagatatcagatctgataactaagatatcgtgctgcaaatattagctatttcgttggaacagtattccgttaatgtcgtctcccaaattctgaaaaccccctacaacacagttttgcaaaaccgcggccaacgcaggtacgtggtctcgcttgctgcatccgctactgtcgctggccctagccgccgtgcgacaatggtgatacgccggcaagccggagctgtcgatgctgctgcgtgggctcgcggctcctctaggaggcggcaagcaatctcgacatggcgacccccttcctgaaggatcagggaatcttgactggcagaaatggacccccttcctgaagccgccaatctccgacgatcaggcaggagtcgggatcagggaatcttataccggcagaaacggagctggaacattcgatcctggcttgctgtgcgcgtaacagatgctcatgcatctccgcttggactatcaatgagtcctcctctgccttctgcttgcttagaggatttggtgtatgaggacacatgattgtttaagtcaaatttaatttaaaaactactacatgattatatgcctgaattcagagcatcaatacgaaatgtggagcatgcctgcagcttgaatatatgaagtcctaccatttaagggatgacccattgacccacacattaacgagagaaaaagtggattggattgatccaccagttaacctgaatcttagggaaatatttcctatcatggtccatctcttattctctttccacctattcccaaaccaaatatcctgaaaaaaaaagttcaacccaacccgatccatccaaaccttaaggattgatgccttatgatgatctcctaaaagttttaagtatgtatttggacagctgggaaaaatggctcagtgatgtttttttattaaggctggagtggagtacaagtgtacaacttcgcatcgccagaaaatgtcacaggaattatcttattgtcgagtgtgcaaagcaagtagacaacaacgaaattgggggaatgggggataatgaaaatgcggttgtacatacatttatacatatttacccatgatatttatatccaagtgaccaagtgcatatatacacactgcatttatacaggaacgtaacatcctaaacgaccagatcttgtgaatatgtaaaaccaagaggaaactcaactaagaacagttctataatttcttgaacttacccatcccttcctgatattgattttgccgtcggctgtttgcatgttagaggcatatttaggcatatcttgtaacttatagtcaaacttttacctgtgacttgtacaggaaaaaaagtatagtgccaaactctacaagaaggatcttagggccgtcacaaccttctctggcctgcataacatgacaagtgagatgcgttaaggatcgcacaagtatatgaattggccaaaaggtaaaggttgaaggttacacgtcaaagcaggcaagcaccgatggaactatgagtacaaattttacaggacacagatcgacagaaaatactgagctagtaaaaaaacaattaccagtcctcttgaggcatatgaccagctccttctattggctccaattttatggctgcaggattacctttctggaactcctcagctatggggagtggcaagtacttatcagaaatcccccatgcaagcaatattggtttttcccagctgcaggaaataccagagagaagtttcagaactggaaaacattagtgataactgatacctgtctaatattgcttgcttgaattcagaatgaaccttttgacactgctgtgcatgcatacatatgtttatggacatagtagtaacttgcatgttatacggcataatctatctgtttttaattatatcagaagctaataaatatgtttgtttgtttaagttatctgtttttagttagaacagaagcaataacatgcaataaatatgagtgattgtttgtttgtttaacttacctgttggatgcaaacccggctgaaattctacttaatacatctcggaagttagctttcctggcagcttcaagcaatgctaaaaaaaagaaaagcgagatgtaactaaggttgtcaaataatctcagatggtaatgacagttctaggtaaaaagtagacaaaagaatataaaaaaaaatctaaacatcatttttcttaaagtacaaggaatacaacataagttgcagaagaagtaatagttgttcgatgctattggcataaggcgtagcataaactagatgatacttcacgctttgctgcgggatatatgttagacaatggaaaaatgatgaaacgatttggattgaaatattataaaaatgatttgaaaatgatgatttagcatgtgtgtgtttagttttagaatgaaataaattgtagatataattattatatgcttgcatgttgagtttcctgtgtttaatgggttgatgtggcatgcttgcgtgtaggttttaggagtgctaataaatattatgcttgcatgttgagctttaggtatttagtgggcattagctttatataaagaatggacgaacaaaacaacagtttttatatagatgatgtaatacttaatagcttaaacagatgccttcaacaagtataatccttccctccgaagtccaaggttcaaccaatataattgtcatggtagcctggcaggtacaacattaaccatgcaggctaaggtacagatacaaattgttggcccaaacatgcaagcaaatatcctataataaactaaacatggtacttttcagtaatcatcatatgtgtaactagtagggttctaaaaattgcagttttgctttatgaaggctaaagcaatataatcaagatcctttgctgaaaacacttatgtggacccagtgccatttcttcataagataacttccaaaatagctaggcattgagtgaaaatatgtaaacataaacttcgagtatttcccatggacagtaattaggattagctagaaggaaatagtttcccctgtggaattttcgtttcctttattatgaatatagcccagccccaagcccaggcaaaggaggaggttgtgacaagcttggcaagccaatgtgaaaaacccaatcattgcgatggagggtaagctagatggaaatggctgtgcaagcagaatttgcatttccttcattaggagagatggattctataaattgataaaacatagtcatatagctgacaatttatttaggtacgtttcatggctgagaacaatacaactttaatgtaaagacatgttgggggcatgtgattcaggtgtacagactaaccaaatccaggtgcaccacttgatagatatggtaatctgtatacatcagccttctccgactttagcacatagctgtgaagcaagtggacacaatataagcaaatatgagaataaacaacatgccacagatatggacaggactgatatagaacaacataatatgaagaataaaccaaactttttccttattttgagcatatcagtaagaagaataatgataacatatctgaagaggagaatgaagaatttctgtgacaatgatagatacgtacgggctacctgcttcaatgaatctctcagccaaaacagcattttggcaggtaaattcaccaaaaagtggcaacctgcattgaaatgtgacttgaatttacttccatgatacaaatattaagggcaaaaaaggcaagatggcatcaactgcagcattagtgaaaaatattgagcagtaagcaggttaaagataaattctatttgcacatgtatcaaatactcatactctttttaggaccagcttgtataaagtccaaataaaagttaatagcgaaaaaccatactacgctattaaggcggatgaaagcattaacataccaccctcaaggcattttctatataataagtccacaataacatccgataaaactgaagaaggaaaacaatgtgaaaaagaatatgcacaatgttcatttttcgggtagatctggacgtcaaattgctcatgcataaatttatgtcacactttcaggtcaagctttgcgctttcagacttctgctcaggctgggttcgggcgggcctgagaaattgtagaaatgccaaggaaatggagctggaacattcagatgtgcagtgactagtaaagcagtgactgatgcatctttgctcagattcttgcattatcaatgtatagcggatttggttgatatgttggtgtacgcagacatatggcttgtttttaagttaaattttgttgaaaagctaaagaactatatgcctgaacttgtagcacaatgtaaaatgctgagcatgcacttcaattaagatgcaaagcaagagaaacagaaagactgaccttagctggttaaacaatccaggcactggagaagaaacagtgagtggactgttaagaattgctaccttcagaactttgcttgagttctttagtgcccatgttagcccatatgaacctacaagaaatccctagaatgaaaatgaaagaaacgattcagaaaatatatatgagaattattatgaaaatgcaggttcctaatgttttgggcatgtacctggacaactaagaagaatggctcagtgatatttaaagtactaagaagctcatcgagtgacttgtggaactcctcttctgcacatgatacaatataaatgagagtttagtaagattcattaattttgtcaacatttgccacacggccacacctgtgtagtcgaatccatatccgggctgtggcatatcactgaacccaaatcctatccaatcaggagcaaagcagtggtagccagcatctgccatctagtagcaatttcaatagctgcttagtgggtaaaatgatcgatagaaacaaatcgttagtacgatttataaatttatatttaacatgaggatccctatttattaagcttccagtataatgtcataaatatgctccatattcaaactatgtttttcttttaaattttaatagtctctggaaggtcacccatctgtctcggaatcataatcaacaggacatacacatgctgcagctgttagatgtctaaagtcaccacttaaatggtgcatggagctaaactttgcagcgaaagaaaacatattttagaaagaaccacatactaatttaagccagaaccactgatattttctgtctggtaatgcaaatcaagaacaacaaattgtttcataaattaagtttagtccaacaagctgcaagataaatgagtctgacctgagacataaccatacgatagctaaatgactgagatggagcaccgtgaataaacacgacagtcccacgtcgtgcaccagcggaacctacaattgtatcaccatatttatgaagcaattacatggggctttttatttgacagagacaattgcaagatggctctgtttgcaagaacacctggtgagcccttcttttcatggttcagcaatgacaactatacaaggacaaggtacaagacaaacaaacaaaaaaaggtacattttccttaagttttatagaggcagaattatagcaaattgggacaggttttgtttcctttaaaagctttgcagaaggagatgaacttatgtactactgtaggagaaatcaatattactgaaatacacaaaggtctgacaaaatccactatcttagtgaaagtatcattcgtttttattcttaaatactaaatttgtattcacaatgcaatactgcttcgtcgtcagtacacaccccatttcactggatcaacgtgcatacaacgttttactaacgttcagtgatcactgcaataagatcatctttcatctaaccaacacagaaatgaagaaacagtacctgtttccctcacaaaccaccgcagctttcctgatttcactcttgagccgaactccctccccttgtcctcgatcctctgcacgcgtcgagattactttacagcatactagaaatggtcaacaatgatacgagttcggaatcaaggaggtgtggcgaagtgggcattacgtagagcatctggccgacattgccgtcctgggcgggcgactccggcagctggatggcgccgcggctcgacgggttgtccgtcacgaacccgaacgggttgaactccgactcctcctcctgctttttcccctccgccgtctcatccttgctgccgctcgccgcgactaccaaactccgcttcgctcctcctccacgcgccctccaagcggcggcgttggcgctgctgccgccgccgccggaccacctgcctctgcaagcggggcgtggcagggagagaggagacgaggtggtggtggtgcaggggcagcaggacatggcggcggcgttcgggtgggtgtgcgcgcgcgcgctccggcgagacgtggcggcgcggcgagacgctttcggttggcgcagccgcgtcgaacggtcgggaagaaagaagattctccgcgaattgcggtggggccgacaagatcacttctcatgtggctcccgtgcacaaccgcaggtgagccactctctcactctactctagtctagtggccacaattgaatcactctggaaatccatgaattttctaacaacaaaacttcacaattcagcaacacaagatggctatgtactgtacaacttattggtaaattcgccataaaggcaacatcatctagagaaagtttgaggagctctttgttgtccaccaaatggaggagttgttctatgtttttttttctctagttgttcagaatgcaattgggaatgggtataatctgtgcaaccaatcatgcagaatgttatccttgagcttggtgttgtggcctgcaacctcctggtccatttccatagctggggttatggtagcctggtttgttgccagagcctgatggaccatttgatcttccaggatgtccgtagtgatggtgatggtgttcttgccctggatgcagaactggacgccaagggccagggggagcaaaattgctaggtggcctcacgtgtcctgaagttgcaggaagattggccattaaatcaaatgttgttcatcaggaaaagtaccatttttgtttccatggtttcacggggaatgaaaattacctggagtaaatggaggacaaggatgtggaggagcatgacgaggaaatgggccttgatttgcatggaacggaggacgccaaggatataagtcttgacctgcaaatggaggacaacgccgaggaaagaagccttgatttggtagtacaggtggaggatgccgaggaacgaagccttgaccagctaatgcaggaggaggacaccgaggagcaaggccttgatcttctagtacaggaggaggaagccgaggaacataaccttgatctgctagtacaggaggatgccgagctgctaaccgttgatccccttgtgcaggtggaggatgccgaggaaacgagacttgatctcttggtatgttcagacatccagatggcatatttggatcatgaccagaagagatgtcttctacttcaagtggagtataagatttctgagtaattggaggaaacacttgtgatggtgctttagaccctgtggagttcttcaaagatggtgatgtatgtttacttgaaccgctttgatgcagtttctcattatccaacccctggaagtgacactctggcatgtcttcagcatcaatgtcatctttgctcttgaagttctctatttctgccttgcgatgagatacttgattcgttatctcccttgaaatcatgtctgtgacattttctttcacctcaaccttttcatgattcttgatgccttcaacttgaaatgatggttgcgatgattgctggaatggactgtttgacttcttatcagataacctagggcaaatcagcacatcagaagttattgtagtttccctgttgattggatgcacatcaaatttcaactcaactaatatggagattagcgaagtcaacttttggaaggtcatctagatcattagctctatgagctccataagtatcaggctgcagcaaaaatggattagtctcctgttgttttgaagactcaacagcatttgatgcatattcttgagttatgctgcctgagaaggcctccgccatatgattctacacaatttacaggataataccattcaacagattaacacttgcaaccaaatagaactgattgcacaagtaactagatgagcaggttaccttttgtgcagctaaatcatagtgggtagttctctgctgaacatgcaaggatttcagagacaatccttgagaatgtgaagtaggatgccacactccaaaagatccagaatgagaatctatgatggactgaacatgttgctgaatttctgggacttcatgcgatgccaattcgaacggtgaaacctgtgacaactggcatcctattagtgatggtgctttgaacggtggctgcggggttagctttgatgcaagtttgaatagagaatggggcactactttttctgtaggatctctttcaccagtactcttagcatgcccacactgagatagcaaacctggataagaagtaaacgtaaataattcagtaatcaccatgtacatgcgctaatcagtgaaagaagtttaccagttgccacaggatgcgttttcacagaattgctctgaatttcttgcatttgatcaatatcattctgaatattgcctgtgtttgttctagagtccatgccaggattgttggagcatgatgttgcctgatgtccatctgaaaatggcaacgaagttggatgccttgctccaacatgaggcacacaaggagatccctttccaatagtttcagacctgctatgatccacaatttttgacagtggatttcggcgccacacaatgcaccctatcaacgagtcttggtttgtatcagctgctgacatgcctttaaagaaaccacatttcgctaggattgtaattacagcatcacttctggggcagacatagagattggaaccatcacatacatctgcaaaaccaaccttctggctcgcttcaaagttctcggcaacctataccagtgtctcaaatgagttagatccaatgtccagaaaagtccgtagctgttatctcaaatgagttagatccaatgtccagaaaagtccatagctgttacagatcaaaatgtaattaagtgcttgtaatacctctttcattcccagtaagccagcttttgatgtcccaaacttccaacaaagagaaattacctatacatacaggtgttggaatattattagcaatgttacattaactggtacagttaccgtagaagacaaaatttacaaactctttctccattggttttaaattcataagcacacaaatgtaattaagcctaaaagaaagaacctcaaagcataattaagtgggatgaaccttttttagcgcaaaaggtagctaactgtgcatttgattagcaatgaacatagtggatatttacttcaagaatgaaaggaagataaattatcaaaggtttattaatatatcagcaaggattgatgagaaaacaagaaataatcttaccatcaaagatcgggtttgacatcgacggagttcctggacaaacttttcaaacacatctaatttcactctccctttgatttctatgattttcggccaagtaatgtcgtgatttttttctccgctaccaagaaaacaagcaaagacgtatttaacatgaaacaatgtataccctgtgaaaatattcatcattcacaaagataacttcgactcaagctaaatagagaaatataagaatgattattcataaaagtcagtcaactcagcacaagaactagcaacgtagttgaacaaaagtagcaactataatttctctagcaaaaaaatgatttatcaaccgcatagcatcagactagttgtgcttccaagcggcacaaacttagctctggcgtggttatcaagttttgtacaaaaacaatgagatacacaatttatatgcttccagaatccaataaaacttgttgaatatggtatttcagatttgtaaaaaatggatactcttactaactcctcaaagaggcacataagtcacagctaaataggaatttggtgaagttttctacctttttagtataaagtagcaagcaataatcaaatgtagattgtaaaaacgttcatggcttttgccaaggtaggatcagaaatcctatatttattagccttactatttgtctgaagctaagaataaaactaaatacgatcttactagggatgggatgatgtaataaaatgcaccatagagcacaaatatggacactatagaattatcattcttagtagacacgaaagtcaccttttgaagaaggcgatcacagacaccttgacagtgctactcaactggattgtaccatcacataggctttcataagcagaaggagatagcaggccaacaactgacatgatttcatcatccaaagaatgaggagacaatatactagaactatcatctgcttttgtagaaccttgtacatcatgtttagcttcatagcttgatatcccttgcttctgttgaattttttcaagggaactctgagaagggtgaaccatagctacaatactctgatcacccttttcacagctgaaaagtaacttatgagccacagctgtctggctctgatctgttgaatctgcatacttagcacaactattactagactctattttagtgtgcattagttgaaaagtaatatgtggatgcataggtttgcttggtgttgtatgatttgtacactccatcaatagagagaacgattgagtagtatcctgacagtttgatgtgccattatttgttgaaatggtgtgcagtatggtttcatttggtttgcatgaactagttgtacatctaatgccactcagttctgtggttcctgacagaatatcttgaggagcaaaaccctgtgagttactcaaaatagagctcaacccagctggaccatttagaaatgattcttcaccttgatgactatctttagcactagtgactaacccagatccatgagaaacggccctattagattcactgtagtgaacagagttcaaaaattttctttttcttggcgtataaacctgaaaaatcatgtcgggggaattactttggcccgacatcctttcctctggaacagaaatattatatggttgtttgttccacgctgttgcgaaggcagaattaaaggaatgaaatcaactgtagattgcagcactgcttccaacaatagcagaatgccagaatatgaagcctgccaaaaacacagtgaataggaaggcccagtcactgaaattggtataagagtgtgagaaaaagtgacatctttacaagcaagctaatctacatgtaaaccattccctcgcagttgctctggaaattcagatggttctatagggaacatcagttcactactgacaatccatgcagtgacagaagagcgcaaacactgcaaaactccacaaaattgatctcctttgcgtgtaagctgccacccaaacaagtaactaaaaattgcccatccgcaaggcagcattaactgaaggaactactagcgcaccactgatttgcagcatccaccacaaaaaccgcagttagccaatgaattccaacatgactactgagccagcatgcagccccttttttacactccatcctatgatcgtccaattttggagggatcaaaggggaaaaaatcgggataagactgaacattgggggggggggagaggaatggtatctcgattgatggaaaaggttcctgcgccaagattacaccctaccagcggcgaaaagaggccgctgccaccgccgcctccggtggctaaggggatccacaagctgaagcatgtccgagaaaaactcgcggcggagggatttgtggaggaggaggaggaggaggaggaagcacgagttcacctgggagagatgaagttgcgagggttttgggcgtcggaactcggaactgtccgatcgacgcggcgtcgagcaggcgagcggccgcagcctacaggaagcaaccgtcggagtcggacgacgaaaacactagcgcacgcgttagttttcacggaggatgcacacggaacattcggaagggtaaagggcagaagaactgcaggtgggaccacccaactttcctctttttcctttggactaacacaagtcacaagggacacaatgtatcccaccttcctaggaggagccaccaaccaccagtgtcatcttttatttatgtgtgctatattaaaacccatatgtatccaagtgtaaagtgtctatcacatttacacacacataagtatggtttctcatctatttaagcaaataagggatagagatctcaaattaaaaatctaggatcgtgaatcagaagtatttagtatgaatttaggtttgagagctaacaacatcataccctatcgaaaacaccaaaatcaacatacatagtacaaagcaaaccacaaatcaaacggtgttaataacaaatctaaagtaaatcgcaaatcaagtggtattaacaaaagatgtaaaaggagataaagggatttgcttaaacggcgacaagaaaaagtgagcaacaattgagtgatgagatagggttggcgtgaccgtggagggggcacgacggtaagaagattgcagggatcgtgtataactagatctacataccttgggaaggaaacatatgaggcgcttagctctccacaagactaccatccatgggaagcggcggagaccggagatagaagggataagatgcaagagtgagtgagtgagcaaagccaataaatagggaaaagggaagcactgaaggtgtaccctagccgactagccctatgccacctaatacaatgtttgcctatatgggccttagtgcataacaagtaggttgggcttatgagagaagatcaaatcgattgtttcttctaggcccaactatagtcatagtcaaatgaaacttgtggattgggcatacattgtgtactattattgccatagaaagttacgacactactttaaaagaggcttcatagctagcccatcacgatcagttcataatggattctcgcctaaatcattatgaattggcaatgttattgagtatcaccaccgatatgctctagctttgaaactacagtcgtgcaactgattcccgaaccattgccaattcgtcggaacttcgaatacttaacgactcagctctagttgctaggccacccgaatattgcaatgggcctgatgatatgggccaccaacggtaagactatccagatcgtcaatgattcacccctacggccaccgctagagcaccatcaaaactctaccagtaactaaaaaagggtgagctaaaaacctgtcatgaaagtgtctcactatttcttttttctctcatccttttttatgaaactggagagctcctatgttagatttaatttggcactggcccatttaaatcaactaaatcaaataaatctcaagactcatggaatgctaggagttatggtgtttaattcatcatggataattaggaggaaggtgtaccttttctgagaattattccaagaaatgattaacaaattggcaacatacgtcaattgtatctaattgatggttagttgatggtggtgtagtggaggatggttgatgacaataagttactctattccttttcctatcacatgagtctctttctcttcattttccttctatcctataaaaggagaatggatctgatttcccatgcgcgatagagaacatatactttcatccattttcactttcgttgctgataaggtgatcccattctgacaagtgcgtacacatgcgtgggagagcatgcctctgaaacccccatctcctgatcttgcacaggaggaggcgaattaggtttttggtgagcacatcgcgtgactcctcgccggtgttcatgaatgactacatcgactagactacttccttttcatcatggctagtggcgagaatgtaaacggctacggttatccttccgctacaactattgttgaagcaccgcatgttattttcctcttctattcttttctgttagttccgtttatatgcgcaaacgagttagatatgtttgtttcgatggtctacactaatagcatgcctatttcgtgtattcttcttgttgagagtagttcatctatggataacgatttcattgtttacatttacatcgctatggtttactctgtttatttctaaattaagtattacgatgtctgacatcctgtattggaagctagtaaattaacgtgcaattacattctcatggctattagccatgcaattgtttgattttctagatccatattcaattgagttagactctcaaggataaaattagcctatgtatctgttaacagtaaaatttggtaatcggcaaagacgtcatcggcttagaatcattatcggctgcagcatctcggaatcagccgatgggagttatcaagtcgtcaatagtcgggttcctgctatatttgattaaggaaatcaatctactaaaggaagcttatccctaagtgactgagtttaaagaggatgcggcatggcaatttatctattaattaggaatagtttgttagtttccttttatctttaggttagtttctttcttatccgacaaggacttgtatcaacccatgggtataaatatgtacacccggggtctatgtaatctatcctcacaatcaatacaattcggcgcatcgccaccttttaccttttctactttattttatcgtccggcgagacttggcatctgacgcggtgctgcatcggtgttcgatctccggcgaaagggtaagtccaatgttccgtcggcccaggcaattgtatcgtttacgtcggcgtcgttcaaggctgcatcagtacattcaacctcttggatcgctctggtttggatgatatatttgcctacctatttatcatatgtctctattaatctagtcttagcatatcaatttagctctatcggctgcttctcgttttagggtttctgccgatatcggctaaatcgcgttgctagattagattagctcagacatctaccaccctaaaaatcagtcaacggcttgattgtctagatattatgtttcttttcatacttggtgctgcatcagttaagtttgatctactaagtcatgcttaaaaccataatctctagcctgcttcttgattgctaataagggtttcatcggggtttcagctggtgagttatctggacgttgcatcggctcataaggattgcatatacatataagttggatttagccgatgacaacaaaggcttcactgtttaatctaatcttgtggatttcatgacatcggacctccatccgatgtgtgctttgaccttcggatcgatgcttatttatcatatcattatttgctgattggtttatactggattatattgttattttattacatcgtcgtcagccgattgcctttatatcattatctacattggacatatagccgattgcttaaaccctatcggcatcggctgctatcagcatcggctattatcggcatcggctggaactactccatcggcttgtcagccgatcggttgttttgatctactatttgcatatcttgtcagttacaggatcaaactgactggcacgctcgtatctcaccaatctttagacctgcactggagttaagcagatctctcaggctggtgtgttcgatttttttcatcagtatctagcatcgatccacatcagggccatcctagttacatctacatgattcatttaataacctccttaattgatgctaccataatggttttattttggtactaatcaaaacacacttttgaacaaacttgagaggataagcgttggaatcggtacaatatttagagtatatttgccacagcttcagctctatcaaacggttatgcttcacttaaaaaggaagtggatgaactgattagagttctatcacaaaataaattaaagaaatgaagtaaagtttaagctacttcatagctctattctatactcaactcctgaagttaattaaatttataagagatggagttttaccgaacatgcagtactctcttagctagaaatatgtggcgtatccgcatagactgggctgggatagagaacaaggcctagttggttttgggctagaattttgacgagcctttttcacaaaaaagagaacttttgatggaccatcaggcatcagcccgagccccaaactgggccaggcaccatcagtcatcatctctctcggtctcggatagcggggatgcgctttgcgtaaccacgtaacgcgcgcacgtacacggcacggtacccccactccctggccaccactgcttcgcctcgacgagatccatacctcccgggctcccggacgcgcgcgtgctagctcgctcgccgatcgatccatcgtctccacgtacggccgcgcgaaggcacgtagtgaggtacgtgaggcagcagcagcagcaagcatggcgggtgcggcgtcgccggaccacctgttcggccttcgcaacagcttctacgtcggcgcgtaccaggccgtcatcaccggcgtccaggccatccccgcgcgcgctgccctctcccccgacgccctcgccgagcgcgactccctcctctaccgctcctacatcgccatcggctcccaccaggtacgtacgcatcgcgtgcacgtgtccatcgatcgattgatcacgccctgtgtgttggatgagaaaattggcgtaatatcatcgtcaaacagggtttcgctcaaatactactaagcagttggaattcgtcgctgaaacaccattttcttccaattctctctttcctcttattttttctgaccaaaatacccctagttgaattaattaattttactaggggtattttttttaagtaattatgagaggaaagagagaattcgaagaaaatgacatgagcgaagcccctcaattgataatggtatttcggcgaatctcaactgcatagtggtatttgggcgaaaatcctttttgacaatggtaaaatgacaattttctcgtgttggatgacctagctgatcgactcgtcgagcggttggtttctcgtgtgaaatgcagctggtgatcgacgagatcgggccgggcgcggccacgccgctccaggccgtcaggttgctcacggtgtatctctccggcggcgccggcggcaaggttactcctgttgttgtttcatccgcgcgtgcatttcaatttggatccaattaattaccgcgctatatatctcattgtgcgttttgtaatcaatctctgtgtaattaaggaatccgcgatcaggaagctgaacgagctcctggcagatgatgcggtggggagcaacccgattctccggctggttgcagggacggttctcatgcacgagcgggactatgccggagcactgaagcacacaaattctggtgggactatggaattgtaaggatcatccaaccttccatgtaacttttgatccattctgcacagtatcttatttttaccccatgtgttgttccatgattgatacgattgcctgctcgcataagaattatatatagctgaagatttccatgccatcagagaattactgcatgttatgttttaccattgggaagactgaagtcactgaaccgattcacgtctggtgtttttcaggcttgcgatgaatgttcagatatgcctccagatgcacaggtctgatcacgcagagaaacagctgaggataatgcagcaattggacgaagaccacacactgacgcagctcgcaaacgcatgggtagaccttgtcatggtaggaatactatgggttgttacttgagagttgtttatgatgataaatcaaagaggcaggagagaaatctgagttctactgcttcccattgcttctgattctataccagggcgggtccaagatccaagaagcgcacctcatcttccaggacttgtcagagaagtacccagcaacttgcttaattcttaatggtaaagcactgtgcctgatgcacatgggtaactttgaagatgcagagggattgctgctggaatcactgaacaaggtcagttctaatgatgtttttagatcaaaagttctaatgatgttaacctgtccatctgagcatttgctctagataatctacttctcaaacagagtgttagtgcttaacaaaaaatggtcaaactgttcaggatgccaaggatgcagaaactctagccaacctcgttgtgtgcagtctgaacctaggaaagtctgcatcccgctacctgaagtaagtgggttctacactgttatattttcattttgaaggccatttcctaatgccttgtcttatttctgcctgataagtcaagatgtcaaggctctaataattgttatatttctgtacaatttgagcgcttaatctgaactgtaattctgataaccgttgcagccaactgaagctggcacacccagaccatatgctggttaagcgaatgtcctctgctgaagacagtttcgacagagcctgccaagcgatatcatgatttctgcagtgctgttacttactttgctgttagataaaccaaaagcaatgcaacactctgatcttgtcatgacctagacaagctaatttttgttcattagcagttcatgaacaatcaacagaagtactacactttgtcaataaattggtacgagtacatcagtatctttactgaataaaattacggagtacggagtactatctcttgatgcattggcagctgttgttaaactaaatgaattggcagctgttgttaaacaacaatttcggaaataaatgcagacgtagtacaaatacatgctgttttccggacaagacagcatgtgagctctgaatctaacatgtgagagtgccaccataccaacaaaccacgattattatataggactaggagtactaaatttaatttcttagcaagagtcagatgtatctgccagcaaaacaatggataagaggagtacgaaatctagtgacgtgttacttaaaaggacacctaatcataaggatcaacgacagagacagaggttagtggtggaagaaagaatccgagagaggaagagacaagagtccagcttacactccatcgaccaccgtagctcagatctattccaaacagcgatcgacacagtcagtgcaaaacttttgctaaacttaaaaaaaaagagaatattttaaaaaaattgagagagaaaatttgctaacgctggaggaagttcttgtcaagaggcgtttcagttcagctcttcttcggagcggcgtgctgccatctccctaccgtttctgaactcaacttcccaaacggcccagcgcctgctatcgcagtcacatacatgtggggcccattttcgcttgggcccagtggcagtgacccgcagataaaaatctcgcgatccattccacccggaattttatgacgttaaaccccacgtccccaccaaaccaccaccactctcctcggcttgtgtcgcgtgtgtggcgcggcggcggcggcggcggcggagctgagcggccgcggcgatggcgccaagggaccagtcatgtggggacggcggcgaggtggatccggagggtggcatcgaggcgccactcctctcctccggctcctcgttcttccaggacccggcgcacgaggacggcgatggcgacgaggaggcgcgacggcggcggcggaggttcctcctcgccggccgctcccagtccaacaccacctcccaggtggccctcgtcggcgtcggcgtgtgccccatcgagagcctcgactacgagtacggcgcccccctcacttttcccttcccaattcgaggcgcgcgattcgctcgctcggttttccatttgcgatttgactccatggaaaacgcggtgttcgtgggggtgctgcaggttgatcgagaacgaagtgttcaagcaggactggagggcgcgggggcggggtcacatcctgcgctacgtggcgctcaagtgggccctctgcttcctcgtcggcgtcctctccgccgccgccggattcgtcgccaacctcggcgtcgagaacgtcgccggcgccaagttcgtcgtcacctccaatctcatgctcgccggcaggtaagcagcggttgcagagtggtttctacttcagagttcagactaggttggattcagtttgagtaactgatggactttacttctcgtgttgtctgtgttgactcaaaattgatttgatcagatacgggacagcgtttgcggtgttcctggtttcgaatttcgcccttacgatgttagcaacggtgctgacggtgtatgtggcgccggcggcggccgggtcgggcatccctgaggtgaaggcttacttgaacggggttgatgcccccgacatattttctctaaagaccctggtggtgaaggtagactactgttatatctctttcattcaagttatttcatcacagagtactggtaattcttgacacttattagttgtccctgtgatttttttttccaagaagaagttgtctctgtgattgatttgtggcaaacatatatctagtcttttgttccattctgtttttgttcaacatcattggagacgatttaaataagttgaaaatgttggtctgttagacatgatcaggtttgtatgggctaagaaatcatgtatatataactacgaataatatgcatggaagagttaggaaatacacattgtttggtctctggcaggacatcagtgtctgtgtctgtggtacaacttgtttgttattcattttggagcagctctattgactgttggacatgtatatatagtttgcgatgtaactctatgttcacttcaaaagcagaatttagaacctggcaattagtattgagttctgtgtcatctggagattttccccgttccttctctcttgaccaattgtcatctcggtgaagcatgactctttgtttgctttctttagttttccatctcagacaaatgcagggcaatctttttcattttaatttctgatgtttttaagggaaacaaagaatgcatttagaagaattggggtatgaaaccttttagtttttggattagttctgatgtattgacataacctttgcataagaaagatcatgcctatcttattctgcttgaatgtcggggttcaatttggagatgctaaaacgattctgaatgattggttttactcaaagtgaacatgactgcccaaccactctagggcaatggtagctagaaaatatgttctctgacttatacataagtgataaattgttatgcaagaaaaacaccattgttcccttccgttgatatatctggatttcatatatactgttttttggacagattgtgggttgcattgctgcagtatcatcatcattgcatgtgggaaaagctggtcctctagtacacacaggtgcatgcattgcatctatacttggacaaggtgggtcaagtaaatatcacctgacatgtaaatggctaaggtacttcaagaatgatagggaccgaagggaccttgttacttgtggtgctggtgctggtattgctgctgctttccgggcaccagttggtggagtcctgtttgctcttgaagcagtgtcttcatggtaacaactttgaatatgcatgtgaaaactccttgttcttttctgttactaattaaaatgtgaaccacacaatttctgcaagacgataccattcatatacagtgttttgtttacaataccattagctccttttttgctttctttgcaggtggaggagtgccctactctggcgagcatttttcacaacagcaatggttgctgttgtgcttagggcattgatagacttctgcaaaagtgacaagtgtggcttgtttgggaaaggtggacttataatgtttgatgtgacttcagattacatcacctaccatttggtcgatttaccgccagtaatcactctaggagttcttggtggagtactaggaagcttgcacaactttttcctggacaaggttcttcgtctctacaattttattaacgagtatgtactgctgttggcttaatgttaatgatcttcacttctgtaattttaaactgcaggcgtttcatatttccatttcccaaagctttagctgacatgcacacattacttccctgtactttattaaaactgtttttaaaaaatggcaaagtacacctactggcatattgcagttatctgttagacttgcgcatcctttttgaagtgaaatatatccctaaaataacttgccatgtaacctcttcagcttactttcaggaaagggcaaaagtacaagctgctcctggctgcagtagtcaccatttgtacatcctgttgtctcttcggcttgccatggattgcttcttgcaaaccttgtccaagtgacaccgaagaagcctgtccatccataggaagatctggtaattttaagaagtatcagtgtgcaatgaatgagtacaatgacttagctagcctgttcttcaacaccaacgatgacaccattagaaacctttacagtgctggcactgatgatgaattccatatctcttcaatacttgtcttcttcttcacatcgtatttcctgggcattttcagctatggccttgctttaccatccggcctttttgtgccagttattttgacaggtgcaacttatggccgccttgttggcatgttaattgggtcccaatcaacattagatcatggcctttttgcagttcttggctctgctgcccttctaggaggatcaatgagaatgactgtctcagtttgtgtcgtcatcctagagctgactaataatttacttatgcttcctttggttatgctggtccttctcatatcgaagacagtggcagatgcttttaatgcaaatatttatgatttgcttgttaaattgaaaggatttccttatctcgaaggccatgttgaaccttacatgaggcaattgtctgtcagtgatgttgtaactggtcctctacaggcattcaatggcatagagaaggttggccatatagtgcatgtcttaaggacaactggacataatggttttcctgttgttgatgagccaccattttcagattctcctgtcttatttggtctagttcttagagcccacttgcttgttctgctgagaaagaaagatttcattcctaactgctcagcttcagcactggatgcttccaagcaattcttgcctcatgattttgctaaacctggctcaggaaagcatgacagaatagaggaaatagaattcagtgcagaagaactggaaatgttcgtagatttgcatccgttcacaaacacgtctccttacactgtggtcgagactatgtctttggctaaggcccatgtgcttttccgcgaagttggattgaggcatcttttggttctaccaaaatcgtctaaggttagtgatactattcacaaatatatttttttgtcggattcttcttcattctactttttatttcctttgctttgtctagataggtctagctattttgcaatcgtcagtgtctattaccttttagaaatgcctttttagaaccaaagggtgataggctgatagcattggcacccctgtttcacttttatattggcaaatgttgcttccaagttccaaccatgaccgttgctaagacaaaccaagatgattagtggcaaaaatctctaaatagccatacatattcttcttggttactagcagcattatcgctttcattgctcatgacagtatttgaaattataaaactttctaataattaacagtgataaatctttgactggttaattcctatcaatgcagagagcgcctgttgtaggcatactgacaaggcacgacttcatgcctgagcatatattgggtcttcatcctttcctcttcaagactagatggaagaaggtgcggtttggcaagtcagcattcaccaacctcgtcttctgacgctcgctagtaactgatgagtttgctcaaggatgcactgctgctgtaaattccatcttgatgctgggagctgcacagtataatcttatatgatgaagaccacaaaaaaatgtagtagattctccagcctgggaatctagcagctaattgtactgcattttcttttcttttctttttttgttacgattgtaccgagtggtaccatattcagaatgttcaagctacaatggacagtgcaagtaggaaatctttttttgtaaatgtaaatcttgtttggaacgtacaaattttgttagtcgaaatgagtttaatcgaaactataaagatgcatgatatataagaataatcatcattccataacttctcgtaactgcatcacaaactttcgttttggcgttgggctatcgctgggtggggtcgacgagtccgaaaaggctaggggcgtcgggaagaggcggcggcgtcgggcccatgaccgaatgggccagctgaaatttataccgggcttttttgttgggctttcgggccggctattcacatcggcccacaagcagccgcggcgtcggtgggagcctacaagtactccctcctaacatgtgaattcgtctaggacagtgacacggtctccaaaatataattttaacttcttatttctataaaaatatttattgaaaagtgatatatgtatacttttatgaaagtatttttcaagacaaatatattcatataatttttacattttcaaactcaataacttgagagttatttatgatttatattctcaaggtttgacttaaatattattctaaacgactttttttttttttgagtatagagggagtacaagcctactgtatgaccatgtccagttgattacgcgaaattaattactcgtatttcaccggcgtgtttgtaaagtgattacggcagcttttatgagaaaaaccagcatttgcaattagatataacgaatacgtattaaaataagttcacaaaaacaaaacaaaaaattccactcaccggccgaatcgtgtggtataggtgcagccaacgtgtgcccggagcataaaacgcacggctcgaatgggaaccgattcg

SEQ ID NO: 5312 - DNA, 18277 bp, Oryza sativa
agtccaagagaaaacaaagacaactggtcgcttttgtcgagatctcttcctcccccgttccgttttttttctctctcttttcaaactccgccccctcctctcctctttctctcccacatcagcagcagcggcggcggcggcggcagagcgaagagctccacttgtacgcacgggaatccaatccgctcgaagccctcgcgccgtggagtgcgtgccggccgggcaggggcagtgcggaggcccgcgcgcgggtagctggcgcctggcgctgcggcttttagcatctggtgctttgcgcgttcgctggaagctttgcggccaccgcggccagatgcggttgattgtgttgtagtggttgggtttttttgggttggaacgccgagtcgccgaggaggaggaggaggaggaggggaaggggaatggggttcctggtggggttggtgctggggatcgcggcgggcgtggctctcatagtgggcttcgcccgcgccgagaactcccgcgccgcccgccgccggcagctggtaagttatactactaattgcctagcccctctctttctccgtaataaatttgatttgtgtgatgtttagattggagcggtagcttcgaagttgataggagattaattgcgttgtttgtgaatcgagtggaaggcgaatcgcttaccttctaccgattgattgcgttgagctggatggtccctgcgttaggtagaggcgctgcactccccatgtcgactgcttttccattggagcgtatgactagtcaaaatggaaacatgttttgggcttattgagctttcaatttacgaacatgatgatgcggtttgctacaaacaaagtttgttggagttggaaagcactcatgttagggggctcaagttgcagcggaggcctcaaattgtgggggcaagtgcaagcgcttctaataaacaacctagcatgcatagtgcaatgttgggctagaaggccggtgttcatttgatccgtgttgccactattctatttgatgcctattcttgtgccatggctgctggcatgctaaaattcatggctgctccctgctactgactcactgcgcttatggcattttgtttaggccagttgtccatatatgattgcttgcatgctactctgtaaatttagatagctttgatctctgatctttttcctcctgattaataaatgaaactaaaaggggattctccttgtttgtttggacaggctgccacaattgctagtttctccaagatgactattgaagattcacggaagttactcccagctgacctgtacccttcctgggttgttttctcaacacagcaaaaggtatttgacagtatttagttagctctcaattttcatgcttacacactagatgtgaatgagagtatatgctaatgggggcaattttgcagttaaaatggctcaatcaagagctgataaaaatatggccatttgtgaacgcggtatgcattcctttccatgggagactagaattaggatttgacttcttttacaaatatgcttttcttcaatgtcttcttctcttgtcaattgttgtcgcaggcagcatcagaactgatcaaaacctccgtggagcctgttcttgaacaatatcgaccaataatcttagcttctctcaagttctcaaaactcactcttggtactgttgcaccacagtttactggtaagaagctattatatatcattgactgtttctcattatattcttgacagcactgagctatattgttctgctttctctactgtatttttgttagacaaagtaaatcaacttaattttgcatgcattaaccaagagtacaatgactgaatagctgacaataaccaccgctgtctggtgtcagcagcttgtggatattagattgtacatggtgtttgatgaaatgttcagaatcatgaaaacttaaaagggttttgatttttgtggttgcaagcgtgagccctgtgtttagatgaataatagtgtgtaattcattattaagaattgcatcctttggaaaatgatgccgtgtatgtattctttaaacaatactaatttatgctaatgtacttattttatgaggagtttaatgcgctcgcttcattatgttgtttgttttttttagaatggttttaattctttttcttttctacctaatgacaccaaatatttggtatacattttatattttgctaccatattagatttttctgttggttttggtgcaggtgtttcgatcattgagaatgacgaatcaggcattgtcatggaactagagatgaattgggatgccaatccaagtatcatactagacgtaaaaactagacttggcgtgtcacttccaatacaggtgatttatttcatgttgcttgttgtcctgtgttatgaatactgacgaggaggcactgaggcatttacatagtgaactagacctagttcacaaggtttgacagtaggctttgtctattggaacactgaattggtgttcttgataactaatgattaagtggacagttctggcaaaaaagaacatgaattcaagttgcaactaactttggtgcagttgatcttagttaataatccaattttgtgggggtatgtaattcttcatgcagtttttatgtgacatcatgagtagtgtgatggtctgattggatagtgatactgtagatattatctttttattataattgtgctatgtatttcatacacttaaattaattattctttctataataatcttgtgagtgccttttgccatataggtgaaagatattggctttacaggagttttccgcttgatcttcaagccacttgttgatcagttgccctgctttggagcagtttgcttttctctacgaaagaaggttccttttcttggtcgtgttttttattaaaaaaaaatctggttgaaggtattttctcattaatctgatatttttttctcaaatcacttcagaaaaagctggatttcagactgaaggtcattggtggtgaaatttctgctatacctgggatttcggatgctcttgaggtttgaccatacttctctgttttgttgctataaaagtttagtttgcatttcctacagtcaagatggtgactggaacatctcgtgttacaggacacaataaaaaatgctatagaagactcaataacatggcctgtaaggaaagtcattcctataatacctggggactacaggtaattactggtgatttctggggacatactagttttattctcttgactgaataatatcattgtcattacttactatatcaacatatgaatacaaaaatggataaatcccataaattattgtgtgcaacagtgatttggaactaaagcctgttggtacattggaagtcaagctagtacaagcgagggatttgacgaacaaagatctgataggaaaatctgacccttttgcaattgtgtatgtacgacccttgccagataaaatgaagagaagtaaaacaattgtaagtatcagctactctattccctgtttatgtgctccaatagatatgtatattttttaatgcatactgacagctgtttatgtgcttcaaatttacagaacaacgacttgaaccctatctggaatgaacactttgagtttattgttgaagatgcagatactcagactgtgacagtgaagatttatgatgatgatggtattcaggaatctgaattgattggctgtgctcaagttactctgaaggatctacagccaggcaaagtgaaggatgtctggttgaagcttgtaaaagacttggagattcaaagggaccggaaagatcggggtcaggtgagccctgttttcttggcagtgccactctccattttctgtttctctaacacagtaaaatagctcgatcttcttatattgttattcatccagggttgtaaatacatagtatttctcttgtttgaatatcacctcaacaggtgcatcttgagctactctactgcccatttgacatgaaggaggagactccaaatccttttagacagcagttttctatgacatccttggagaggacaatgacgagcatggaaaatgggtcagggagcaatggttttaacaggttgtcttccaggaagaaaaaagaaatcattatgcggggagttttgtcagtaactgtgatatctggggaagatctgccagcaatggatatgaatggaaagtctgacccatatgttgtactttcactcaagaaatcaaaaaccaagtacaagacaagggtaatttattcatcatatatggacaaactactggtcacaaataaccattacatactcctaacagttattagtattacgctatatttaacataattgctcctatcatgtgtctgaccgcaggttgtgagcgaaagcttgaatccagtttggaaccaaacttttgattttgttgtcgaagatggtttacatgatatgcttatgttggaagtatatgatcatgatacttttagtagagtaagttcaattgaagtttttatctcattactggacgagtggcttgttcaactgcagacgtttgtgataacgactgacaccaaggcactgaatatgtttctgtaggattacatgggacggtgcatcctaacattaacgaaggtcttgatcgaagaagattacaaggacagcttcaaactggagggagcaaagtccgggaaactgaacttgcatctgaagtggtcgccgcaaccaatcttccgtgattcgcgagaagaggacagcttaagattcagatgagttttgtatgcgcggagagtcatagatgcgtgtgggcatctggtttctgcgggccggatgtgatgagggtttcctcctgaaaacctgatgagttcagtcatctcttttttgcggtgcaatttgatcatccgctgcacatatacatggaagaagagttatggtgttgatcagctagcttataatgtaattgtcaaacaacatttatgtgtttacttgcaatgtatgctcaaagcacatttatgtacatgtgaaaaatatataatttgagctgttggagtgagctgttgaagacaattgaaggtgtcatattttttagtgtaaaacttgttatcttcatatactagttacctctaaattttttatagattaaaatacatggccggtccttaaacttgtggagcgatctcactcagatccgtaaacttaaaaaatacacgtttaggtccatgatctcgttttaatgtaccatcctaggtccaatccgcgcgtgacagcgtctgaccgccaacgtggcgtgccacgcaggcagtatatttgcattctcccccctccgcaaaatgtaggcattaatatcatccctaaacaccaccatgtgacgaaacgatccataacaaagtagtcttcaaatgtgaaatatgcagtaccattgtgtggaattacagatagcgcagtagcaaactagcagcctcggaggcttgatttaaaatgcagcaaagaatgttgatcgaagatagctcaagtgcctttgattaaaacaacatgacagactacattgttgatttagtagttgctcacacttctgtagaacattctgtagaacaaaaccaactcggaatttcaataagaaaccaaaaaacaagacgattcatattgctttgctgtcttacagggtctgtgtcaggttccagaaatcatctctcttaggccaggaataagaatagtatcaaacagtgatgttattagatgacatttcaagcctggcaagcacattttttgacagaaacaaacacagtccatggttcaaattcagtacatgacaaacacagccccgtcgacgcgcctcgcggagcccagcgccacgccgccacgaaccagagccctgccgcccccgccgcgccgacgcccctcgcggaggcgcgcggcgcgccgcctatcccggagccccgccgcccccgccgcgtcgacgcccctcgtggagcccagctccgcgccgcctctcccggagtcgtcgaggtcgccctctctccctgggaagtggacagagggcatttaggtttggggatttttggggatttaggtttgcgacagagggatttaggaggggggagaatgcaaatgtactgcagtcagacctggtcaagcgcggattgaacctgagatggtacattaaaacgagatcgtggatctaaacatgcattctctaagtttacagatataagtaagaccgctctacatgtactttcttttaggatcgtaaaatttctgaagaaatagcatacaggaaatctgtgaatgctgtcgtcagacgtaagaactaacgacataagacgaacccattgtgtacgccgcctcatcgtgttactcccgtcatgccgattcggcatgaaaaaaatctgcagcatagatccgtgcctccaacgagaatcatgcacgaaacatgaaaatctccaacgaagacatcgttgtagtaccaagcatggagtattctgtaacatttctgaaactctgaaagctacggctgatataaaatatgcaggagtaaagatttctaggtcaggacacgagccgcacgagcatcccggggtttcctaccttgggcagattcgcttcaggtttggacgataccaacagagcatcatcgtgtgcttcatccagcgcccaataaaaccaagctccgagccccacgggtagaggcacgctcctcccggctaaaaaaatcaggcacaaaacatatgcttctttcttttttgttttgttaatcacgcagatgattctcttcacctggctttgttaattgatcagtaatgcgcacgacgtcgcaatctggtaaagctttgacagcattcatgatcccagccagctttaacaatggcacataatggaaaagacgtgcttcttaagggaatcgaattacagaattaataccatcagatttagatacccaaattaaggtggtccttttcttatattttacctcaggctagctatttgctagctatgcctaaatgtactaacttattatttttatgcgtcaaatctgattttgtcatgatgcaagcgacatcgttatgtttcttgcttttaataacatctgaatcgacgggctttgtatttttcttatgaatcacagcttgttaaacagtataatgtggtactctagtgtcacgccgattgaaccagcacatctgcctgccccgtactaatatgacatatcggcatgcgtacatacatgctatacagactgttcatcgtctgtcaattgcttgcaccctttagagatagatagcagtagcaggtgtatttttgtttcgaagtctacaagctgccacacgtattagtgaagcagtttccggcacaaaaacaacttttagcttgtgtctatatgtgtttaactttaacccatcaatctactggactcttcctggctttgttgtcatctactccaaccggagtgacaccttgctggtagtacacaaatcgcagtactgacaatgtgatactagctagcttgaggtgtccagaaatattccagactgcgtatatgcgtgtaggaaaccaaaactgtactgcgtctcgatctcaggctcatgcagtccacgttttcaatccatccaggtatgttcacgctaaaattaaaagtttggttcaaattgaaacgatgtgatggaaaagttaggagtttgtgtgtgtaaaaaagttttgatgtgatggaaaagttaaaaatttaaagaaaaattttggatccaaactcggcccaacttaccatcaggcaagtccttcggtaattgatttccaaggagaaatcgcccgaaggtctcaagagctagagaggacaatttcacgatggacgtcagtcagttaaccatcgacaacgcaccacattctctgaacatggcaagcaattttacgccctactgaaattccactgaggtaccaacgggggtaggatctctgacttcttctcatgttcacctccgtccatgtcccaatcgggtctgaatgatttctccaggctaataattaacctcaccatggatatcctatcaccaaactgaattatcacgttagctaagaaacctactatgaccaagagaacgtgctccgaatcacaaaagaactctacacaaaccatataaccgtcctaaaatatagcactatattatcaatattttttaatgtagattcgtagtgctatactgcgttaaactctggttttatattgttacattttgttgctagacgcactgacaaacagaaggagagaatagtggccagaagcgtcagagctaggcgcctcggatcggccggtgaatcgaacagctccggccctggcttagccgtgagccatctggccttccctcctctcctgccgctgcaggagacagacagagagagagagagagagaggtgagccctcgcgtcacgtaccccacagccgcgcttgtcgccgtgctccgctctctcgtgaccgtcgaatggtagccgctactgcaatgcaacctgtgcagcagcctgtatcacacagcttttcttttgttgtcattagtcattaccaagccagagttttctttctgtacttggggtggagtaagctgagccgttgattgagccgtgcaggacaccggaaagcgtgatacgtagcgtgttggtttggaccccacctgtccgcgacacgaaacgtggggccccgtgcggcggacgctatcggtggtgaggcaggagaacgagaggccgggatcgcacgaaaatccgtgggtttcagatgagcgccctcgcacgccgcacatcctatatcctctccctctcctccccaaccccaacctcgcgcttcactttccaacgagcgaagccgtcgtcgaggcgtccgtctcctcctcctccttctcctactgctgctgctgctgcttaaacccctcagggctccgggccgacgctccatttgtggctgttgggtttggagcttcaggcgcaatggcccccaagggcgccggccgtggcaagggcaggggcggcggcggcggcggcaaaggcgacaagaggaagaaggaagagaaaggtattgtgtagtacatgttgctggaagctcgataccgcttgagctctgcaaaggcatagagttcacttcatggcatgaagctgtgtagctgttgcagtgtgaggagctttgttcttgcgaacattgaattcgctgctgctgctgctgcagctgtaatctgtgtgtgtatgctgttcaggacatgggttcttttgcatgggtaaagggtgaaaaaaagacgatggtctctctgctattagtagcggtaatcttttctttattccttcttttgcttttgtttctcttccttttttcttgcctattcgtactcctgatttcggtgattatattgctgtttaagcgcttttttcttggtgtttagcttcgtgttctgtgctcatgattattactactagtcttttgtcttttttttttttgcaccttctcttgttccattaatccttttcgttcgcttccaagcaacatggcccgattctttccttggtgtaacgcacaccgtcgtgcggttgagtcatgcgttctgcgagctctagatgaatactctgttttcactttcacctcgacatgatgtcgccgtctccgtttttaaggtttttttctgcagctgttggtatgatgctgggttcttcttgtttttgcagttgtgccgagtgccatagacgtcacggttgtcactccctatgaatcccaggttacactcaaggtatgtgtggctgcattagctggctggtacttgctgcacacatgaacacacaaaatacctgaaaggacaatggacaggacaagcaaaagtgaacagaaactggtatctttgggaaaagggggcctaattctgataactgaaatgtctgcagctatttgcaatgagctgcaaagccagttattacttactccacactgcatgctcacaatgagtccgggaaattgagcctttgaaatggaacagtgaacctgagtgaaaagattaatcttgtttttgttctgtgtgtgttcaggggatatctacggaccgtgttctggacgtgaggaagctgctgggctcgaatgtggagacgtgccacctgacaaactactcgctctcgcacgtggtaatgcttgcttcttgtctgctaattcaatcaattgcagtgcttgcagtatctactgataattcaattgcagtgctagtactagcatctatcattccactcttaagtcaaagtgttaattactacttaattatctgccacttctttgctactcttctggaattcacccgggattaatttgaggacagtaacttttaatgtatgtgtgctgcaatgctgttaattctgtaactaattctgtataagctgtgttcggtgaagtctgaatttgtgaagcgtgtgatgtatgacgcagacgcgagggcagcggctggaggacggcgtggaaatcgtgtcgctgaaaccatgctctctcaccatcgtggaaggtacggtccatggtgaaagaatccgcacgctagctgctcttcacttgttcttccttgctcgttttgtttctttctcctttctttttttttcgcttggcaacatggaatgcttcacataacatgatcgaggtggggtagctggcattaggacacataattagttggatgcttaagtagacgaagcaacctgacgagaggacaaaattaagcttgagcttgtggtgtaccgtgtggcacaatctgttagcatgacagtgttatgctacagtccaagtgtccaaacagtctgccatcaatgattaatcaaccaacggtccggatttttccactgaaagctctaaagtctgacgctaatattgctaatattagggaagaacctaatatcaaataattagaaggggtgaggcttcaaatctaggtcgtctagtccaccatcttgtggagctagctggaagacccctaagtgtttctcataagctctaaagtctgaacatgcgtttgccgttgtccgatggtgaagctagtggtttttgttaatgttgactcaccggtagatcatatcaaacctaacttcaaaaatcataatctattcaaattgggacggcacaatgcacatagatgcagccttgtttgtcgacgcacagcattgaatcgaagagcatggaccgcgccggcctttcggctgaataaacttcagaagaaaaaaacacacacatatgactagatcactagattcgcatgctaaggtgcaacctcccacgactccttgtaaatgcagtcatgcgcctccatcacgccccaatactggcacaccagtgagttagataggagcacagagtacaatctagttcattatacttcataattcttgccacttagacagcgagacgtgcaggcaggcagcagcagcagctttgcatagtgcctccagtttcagacattagaagcagcgcatcctgtttcagacacttagcataaaattgtttagaccaaaaaaaatgtgatttacatctcgggtctctaccgttatcctcagatactagcagcaaatggtagccggtttcagtgccgcatctgtagccgatgggagatatagatcgtggccgtgacgtcgtcgcgcgatctgcctctccgcggttggttggggcggggcggctaaggtgttttttccacacacacacacatgtcccgtctctttcgctgccgatgtcgcatttgccgtcgccgcgcgaacgtttcacggcggctttgccagtttccgggaggaaggaggcggcggttgaaccgaacctggacgcccccgcgcgcacgccggctaataagctgaggccctgtttagatgggactaaaacacttttaaaaacacttttaagttcctatcacatcggatgtgtactaattataaatattaaatgtaactattaataaaatctatccataatcttggactaattcgcgagacgaatctatttgagcctaattaatccatgattagcctatgtgatgctacagtaaatattctctaattatggattaattaggcttaaaaaatttgtctcgcgaattagctttcatttatgtaattagttttgtaagtagtctatatttaatactctaaattagtgtctaaagatcagatatggactaaagttaagtccctggatccaaacactcgctgacggatgccggtgatgtttcgtatggttttttttcaacgaaacgtgtggcagcgatggtcgtggcatgcgaccatgtgtctgtgtcgacgacgaaaacgagcatagaacttaacgattgattagtgcgtaagactgtacgaggaaggggatgactgaccgattggtctgacacgcgctcgtagtcaaatgcacttgcttttactgctaccgtagtccatcattttaaaaaaaaaaacctgaaattcaagtgcaaagtggcatttggacaaactggaagggcattttcactcgttgatagcgcttgattagttgcctaggcgaagtccgtcttgtgcacttctctagtgggtcagagcctcttgttctgctttgggaaatacatgctcgttaattaactgaacatagtgctccacctgctgtctgtctcatatggtatttagaactgaaagctatactagtgtacaattaattactgcagaattatgcgattttgtagttgttgtatgctccaaggtctgagctaatggctcaccggttgttgtcctgtcctaaacgccggtacgggacaaaaggacgcctcttggaatcagcgttgggcgttagctcaagtgcctaacttattttactcgccactcttctgacgaatcgacgggtttgtgaattgtgattgtacatttgtttgtagtattggtgtttaggtggtcactgactcatactggtcagtacagtacgtgctagacctgctaccggtcgtaccgatgccatgagtcaaaatcacgttgttggccatgtgtttctaactcgctgacaccgctgggaacgtgatagaatagcgacatagcggtgatagtacttactactatgacacgagtatcaaaacttcagccacgttcctgtggatgaacatcagtcttaagccattttttttttatttttacatttgaattcgatttattctattttgatttgattcgacgacttttgttcaatatgatgcagcagctgctaaaaaaacaaaagaaattgcttcgcttatttgttccagaattgatgggcctgttcatttataaagggaagcccagcacttggcctattgggcctgaattttggtagagctaatcgagcccatgggcctttttgtgcagaggagtacgcgacggaggcggcggcggcggcgcaagtccggcggctgctggacatcgtcgcctgcaccaccgcgttcgtgaacaagccccgcgacggcgccaagcacaagtcgtccaagcacgcgcgcccggcgacgccgccgtcaccgcccgcgctcgccgcctcccccgacgcccatggcgccggcgccgcccaggcgccgccgatatcggaggcgcacgacatggcggccatccgtccgccgcccaggctgggcgagttctacgacttcctctccttcgcccacctcaccccgcccgtccactgtaaggccgaatgctgcatcgcgtttccccctttttgcgaggcgtggaactaggggttggactgacgcgtggttgcggtgtgcagttatcaggaggaaggagagcaatggcgcttctcaggaaggcgactacttcgaaatcgaggtgtgatgcgatgtctctcagaacgctagagagttcgtctgatctgcagtagccaactccgcgatgagtctatgactacgcacttcactgacgggagttgatgtgtggccaggtgaaagtttgcaatgggaagctcctgcacatcgttgcttccgtcaagggcttctattcggcagggaagccgcacaccgtgagccactccttggtggatctgttgcaacagctcagcagtgcatttgccaatgtgagtaaccatgaatcctgaacatgtataatgtataacgcgttgctcgatttactttctgctcctgtttgtttttggctaactatacagccgaccttatctgacagtgatgtcttctaattcattttgcacaggcatatgatgcactgatgaaagcttttctggatcacaacaaggtggttatagtaaatgctgtttcctttttttttttcccccttataccgtagatttagtcaagtaaaatgctaaatttgacaaggatacttctttgcatctccagtttgggaatctaccatacggatttcgtgcaaacacatggcttattcctcctatatacttggattctgctacaaagtgcccagcattaccagttgaggatgagaattggggtggaaacgggggtggcaatgggcgagatggaaagtatgacagaagacgatgggcaaaagaattttctactttggctagaatgccatgcaaaactgaggaagggagggtgatcagagaccggaaggcttttcttttacacaatctctttgtagatacagcaatttttagagctgcatcaacaatacagagactcattgatctgtctgggaactcaactagtcaacaagctggcctagatggttctttagcaatcgaggaacgtgttggtgacttgcttataactgtaaagagggatcaggctgatgctagtttaaagctggaggataaagttgatggagttgcactctatcaaaccggttctatggatatatcacaaagaaatcttctaaaaggtttaacttctgatgaaagtgtcgttgttaaggtggtggcatactactttcatatctctttttttttcaaattattttttgtccttaatattaattaccgatttccaccaacatgattaccattcaggacacctcaatactcggagtggttattgttaaacattgtggatatacagcaacagtgaaggtttcagggcgcacaaaggacggaaatggtggcaaacaaaccagtgatatctgtgatcatctcgatggaatttcgaatgttgatgtagatgatttgccagatggaggttctaatgccttgaacattaacaggtttgatatatgttcccatgtaaacttattcacatgcttgctcatcagtagagaaaataatgttcactggtaactagtttttcttacatttggcacacaataatgttccattaacacaactctctctctctctctctctctgtatatgtgtgtttcagtctaagaatatcactgccaaaaattgtcaactcagacatcgctagtactcagtgtcctactccgcagtctcatgttgataatcatgcaaggaaactagtgcgcaaaatacttgaagatagcttgatgaagctggagaacatgcctgccaataatcctagaaccatcagatgggaacttgggtcatcctggctgcaaaacttgcagaaaaaggattcgccggcatctgaggacaagaaaaatgcaggacatgttgaaaaagagacaactatcaaaggtcttggtaagcactttgaacagctaaagaaaattaaaaagaaagaatgccatgttgaaggtgctatgtctgagaaggaagactctgacagtaactgctctgtcataaatggcatggaagaatctgaaaacaccaaggagactgatattagcaagctgatgtcagaggatgatttctgtcgccttaaggatctgggagctggacttcatcaaaaggtaatttatagctatacagttcatcaatcaatatggtctgaacaatttagttttatgtccggtaagctcatacatgctattttgcttgggattaaagttctaatctgttaaaattttcaccagaagccttgtgttaagctgaatatgatgtagtagcagaagcgcagcattgtatttttccagtaatcaggaatatattggttattttgctgtttaatacttaactttgttatttcttgaactagtcccttgaagagctcactatgatggcccataaattctatgatgatactgcgcttccaaagctggtaagccttgccttgtttatttggagatccttatgtaaattctcgaacattttaatcggcactctcttctctgaaaacaaagtagtcgctttttgctggcattggtattgtttattgtttattgttgtagtaagtagtttagttatggtactaatgttcagttagttcatttgtaattttgaggaagtagtcaatccacattaacaattcgcaccacaaagtccaaaagaattacagttcttgaaaatttttgcgtgtaaagaagaaaaaaaaaacaatgttttttttatgttgtcttaaactttcttaattattatttgatgcccataatagatagttaattttttcttggaataaaataatgacaggtggctgattttgcttcccttgaactttctcctgtggatggaagaaccatgaccgatttcatgcacacaaggggtcttaatatgtgctccttaggccgtgtggtgagtttaaatttattctgaattacttttgcttctatggttggatggaatttccagaataaccttttttttatatataaattaaacaggtagagctcgcggagaagcttccacatatccagtcaatttgcatccatgaaatggtcattaggtcctttaagcacattgttcgagctgttattgcagctgttgatgacatgcaaaatatgtctgcagctattgctgagactttaaacattttacttggatgcccaagacttgaaagtggcactgaaacagatgcacatagtgaacataatttgagatttagatgggtagagaggttcctttctaaaaggtacaattggaaattgaaagatgaatttgcacacttgcggaaatttatcattctgagaggtctttgcagtaaggtacaatccaaagtgtgttccaaaacattcatagagtacagtttctgaacatgcataattaatatgtttatttctcaggttggacttgagttggttgcgagagattatgatatgaatagcccaaatccatttgacaaatctgacatagttaacattattcctgtatgcaaggtaggacactatcagaaaacttaccactgtactttccccaccacctgaattaataattatattgatttgatctgctttggccttgcgcttcttacagcatgtggtgtactcttctattgatggtcgaaacttattagaatcatcaaagatggctttggataaaggaaaacttgatgatgccgtcaacttcggaacaaaggtatgcaataatcagttcttttttctgtacgttgtttaacagctatgctaaaatatttctcttcctgctttggttgggtgaagttaccattctaaattctttcattaactatttttttttcttttcttgaaggcgttgtccaaaattgtagcagtttgtggtccataccatcggctgactgctaatgcgtacagtcttcttgctgtagttctttaccatactggagattttaatcaggtatttcaatgaatttggtgggctgtattctatctgctgcatagtgatgtgtttttggcacaatgtttggcaactgcatttttcactagacttctgttctttctctgtaggcaactatatatcagcagaaggcacttgatatcaatgaaagagagctaggtcttgaccacccagaaactatgaagagttacggggatttatctgtcttctactaccgtctccagcacatcgaaatggctctaaagtaagtgctgctattaggtgttttgttgtggaaacacaaaagctagtttcatgacttggcttgtagctggtattactatcatgcacaatgtcgttacgctggttcatttctagccattacatgcattaaatatattgcctgtagaatggatactactgcatttgtacggcactatggctgtattaatttgtagacttgaactgtgcattgttttgcattattgtccatgattgttacttgtggtttgcacggaaacttgctgaaggcacatatttgcttgacaatattgtcaaaactcatcttccatctttctttttttgccttttgttttttgtatcgctaatggtatctttttcttaaaggtatgtcaaccgtgcactatatctactccaattttctgtgggctttacatccaaattcagctgccacatacataaatgtggctatgaggaagaggtatggaaagt

SEQ ID NO: 5313 - DNA, 37909 bp, Oryza sativa
cattgctgtccctcaaaggccatgagcaattgtttaagtttctttcaatttcctatccaacttgtttattgcatatccaatttcaaaactagcatcttgtttcagtagtacccgcgccaccatgacttgtatcttttaaggaaaggtttattttgatgtctagacccacagaaacagtcttttctgtatatttcaatccgtttgacataatgcatgtaactacggacaacttcaatggcgtatttgttatgcatatgatcccgtgattcagttaacatgaattttcatgcatttctttgaacaacagactgctgcgagctatcatgccatagccatagccctctcaatgatggatgcatactccttgagtgttcagcatgaacagaccaccttacagatacttcaggagaaactaggacaagatgaccttcgaactcaggttttttttcccttcaaaatatgcaatgacgagtccaaatactgctatgttctcttggactattagacatgataattttcctgctgcaggatgctgctgcatggcttgagtattttgagtcaaaagcattagaacaacaagaggccgcccgaaggggcatcccaaaacctgactcatctattgcaagcaaaggacatcttaggtatgaatacactgtgcattatcagtcgcaaactgtgatgatctggattgaaacatttatctttccagtgtatcagatctacttgactacataagcccggatcaggaaagaaaagagagggatacacaaagaaagggcaggcgtgcaaaggtgattataacatgcctactttttcaaaattattgttgttaaaatgtagtcagaagagataagtgcacactggacagtggagacaattccatcagtattcatgaaaagtctagatgagaataggattggcacaataacttccatataggatgtctggtatatgaactgatgaacatatgctggcagcaaatcagcaatcctatccagttcatgaaactagtaaaaggttatgaaccatcatcactgacataataaccatgacagttatccccaccagtcattgttggagcatgaactatgagaattgaaaagatattcccgcatccacagctagtccattgataccaggcatttatccagatgattccagttcaacccattaacttagcaatgaattgacaacacaatttcttcttagttgggaatttaactccctttacatatggatatttaatcctttgttttctaatatgcttcatgaattgggaatcacaatatacatattttggaagtccattgatgtcatggtttcaattgttgcctaaacattatgcaagcttttattttacccttactaccctttgctttccttttcaccttgtatagtattaaatgcagaataatatcagagcccatcaaggtgaattagttgaagaaaaggagagctttgagcacgacataggatctcctcatgaagcaaacaaagaggagtttcaacaagtaaaatcgaaggcacaccctccagcaatatcagaagaaaattatgctatccatgatgagctgaagcaagttgatcctttatcacctgaagaatattctgatgaagggtggcaagcagctaatttgcgtggacgatctgcaaatgtacggaagaaaagcagtcgcagaaggcccgctctcactaaattaatggttgatcgcttggaagatggccgcacaggttctgcttatagggctggtgtacaacaacacatgaaaggagataaagaagatgttataaactcttctagccagctctcctttggcagctttctaaaaactgacaaggtgaatgggaattccagcaatattgaaaataaggttttcaatgctatatctaaaccagaacgaggcataaagctttcaggaattaacagacctgctactatagcttccaagttggtatcatacaaagatgtagcagtgtcaccccctggcacagtcttgaaaccgattttggagcagaaggaagcaaaggagaaggataatgcacaaaatactgatctaatagtgtcatctgaggaggaagataagaagttaacagatgaagatgaagaaaaggaaaagccaagtcatgacagcagcaaagaggttctttcaagtgaaccagaggaaatcggcaatgatgaaaaagctccggacagcaacagtgatgaaagcccaactgaatctaagaaaaaaggtggaagcaagctttcagcttcagcgcctccattcaatcctggatcactcttatcgatgtcgcacccttacagtacagtggcaatatatgatgctagcgtcgttcttcagccaataccaagtcaaccaatggagattctccctcacgccattgatactagggtaccccgtggtcctcggtccacattgtactaccgtactgggcataccttccaaagaaaacagggttacgcacacagccagagcaccattctgaggggtagcaactcccccccaaccatgaatcctcatgctgccgagtttgtgcctggaaaaacttcgcaacaacctgatgtggctaacagagagcctagtgcagatgtttctgtaactgattcagcagatcaactgttggcaccacagacatcagatgaagtaaaggctggtatgcctgcagcagaacaagcaattcaaggtgagagcaccagcccatgcaaaggaaaggaaaacagagcgaaagatgccttgagaaactcatgcaaaacagagctggcaaggcagattttgttcagtttcatcgtcaagtcagtacatgatagcttaggttccactggagctgaatcggacagaaaaccaagtggaccagacgaatctggtaatgcacagagcagcaacaacataaacaagagtccgtcaggtcgcaaagagcttgacaaacagcagaaggccaccgtggtacctaagagtgagaaggatacagaaggatttacagtagtttcaaaacgtagaagaagcaagcagcactttgtgcatcccatacatggtctctattcccagcagtcaatttgcacttctgtcagctaaaggtcccggtagatctctttttgggagtcgccatattttggaagaaaggtatcgcttaattacttagcttagacgcttggtagcaaaagtcttaccctatccagatgatcgagagcatgtagtgaaactgtacaaagctttccgcaatgtcttttgtgtaataaattttgtaattttggggtagcagccgcatcagcgctgaataaaatatatttgtgtcatgtgtagttatatctgtgacagaatcatataggatatagcagcagatgtttcagtgtagagctcctttttattactctatccgtttcaaaatatagtgatttttagagtagacccggattttaggaaagtatatgaaattaaatgagaaaaaattgaacctgcaatattttgagataaattttaaatattataagtggctatattttttagatttagggagtagccgctattctttatgatgtgcactagccgaattgtctgccataaggacttgatgactgcaattactagtactaggagtaaactcaaagctgactcgagtcattttctatattgactttctctgcttaaactatgatcagctcagtgtggtgtggtctttggatgctttttcacagttaatttagcttccacggagcagagacggagcagagtcagcagcagaccagacgtgaattggtttacagttagtaagctgtagcaattgcacctgtaccactaccatactctcattctctttaactctcgttacgaggtcaactcggcagctagatggcagcagcagcatatgcatccattcacctcctggccaatagctagctcagccattagtccataaccccattacattactactctcctcctgcttcccttgcgtaccacggcccatgccgtgccatgcatggcacattatgcagcatgcgacgcattcatatcctcccgtcttgctcgcttcatccacctctgaatttctgcatcgtggatgcagcagaatcagagatacccccctgcatgctgccccttgctatgctacgcatgatgctgtattgctgtgccatgctagctataccagctgcaagcctgcactacagcttgcagagactttttatttatggcgttggagtcagattcagaagaggatcagaggacggcatggcattggcatggcatggtgcagcatgaacgtgtgtctgaagtctgaactcctaattaatagttgtagctagcatttcggagctgtgtagttaatttcatctactatagctatagctaagtcacgggattccggttgggacgacgacgcaacgcaagcaacgagagagatacatatacacactcctgtcctgaagccggccgggtctctgtactgattgatccatcagaagtgtgacaagaaatgtggtatttattgcaggttgtgcatgcacatcagagctagctttgggctctgcttcgcttgcctcccatggcggccccgccggtgtgtgtacgtgtgcacgcgtgggctcggacttacgcctgcttacgtgcgagatcagatacggatcagcttattcattcaaactggtctcctgattgtatgcgtttttcctgaataatggaaagtataacttccagcttttgtgttagtaagtagttaaccgttaatttttaactcttggatgctcctattacacatcgacttttgagagagaaaagttagggttttaatcctagttcgtgagttgagagaggagtgctttaggtgcactttgtaaacacatattgatacaataaagttgatataagtttcgtcgatacgtgttttctagatcccgacggattgatcgatagcaaggcggcggtctaaccagtgggagtacgacggtctaaccgaaggcagcgcggcggtatgactggacaggctacggcagttggatcggtggtgacaggacaacgtcaagatctccatcaatttgagggtaacttttttgggtttttggttttccctaccattcaccccctctatggtaggcttggttacttgtgttcgattctacatgtatcagcatcccctccatcccgcaatatatcactcaattttagctattagttgaagaattagtgataatggtaggtcgtaagagatattaatagtagtgttatacatccgactgaatcgccgaaccaatcatcacatagttcataagcatttatgtggacccagtcaaaacaagttaaaacctagtattatgtaaagtcgtatgtaggtcggacaggtgcagtcgtatatatagtcattccgagatattaaaggagtaatttttttaatttataaatcaagagtaggtaatgtagaaacgatttcttttcaataaagtttgagagttagaaataaagtctttctaggagggagtacgtgtatatatactaaccaagcccggcgaagaaaaatattttttttagataatggaataaaacatcccggcctttgctcatcagagttacagccaattattacaaaagtaacacccaaacactgagtgtagttcaaatgaattaaacacacccaacaaaataaaagatcaaactaaaataaggagagcacatttattcaagtctatttctgaatctccatccatagtttgcaaggagttgcatgaccgttgtctcaagcctacgacatgcaaccttcataagctctcgatcatcttcacacatttgcagctgtgcccaaaatcggagccaatatgttgccctgaaaattacctgcatatatgagatagatggtgatttgtaaaaaaccatatcattcctagtcaaccacagagcccaacatatggcagaagctcctacaagtatgagtttacccttcttcttgtctacccccaagagccaaccatcaaacatattatatatagtagtaggaaggtataaaccaagagagaactgtacatatgctgacaaataagcgagcactcttaaatcagaagtttgacaagtgtgattggttaacctggatggaccggtgactagtttgtggcttttttaatttgaaacactcagtacaatattttcatatatatttggtttaattcttttgaaattcctccctcgaaaggatacctaaaatgcaactaactcaatgatatgttggtatagcagtatagactacaatggattttaggccaactagtaatcattggatgtgtttagttcatgctaaaattgaaagtttaattgaaattggaatgacgtgatggaaaagttggaagtttgtgtgtgtaggaaagttttgatgtgatgaaaaagttagaaatttgaagaaaaagttgagaattaaacaagccattatccttaaatatacacttcaacatggtaaaagtattctctgttttttgtcacacaaaaccctaatcaatgcatcacgcatccgaaaccgtttattgttcatctgcagagcagcggcgtggcacccgtgactaaatatctttgcgttttttttcacatattttaattttatttgaatgttttatatgtgttccttgacaatttcatgggtccccacatgctagtgaccgcaaggtacgttacgtgtgtagcacatacacgttgctgtcgctgagaggagaatataaacttgacgttggcatccgattcccatccaactttttgtgaccaaacatgatcgcaagatcgcctgagtacgtttgatatgctcgaaacttacgctgaaactgcttgatttgaacagcatgatctgaataactattttctttctttttaaaagatgggcatgtgaaaagtacccaacttgtgtagctctcgcgagttgactagctcattacatgacaagatcgtgcagagaagaaagcattaactgctgttcatgaattgaagaacctcttcattctggctatgattcgcaacatgcatgttttgaagcttccatggaaacctagacaggttcacaggagtagcttgtactactacttttgattgaattgaaattaattaatgtagagatatgcagagagttgattaactgatcaagacctaatcataaccagcaatggatgttgcatggattgatatattgatcatctaattgattaatacagatagatagcttggtgctacaaaggattaattaagcatggcatcgccgggattaacaagataattaaggctgattaattaataaattaagatctggcaaaggaggagctcctgggggagtggacggggaacagcggcagcagcttgggcctctcgccgtcgccggcgccgccgctcctcggcgacgagtgcaggtagaaccccttggaggcgatggccttctcctccctctcctcctcctccttggttatcaccaccaccccgcacgacgacgacgacgccggcggcgacggcgacagcgaggacgacgacgacggcagcgaggacgacgacgacgaggaggaggaggccatcacgtaggcgtagtccatgggcgacaccggcgagtgcatcagcctgtggtggtggtggctgtagtacagcggctgcggccgcgcgagctccagcctcgccggcgccgcgcgccgcctctcctgcagcttcggcctcctcatcaccggcgccgccggcgccggcttgctgccgccgctccccggcgcgcccgtcagcttctgcacgagcgcccggaacgtcgccgggtcggcctgcacgaacgtcgtgttcgtgtccaccacgcagccggccgtggcaatcgccgccgcaggcgacgacgaactcaccaccaccgacctcggcgcatgagacgccgccgccatggccgcgccgtcgagctagctatcaaccaaccaaactctctacgaatcgagagagatgtatcaagctatcaacgagaggaagctagctctagctaagctctaggagtacacgcactacatgtgatggtgtgaagagaatggaagtagaatgggcgagcgaggtaagctttttaagggacagaaagggtggcattaaagcttcaaaacctttgcatctctttatcgatcgcatccatctatcactgctagctaacagtgtttgcatacatactcacgtacatgcatgctgctatggtcgacgtcgactactcacaaactcaactagcaacatgtacacacatccattcacatccatccatctatatctatctggcccagctacgtacggtacatgcaatgcaaagccatgaagcatcttttctccctgatcgatcgtccactggtccatcaggtattcaggtgaattgcaggtatatacttatgaacacacgatacggccgacgggttgctacggtgtcccttctttccatctcttcagggttcagactacttcagaaattagctcttcaggtttttaagcagctgggacgtcgtcagtactgcagtacagtgacaatgtgtacagattggttggtcgatcacttaattggttgcttagcttaaatgatgtgctcagatcatcagcaggggtactgtacaattgcatatcgccttgcagaaggaaataaattagtaaacgtcaagatgcattaatatataccttgatatcagcatatatatttattatgtcatgttagtgtcaatcagcgagtaattaacgcgttaagcgtacaatactggtgtacatggcgtgtgcgatagcacacatacgtagccatcaaactcactcaccattaagagtaatcgagcagtagtaattacaagtatacgtactgctaattaatcgctcagagcaggcaaacgatgttgatacgtgtggccgccggccgacgcgtttgcagaagatccggggcggatcagacgcttgcgtgggggaaacaagaaggtgttttgcttgcttggggttcggatcatctgcgccgcgtcgaacgccggacgcgccgtgcggccacacgcggcggcggctgtcgtcgccgtcgccggggtgtgcgtgtctggtgttccgtgggtgtgattgcatgggagctgacctgtcagggacgacgttgtccacgtcgaatggggccccgtacgtgggccggtgtggcccagttgtcacgtaacgtcgccgtccccccgtgttcacgggggtggccgtgtggggcccgcatgtcagaggctggggccagaggcgtttgtccgcttgatgggtgtgtgtcgagttgtctgtctgtcgaccattctgcatgtacgtagctttaggttgtgctttcagttcttcagtgtcgtcggatgggatcgtctccggccggccggtgtatgtcttcgttgttaggttgctcattattgtcgatggtatgcatggtcaactggctaggtcgtcagttcgtcacggcggctccggttacgtgcatactgttggtgtcatttgcacatgttcattcattcattcagttaggatgtatgagtggctgttaattttcttgggacaaatatttaaggctctaagatgggtatatcatgtatgcatgcatctctgttgtggacttttggtgtttttgttgttgtgtatggcggattggctaatggatagctccgtttgacagttccttagcagcatgtggcacagtggcagtagtcactagtcgtatacaggtgaactgtacagtaggcgtatagctgcaagcaagcatgtgggtagtgtcgaaagtgtcggcgacacgctccagtgcctacccgacggacgtgctcccaggaggcaagtaggcaacgtcagagaatccaagcagagagagacacgccgccccgtccggtctttgcaacggggccgctccgtcgtgggctctagtactacctgttggcggctactgtccgcgaagatgaaagtacaagtactccactcgcagtcccaggcctcggcccaaccagagatgctgcggccaaggccgtgcaaaaaggccggtggtttcggtgggccgcctacccatcgtcgccgtcgcgtttgccatccgcagcggccgcgcggtgatgtgcgtgcggcgtgtggccctcgcggcgtcgacactcgaaaccgcacgcacaccggcggcgtacgtgcaatcgtgcaccaccttggaaaccaagctcatgcgcgcgcgcgcgcggcccggtgagaagagaaggcaagcgagcgcgcggcggatggataccggatggctgcactgcacgtacgacttgggcgcaaggccgcgacgtggtcggcttcgtttcttgtggggagcggcacgagtacgcgcgtatgttttgccttggtgtgaccttgtttcacaagcgatttcaggttttcttcttgggtatccgagcattcctagcagcagttggtttatcctgtgggtcgagccgtcgaggggctgatcagctgctcagccgctcagacatgagaagcttctatggaaaaccagcggaccaggcgaggcggcgtccaccgtacctgccccaagcccccaactgcccaatggtgtactgattcggcaggagccactaacacaaaaacaaggaataaattcgttcggttgcacatcgaatcatcaagttgtaaagcaagacttcttcagcatacaattattattagtagtacaacgagccccatctaattaagattagaagaagcatatgaaggttagaatgccatggagatgatggaggtggtagccaccgagattatggacgccgcgctgcacgtagccgtggccgggcgcacgctggccgtggctgagcgcgacggcacgcacgacccggccacggggcgcgcgctcaccggctcatggctctgggactcctccctcgtcctcgcctcccacctcgcgtcctgcgtccaccaccaccacctccgtggcgccaccgtcctcgagctcggcgccggcacgggcctcccgggcatcgccgccgtcgcctgcctcggcgccgcgcgctgcgtgctcaccgacgtgcgcccgctcctccccggcctcagggccaacgccgacgccaacgggctcaccgccgagcaggcggacgtgcgtgagctccggtggggtgggcacctcgagcccgaggtccaggtggacgtggtgctcatgtccgacgtgttctacgacccggacgacatgccggcgatggcggacacgctgcatgggctatggcgagacggcgacagcgacagcgacggcggcggcacggtggggtgggcggcgagcgaggcgcgcgacggcgtgcaggactgtatcgacgtgctgcgagagcaaggcttcgaggtggtcgaggtagacagggtcactaggccgctgctgcgcgaccccgagcaggccgccgacttcgccgtctatcgtctttttcgccggacaacttcgccgtccatcgtctccaatccaacgccgataactacagccgggtgttgactttcactctgtaacagtaaagccaagcttgtaacggcaccagaatcacctttgaccttttattttccaaaaggccattttgtacgtactttcttctcggttgcaggacttgtaaatgttccacaatgagtcaaggggacaaagacatagcaattaatatatgcaagtctactgtaggaagctacagtagtatacattgagaaggattttatagcaaaagaatttacagttgcaagggttgctacagcataaagtttcttcaagtcactcttttctatttcaccgccacaaaaattttccattcctgtgtgtaaagggccaagagaaaaaaaaaactacagtaacattttcgcaatcttatgaaacaagggtatttgtctaacgatccacacagatgtacactctaataaaacctggttgatttcgtgacactagagccctagaaaacgtgaaaagcgatccgcaagatttgcaatgacaaacccagaaaatacctgcaaagcacaagtaagcagggtaaagcaaatgactagttcaagcaggattgatctaagaacaaataaagtatcaaagaactaatcagtcagattttcatagttataaagaatggctatattattataagaacagaaaattttgatttactttcacctaattgtaaaatggttaataacagcatttacataacttaaaaaaaatacaatcctaagctgaggacatcagttacctggacagaaccaaagatatagaccgctgaataacgacgaccatgaatgatcatatcagccaccattgctagtggaattgtgagtgacatgcccaaggtggccaccaaaggagtagtccaaacaacagaaagagccctgaccagaagctccatgtcaaaaatagcacaactaggcaacaatataataaaaatgttatccttggtcagtgcgtaccagaagtagtctgacaatacacttccaataaggccatttgccaacaccacttcatccactttggctgagtggggtattgtaaactttggttcaatgcctaatgcggtcaatggccagactgaaaataaaagagagaaatttagcatatctggatcaaagaaccaatcatggaatacatgaatgatatatgtgcttgaaccaaactacaaaagaacatggtcacaaaggtttgtgttctacgcagtagactagaatacctgaacaaaaagaattattggcatgcgtggtgctgaagaaagagaatttcagactacgaacaatagagacagattctctagcagcacatgagatgcccatacatgacatcctttgcgattccattttatgtaccaaatactaattaaaaattgaatgctaattagtcttttagacttttcattgaatcaatttttatagttaacaaggaaaatcttaccaagccaccagagaagaacaagactgaaaagtccgaggtagccaaacagtttttggacatcaaccttttctccttcctctccagcaaacttttttagaagcactaaaataatgttgaaacaattagcagttgaatcaagacagatcaactaaaggaagcaaagaactaaccagtgaataaaccatatgacatagctgacagaagaccaaacatgtcacctagaagagttctctgagtggcactgcattcataaagtttacagattagctgcagaacttgtggccaacaaagtgagtgctgtctcaaagttacaaaatcatcttcaacatgatcttcagttacaaggccatcttaaaaatggaataaatagcgcttttatgtttttttatgcacttatatttatatgaaaagcaattcagttgcagcaaccaatctactacaagcaagcaaatgcaagggctttatgagcatagcaaattaatcacaaacaattttatatgtcctgaggcatcagtgcagaactgtgatgtttatttaagggtaaaacgcactaacccagaattgctgatttctgattcatctgatgcccaagtctgccccatggttgtcattaccacaccagccatgctaataaaaacagcaataacttttgcagcatttatagaatcttggccaagtagcacaccaatgaaaagagtgaagagtcctgacgttgaagatagtacagtagtactagcaacactagttcttgcaagtgccgcatttgacaagtactgcatccattaaacagaagagaagaatgagtaacatttagcaatcaaactactgcttgtatggttgaaatcaaatgatccctatgaattttaatgaacaggtaaatattaggaaattacctccgtcacaaaccatatgggacaaagatacaacccatacattgcaatctccttagtggaaagttcttgctccttcaaaacgtcatcgaattcagtgattccacatataagaggttttgtctcttctattacaggaatatccacatcagtatagtttatgactatagttttttgagattccatttccaacatcttctggaattcaccattcttcagaggagcacaaccaccgaaagaagatttgttggtaacttttgaaactctactacttgaagaagaccttctcaacaaattacatataaaatcctttaaaaatgaaagaggtatatagatgatcataagggaggcccccaggtaagtaattgcaaagggttgcttgtatttagtgaatatcccctgcacacataatgaaataaaattatattcatcgcataacatcaaatttatcaaaactataagaaacaaaaacatattatgttttaagacataaatcatacgtcttaacggtgggctactataactgacatgttcttgagagttaaatgcaagtaccaaaccaatatcttgttttcttcagaatagaattttaaaaattgaacacgggtagggggaacatctttttcgataataaaagggaaaaacatcttgatttgcaaaaaaactagaataatactttcccatataatatttaatcacgcattacaggtgagcaaggatgtcataaccacctccaattaaccaggtattgatgatgcgaattgtcacaaccacctcaagcaaattagggtttgacaccagccacacgaggaaagacaggagaataatcaatggagcatgtacatcaattctctagagaaattccatgagcacacaatttgacatatggaaaaaagtaactggttgcaaaagacatcaaagctcgtaagacaaaagaattgaagaatctataactcaagtcagattctaacgttgcctggacaatttttaattactggaaagaatgcatgaacagattaaacaaatcagcgaagaggaatgttccaagattcctgattaaataataaaattaatctgctgtcaaccaagcatgcatccccggccaagatctaagaacccagaaaacaaataatcacaaaagataaaaggaaaacccgaagaaatcttgtcacctgcgtgacctccgcggaggtgacccatatgagcaccacggcgacgatgaggacgaggccagcacggtacttgagattggaacccatatcaatccaaccctctcctcttgccccgcctggtggtggagtgagtgcgggtgcggggcgcggcgagcaatttaaccgcgcgggcagcggcggggctagcacccctcctcaccgagaggcagcatgcttgcggcgcggctctcggtgggtgagctccgcggcgcccctcctcgcctcatcgcccgcccgcccgtccccccccccccccccctcttccctgctcacgaaaagagagaggggatgctcttccctgctcacgaaaagagagaggggatgcgaggcgaggaggagggggacgaggcgaggtgggtggggtaaagcgggcgtgacctaccggtggaagtttctaattttcgtcccacgccgcaccgaggcgggcagcgcggcggaggcggaacggaacgacgggcgcggggcgggacggcgggattgcgagtttttggcgtgcgattcggggtgttttgggcgtgtggcgtgtgggtggtgggattggcggtgtgccgcactgccggtgtcggtgggagtgggacgggggcggccgttgctgttgtcgacttgtggatgcgggacgcggccgcgcggggagcccggcgtgcgtcgccttcggtgttgtgctgcggcggaagcgagattgatggggccttgtgtacctgtgctggactggcccatgaatattttttttccttgtaaaaaacaattagatataagagcaggtacaatagcaggctattagtcagctataaacatattttaatgagataaatgatgagagaaaaaaacagcgggctacagatatctagccagctgtagcgcggactccaagacacaatgtatgacaggtggaccatatattaatagtatagtaagcaactattatatgaattgactattagatttgctataaatgaattggagttagtagtgggctgtactattagacttgctctaaatgaactgcctatccatttgtcggatggttttttaaaaatcaccaagacaacatagtttccggtaatttctcaacagccatgcagaaaacctgatcggtaacggacgacgacgcacgcagagtcctcagtttgggcccaactgttgttcctcagttcacatgtccaggatggcaggcactaggcccacgttgcttcattcaagcccaggccattactattccaattcgtttgcaccaaaacagctacaggcacgctccactgacgagagccactttgagcggctaaaataatatcccgggacatctataaatacctaatctatatctatatatctcttctctactattataaaaattaaagaatctatatctatatatctcttctctactattataaaaattgaagatgttttttatcgagattttgataagtcattcgtgtttgagtcggtttttaagttgattaaccatatatcctctctattctcttctccgtctactattataaaagttaaaaatgtttttgtcttggtatgtcgtccgaattcgtgagcaaatcgtaggaagtttgactcccgcccgcgtccgattccctgcctgtgtccgattcccgcgtgacggccgttgaggcagcacaataatgtccacgtgaccgcatccgcctccgctctatctgtttccatgtttccatgtgtggtcgggatcccaagcccacgggcatatattactgttgcacaagtccttcacgttgacggataaagcaaacatgcaccgatgcacgcataaatcaatgtacaaattgcactgatatatggttctggcaagaagcactgcttgatctgtatgcacaagaaggcaaccactgaaaggaggaagaaccatgcatcattcaaatttcgttgtcgctgctcatcaaaatagagatcaattcaatgaaatgactgatgaaaacacgttcctgagattcgtgcaactacaaagcaacattacatgcaactcaaatcgttcatgcaggtgtttccgattcggtgttcgtttgtcgaccacgtgttcccatctgtgaaggtctcatgaccaaaacgagccagtcccaacgtcccaaccatgactacttcgtcaagccactccaaaactagataatgcggtgatgttagacctaccatatagcagatcagtgcagatttcaccttgattttcatgggtctttattttcttcaacatcaccataaagaagatggtgaaatttgtattttaattaattgcataatgtaaatcttgatttccttcaaatctagcgtactgagcccagtcgggaatgttctcgtcctccgcttcatcttcttccatttcaaccccttgctcaccgtaggatgtccaacaattatagcttgacatgaaccccgactcaaacaagtggaaatgaatagtcctggatgtagaatactccttctggttcttacacttattgcatggacaacgaataaaaccgttacgcttgttagcttcggccactctcaaaaaaaataatacacgccctcgataaactctctggaccaccggtcagcgtacatccattaccgatccatctacatgaaatgaaaaaaaatcgtacataaataaatttttgtacaataatgacagtcaaacaataatgataaaataattaaaaactctttcgataagtatacaataatgacatatcattactcatataattaataattataaaataattcaacaaacaattcttatttttaacaatttttgaagttctaaactaataaactaatattaatgttgtacttctcttaattttcaatttagcttgttttctattttgtaagattaattttcatcatattttaaactatgagaataaaattcttttaagtaaacaataaaatttctatatattcttcttcccccacacaaattttctctatcatcaacttacaataaagttttagagaaaaaaaatgtgtgaaacatagctccaaaagtaatataacaagttactaacattttagacacctccgatttgtatataatcactaaaaaaaatttcacaagaaattttggcataacctcctttctttctttaagaaattttgaagtttgctcaggctctttaagaaattttgaagcttgctcaggctggaggaggaagaagacatatataaatgggggatttttaagtcccggttggtaagatcccggagggcctaacaacgtctaactaaaaatgatctttagtccggttgataatagtctcggttttaaatggatccgggactattgtgaatttcgaccgaccgaccaaagatgatttctccaccagtggatccgaacaacttttagctatgagagagatgaggcacttcaaaatttaagaatttgaattccttaaatattctgattggaagcggtaaaactagggaaaaaaataaacgaaattgaaggagaaaaaagaaggcctaaagcaaacaagaaggtcaaaaggatccaggatgaggaaaattagcagcaaacctaaatcaaaacgcaagaccaccgctccaccgctcagctcatcctacttcttcgtggaacgagaacaatgcgggatgacgtctcgaacgctgatggatcatgccccgacacaaggaggtacgaggaagaaaaatctgagaagggcaagctttagggatggggaatgcaccgaggtcactgccgatctgccgcaatggacgagctgctccctccctgctcactgtcgttgcgcctgagagcatggatccggaggagcgccaccgccgtcgcgctgaggccgctgctcaccggagtcgccgccgcctgtgccgaggccattgcctctcccgctcgacgaggccgaggtcgctactcgtcggggctgctgctcgcaccggtgctgaggctgtcgcctctcccgctgctcgacgaggctgagggcgctgctctccgggtggtgtcactgccgcggctcgcaggggacgaggccaaggttgcgctgctccctccatgggcagctgcaaaaggggaaaaggaagtggctagatgcagtgcactggtggggactggggaggaagaatcgagattggtcttatcctatcccctctgcagctttaatttttttctctcctatataactcaagtgtcaagagcgtttgagaaaaaaaaataaaggaatataatcactgctgctttcttttttacctcttgtccaccatgtgttttattcttattctgtctttattttcctctctttctgctttgcttttatatttttattgtctatttttaaatatttaacctcaaatgcataagctgaaaacaatactcacttaaaaaaacatagattttcactatttagatgtgacgtcagcttttgcacgtcgtgatttagacgtgtcatcaattcaacttcatgcattttcttcacatatcaatgcacgtatatattcccacagttaaattacatagagtgctctacacaaaagcaatctcatcgttcatctgatcattccaacaatcgaagccacatgtcaaaaaggtatgcacatgataaattgttcataaattgcaggctagcggcttgatgcgatgcttgggcatggaggtggcggtggggttggccgcgacaccgggtgacaggtccgcagcgaccaggagcaatgacaaggatgtcgcggaggatgccgacacggccaccacaacaccgatgaagggtcgttctccaacgtcatcccccagcctgaccaggcaacgggtaccgcacctgggcatgtaggcggcggtgggggcagctgtggcattgggtgatgggttcgcagcgaccgggagcgacgacgagtagggcgctgttggtatttcttacaatcacagataaaatccacaagcgcacgaatataccgatgtagcacttcccctacggagtattccaaaggtatcgaatccaagagaacgtgtataatccgatcttcctccggtttatgcaaggatatcaagcaaatgctgcaagttgagagcgtctcgtcctttggaaatgagtctgttggcaaccgaaacaacccggcaatgcagataggtatcttgatgtcatccactatctctctgtggtaatcatctaccggagccgggagagccaggatctcctgccggtgtgggcttgaactggtctgttcctctgtcagtgaaatggtagcgtcgtcattgacaggcaaattctccctgtcatggtagtcctctggtgcagggagagccagtatctcctgctcaggagattggcttgagctgcagagctcatctcttgcagaagtgaactcgtcgtcgacgggggagtagccgtcgtcttctgaatgttcatcgtcccctggtgcaggaagcgccagcgtcacctggctgggtggaactggcttgctcagcttctgactcagggaaatcctggcaagctgaagtgcctgaagaacactctctatgtccatgttgcttgttggctgttgatctggccctgcatcgacctggttgtcgccatggtcatggaagcttgatgagctccagtcagagaccttgctgttcagggtggcatcactcattgacgggcttccatctgatggcgctttgatgtcacagtagcttgaacatccatccggattctcgtttccttgttcttgattcttccctgtcattgtgccggcgacattagagcttccttgagactgtgcatgacagtggtcgtgatgctcctcgtgcgcgtcacgttggtcggcagcagcttcttgtcctgatgcgtgtgattcaggaagggaatcattcaacagaaggccagcagagcggttgttgctggcgctggggtgatttttaacgcctggttttgcctcttcgttgcaatgtaccgcttgatccgcgagcctagcatgctccttgctctgctcccaaccattttctatctggcacgccttattctctgcctcaacatgaacctgagctccaaagacaaaagtatgggtaaaatgtcaaattttgaaccaaaacaaccaggtttcactcatgatactaactaacctgtgggttgcactctgcagtgcattttgttattaaaaaaaacattttgagagagcaaattatttatacttatcaagttggtagtacacatttttgtactgcatgtgcactaaatttggtagcatgtggaagtcaaggggaagttgactctctctctggcgtagttcatggtacaaagttatgagattatatttttgttgtacacatgtactactgcagaagttgcttcatgtgaaacattttctctggaagtggaagaatttggtatcacaactctgagcagtgtttctgtgtaactgtgtttggttgcttaccttggctgagctccgattctcgttgaactgcttctcccactgcctctgagcttcttcctccgcctcatactggccgatcagctcggcctgcctctcgagcaccctctccatctcgccgtccttctcgtacctgatcacatactgaccaccagtatcctcgccgtccatgtccgcctggccgtcgtcggtgcaatccgatccatcttgctgccccttctgactccaggcgagttcctcgacgtcgccgcgctgctcttccggcgccgtctacttgccattgctgatgagcagagccgtgtgatgttagaattcgacaaacaatggcgtgtgccagcgtcaatggcgggacggagctcacctgagctccttgcgcttgttcttgcggcaggactgccccatccggtacttgggctaggggtcggaggagaggaggtagaagtagctcctccggtgcttctgcttgagttgcctcgccttgcgcgggctcacgctgcggcctttccacgacagcccgccgccgggctcggccgtcccggacagcgcgtcctccgccgcttcgcactgcgccggcggctgctcctccccgcgggagcctgccgtgtcgccgtcgctcctcccgtcgcgtgggtcgtcatcctcctcgccatcgtgttcggagcccgagtcgagcacgtctgagaggttgccgccgaagccatgtgactccagaatacccagcacctccgtcgccgcccgctccgcctgccgcctctgcgccgtcaccgcctggacctgctcctccagctccgcaacctaaaaccaagtgacccaacacatgcaatcaatggcgcgaacgacagcgagaggagaaggacacggcgagtgggctgcgcctgcgcgcggtggctggctgaccctcttggcgagctggtcggcgcgctccttggcggcgcgggagacggaccgctcggagagcagccgcgcgcggaggaagtcgacggtcatggccgtggagtccgccatgcatgcgcgcgctgtgttgctggcgctcacgcactccccgagcccgagccgcgagtgacgctgctgcgtacgtatgcggcgcgcgcactgtcacatgccggcggtgtggcttgaccggcgcgggtattaaaaacggcttggtttcccgtgagccgcgcacggcgcacacgcagcgcgcgtcgtagtcgcggccgcgggcgcacggcgcaccgacagccaaggccagggagtacgctacctacgcgcgacacaagcgccccgctgcagcacgagggccatgggctgacgagaccaccgcaacggtgtagttagctaggctgcgccgtccattttcaagggagaatggcgatgcctcacctacctgtatcgactgatctgcctcctgccctgtccggggtccagtggcatattgtcaatttggcatcttacaaaatcatcagagtttgggtttatggtgtactgtgtacatgaactccagtagcacttgtttatggggtaaattcgtcgaggacaagagtagtgaacgtggtacagctttgccatgttcgagcaacgcgacgaagccagcaaaactacactcgtcttctcttgtgctaccgcctactgctactggtgctccaaaaatggccgagatctcaggctgtccttgcttggaatctttctgcttggatcacgaacttctaccgcacggaaacatttgagtcttgcaacggtttcgataaggtcattcaaagcaaagtcagctcatcgtgcatagaacaatacgtcttcaaagaccatagcggcaattagcatcgagtaacagatgtttccattaaacaactttagaatacacacatgcagggtgttgaggccgatgatcaagcaatgaccatgcggcagattaatgcagaccgtaaccacaatctcaggtacttaaataacgtcatacccggtaggcaggtttacaaaacgttttcgtaaacgtttttagccgaaatttcgctcaagaaacatcatgtctgcttagtttgacatattcaaacaagataatgacgatatctcaatcaccgctggcacagcctctgcatccacagtgaacacattctataaccttctcctctctgagatgcttggggacccggcagacacatgtagttgcaaagttgtggtctcgtgtctgtatgcatcgaagacagcaaaggcgctcatagcctggctgaaaacacacaaaaagaagcaatgatacatttgatataagaatgcctgacaaactcttgtgacaaaaaagcatcttcagcatttgcatctaaaaagtgactgaaaactttgacagttgaattcgtcacgtacatgtctcacagtattcttagggcaatttaggcccctcgttatcaatgttcagacaagtatataaagtagtaatatggaacataagtattgcatccctcccaaatctgccaacttttatcagatgtccaggaaaaaatatatataccattgggtgttagaagtctatccatgatttgatttctggttacatcagctgctagtgtggcaataaaaatacatagcagaaaatacataaacatctttagtcaactgccttttctttttgctcccaaaatcttatttttcatggtacacccatataagaaagtatatagtccataaatccccacaagtcactcatgctgcattatttcactatttcctgtggttcattgcatgaaatccaataaggcactactcaactttgacatacagctattaatcgcaggttcatacatatagattatattctaaacaagatttatgatgtgtcatgtcaaactggatcagtatgtgatagcttaacccaatataatggatttactgcaagaaatggtaggatgcggttagtttaatgttttatttttcatagtacaagtacaaaaagtatggtcagttaagttacattctaagcatgggaaaaaaagtgagaaacttaacagtgtatccagggtctatggcttcatctgaattatctttgtacacaagttaattaaagtcttaaagattatacaaggtggataaggcatcttactaaacttgcacagagtataaggaatgatgggcactcgcaaatcatgggtcaaatactaacctttttccactttgcaatcagattacggtctgcataaccctggtccaggcaaaactcatacaactcttttgatatctccttccttctgtaataaagatcatatatgtagcgacttctttgatgggaaatacggaaaattggccagagggcttcgcactttctcttcccatcatgcgtgtcattttcagctgcatgagtagatgatattagtatccatataagagcagaagtatcaataaacatctgaaaggggagcatatgtcataccttccctcattttggcatccaactcacggatagttggttcaataagctcccatcctccaggatatttgacacggcttgtctttattttaggcatgttctctcaatgaacgtcgaggggctaaagcttgcaaagaaaccctgaggacatagagtaggtgtaagattcacaatgcaaaacatttacacggtcaggctcttccatcgaactcaagagattataagaacataatggacactacacactattacatagaatttatccccgcattgaagccttacatcagatatgctatatattccttactataaaagaactgtgttgaacacaaataacacaatttaaacaggtattttgcatcttcaggctaacagtcttgtcgaatcatgatttaaccctattttgcaagtacaaaatatgtgcacctcgaatcggtgaatggacggtctaatacataaagaactaatcgacacgatgataaaaatcgcggaaaaggttccccaaaccctaggctactcggaagaatttttttttgagggaatactcggaagaatttcgtcccaataaccacatacgagagaatttcgtcccaaggaggagacgaattgaacgaatccaataaacagcgaggtagaaactactaaaatatccagcgaagcgaatcatcttcaggcaaagaaaaaaaaaacaaaatcagaatcatggaacggaagacgaataataacctcttggcttgggcggccttgcagtcgccggatggaagctgtggcgcgcgggggagcggcgatccagagggggcgcgcgtcgtccgcgccgctggtctgcgctgcgctgcgctccgctccggtcgagcaaagacggccgggtttggagtttggaccggagctatcagctatatgtcgtgattctttttcccctcctttttgttttttgagaggagctatgccggtttcacggttttctcctctggtaggagtagtatttgctacatgggcctcaagaatcaaaacgggacaccaactgtgctgaaatccaattgggcaaacgagggttggtttggtttgtagctcaactttgctaagggtgtgtttagttcacgctaaaattaaaagtttggttaaaattagaacgatgtgatggaaaagttggaaagttatgtgtgcaggaaagttttgatgtgatagaaaagttaaaagtttgaagaaaaaatttggaactaaactcggcctaagtcaatatttatgcaatgttaaacaatagtctatatgtttagattaatgccaagtgtcacagtatgtcctttagaaaattttgtggaataaaaattacttataagaatatatcttgataaaaagatattttgtgtgactatgggtagtttgtggtctagattcttcttaagaaatttatgtgagtttggatgagtacaaattatgtgagcttacatttttcgttctaagggtgtttggatgagattcagtaaccaaattacatatgctaaaaacggaaatcaaaattaacaacttgaaagtaggtggagctgggcagaggcagatctaaccctgtttcggttgaacccccaaactttttgagggataacgcagaatacctgatgaggtgtgggtagggagggatgctcaccggcgagcgacgatgcggtggaagaaggaggacgccgggcgccacctctgctcgcaggatggggatcggcgcaagcggcgggcgaggagacgaaattcgaggccgaggccggatgggatggattaggatgctcaccggtgagcgaatgaggcgggagcaggaggacgccggcgccacctctgctagcaggatggagatcggcgccagcggcaggcgaggagacgggagtcgagggcggcgggcgaggagacgggacggattggggaggcggaggttatgcacgcggtgtcgcctgcctatgggtcatatgcacaggcccatgaggctggagttttttcatctcccaaaaaagttcatctaaggtcccttatcttatcttgtcgttgagttttaaacgactttgaacccctaatcttgcaaaatggattacggatcacttttaatccagtattgctttccggttttgttgacatggtggctgagtcagtgtagaggccacgtggaccccacaagctaaccaacaatcttcttccacctcactcccctctactcccatctcaacccaaacctccagggcattcgccaatgggtggggagaagggtgtcggtcggcggggaaaagttcgacggcggaggccgccagctaacgtggctcccaatgaccggaagcgctcacgtcatggacttgcgcacgtgcggggtgtggcgcgggtcccaactacaactgcaatgttgtcttcaccggcacgcgtgaaggctggggcttccgcctcatcacgctggccaagctcctatcccgggcttccgcctcgtcatgatggccagctcctatcccccaagctcatagtcgcccccatcgagcggctcaaaagccgatgtgttcaggtgtccccgagcttcgcctctccttcgcagaggcgaacgcgcggctccgccgcatcgtcttcgaggtcaactccatctactccacgttgcggtcgcatcgtcctcgatgcatgcgcccttttccccaacgcttgccaccgccaagcttcttgttcgctgccagccttctccccacccatcgccaggtgccgtcgtcgggcttctacctaccaccgccgcccaacaaccaccacccttctccctgctggtcaccggtcaccacacacctctctcgcgattcagcgtctggcgtcctcttcgcttgcatgcacgagcactcatgcagtcagtggtgctcgcgagtatgcttaggcgtcgcaacgtactccatctcccaactcttggagatcctctcgccaatcccgacagtgtggatgacatgcgaccatgatgtggagcaataaagtacctcgtattttaccttcagcttctggctgtctcgcaataccttctacagcttgtcctgcagcagtaccttgaccaactccaggcccaatagaagcaagccctacggccaatccagcagcaattagtggaatgcctagtttgactagttggttcagtagcagaaacaacttatttccccgaaaaagacctagcttcttggacagctcaatccggtgcggcaggaacgaatgaaacgactagtggtcctcggaaccctacccgagcttatattccttgcttcaacgcccgcgccttccgtggaaaagtactagtgcttcttatggagcaagaaaacggatgcgcgcgctaacgctttcgcgctagtgcactcaccccgttgcttgttgggcactgaacacttttcaagatccggttttggtaggacgaagatttttcactttcgtgaaggtcattctgaggtggaatcgaaccactatgttaggatttagagtccaacgcgcaaagctaaagaggatttcaagtcccccgcccgccagaacctaaagattgctttatttttatacgatttattgagttaactaaaaagctggttcgttccatagagaccagacttagaaaaggaagctctgctaaaagctaaatcgctaataagttcaaacatcaaaggtacctgtctacatctacctacccgaagctactaaaacatcatcaacaacaacatcggaaactagatgaataattgaaacaatcgggttgaatggaattatctcgaggctattatgcgcaagcttggtttccaccaggtggaaaaggtgatgaaatgtgtgacgtcggtctctttttcggtgcttttcaatggtggccaactggagaagtttaagccaacgagaggcatccgtcaaggtgaccctatctccccatagtaagccagccaatagtaccctaacttaagaagttctcttagctagcgcatgtccattaatgtgaccaccgcatgctcctgcatgagtttcatgaatggtttgtttttgaatccattcttttttaggtatactatcttgcaagaaaggagctcgcaacaaaacgagagctttttgatagcccgttcactcgactaccacgcttagtaagtctatctgcagggatgggaatggcgtagtctgtctgcccttcttcgtaagcaactggaactatcaaaagtcaatgtcaattggccttctaaaggctatagccctgtttcttttgaaaaaacgaatttcgagtttcgaagaagacatgcctccaagaaagccactccgcctaaagagtcctaattcctatccggtctacattcactattcttcataggcactgcgctgggtcggtaggttgctgttttgacttttttcttcttgctttaatccagtcgctcgataggacttcccgtaacccgaaaaggttggttcttcccctacaacccctacccctccaaggctcatcggcaaatccgaatgtctcgatccgagttgagacccacctacagaaattgatccatcaacggcttttttctatagtggcaggaagtctccaactcttcgatatgcgctagctaggtaatccctttacttaatctgatatgggatctcttgctaccagaaaggaactgaactggcttgcccggaaagaatggattgctacccttggagagctaatggtactggactgatagcgcactgattgaaccgaccccggacgtaccactggggaacctgtggctggagagaatctctcgcgatggaaagaaataaatcgaatctagaaagacacgttctacctatgactgccatttgttcacttttatctatcgtattggatagaattcaagtcccttaccgtattcatctattccctctcctttcagtcgagttgacctcggattctaaagcaacccacgggcataagcaaagaagttatcaagcttttgggatagcaagttatttctagggtaaaggaaaacaagctaacagtctaaggctaagtccctagagttccagttttaatagtcccattcctcctgccttccgccgacctgcggccttatcatagtagcccttctttcttgccagtgagatagttactacgaagtctgcatcgggagaatgggaataacgatcttttatatgatacggaaagcgaagagaatagactgctacatactaagttggttattcgtagatttttaccttcttggaaaataggaatggggattggcagggcatctactatcaactagttacttgggcaccggtgatacaccccaggataccttacctatttagacatttatgcctcgctgcgcgccttcccaacgagccaaaactatgcctaggcctcgggcttaggaactatactacaactagttttgtatagaaaacccagaaatacccatattcctttaaccttcacgaagaagttcgttagctccccctatgtcatactcctaaagaagttgtaataaaatgtgctgatccagatagatcaaatcctgattacgacttcttcattcggtttgtagccataccgtatagagttccaaatgcctttttttggaagtaactagattcaagcaagcatcctagcaaaacgatcttttgacaatgggctctacccaacactaggactgactgactttatacagagatagaaaaggcagcaatccaagctctttttgaatcggatattggataggctaagctaggtgtagcccgctttctctacagttttgctgaacttgtcaagcccggggggcctttagggaattttggagaatgatagattctaggataacactttctaaggttgaaagggatggcatgggttaagcatctgactttggaccttcgagctaagttatttaataaggtcctactaattaattggaaatcctttttacaaatctcctcctcagagcgccctgtaaccttaccttttctgaatggtacaccttatttaagacattcagaatagaagaagagcaatcgtcgattgattgaaagtggattgacggcattcatcagttgattgaaaatgaacttttcttttatgatcgagcgaggtcccttttgggcttaaaagtcctttgagccgtggaatcccttttgtcttgatttaggagaataggcacattgattaggttacgtggtttgagcaatctgcaggaagtttttttttctttattatatataccattcatatttattattctatataccattcatattaaagtaagacggatagggcatatttgactaggaagcaagcaaagctagtccctccataccagcaagcagtcttgtttagggagtctccttctttactgagtaaggttcccgggtgcctatgtgattattaaggcagggtgctactgtaccagtagtagagtggcttgaatcaaatcgtttgtctagagagggtgtagcgataaccaaagttgactgtactagaaactttagatcctgtataggcaactggccttagaatagtgtcttgaactacaggaacgacccataatcattgacgaagaaggcttggaaaaggataaaacatattgaagagaagctttcacaaaggccaatagccgatagctgatgtcactagccttaacttctttatctacttgaaagctgatgagagtacggctttcttaaaggaagtgtccgtccctatgatattatatcatagtaaagagcccttggattcgcctttttccgtaagcctaaaggcaagggaagctcttcgtcgagcttcttatccattgaaaaagacagacttcaactttaagactaaaacctgcccctttattattattagtaagtaagataggttgcttgagccaatccttaaatcgtgggaggaaaaggcaaaaaagtgagcccacccaactaaaggaacggagaaattctgaacttcaataatcgaagagtggtcgtaggtgagcccaccccaggcaaatccacttatcgttatcttgctcctggtcaagctcccgtacccgctcctttccgtgggctttctttctgctttgacttgttccttttcttgctttcaggaagtcgtccttgacgagggccccttgatagccggtcttcattgccaatgagaaagaaaggctcctgcttgtgtgcttagtctagccttgcaagcaacctcttcctaccagaggactaccatataccgatccttgctgttaccgcaaatcgatcaattcgttacttttcatcggaagaagtagcacgcaactcggaaagaaaaacctctgatgctccttttttcttaatgatgcaactaatgtaatgcctagaactgatctattgcaagcccggatattcgattcctaacagaacaactcatgtgtgaagtagatagataagtagagttgctttcgctttgttaacttacgtaaggttgcgtaagatatgtgaatgtagttacgtgagcttgcttgcctcactttcctaatatattgttgacaacacttgcaatagggcgtagtgttgcgctgggtcgtcttgttcggaagctgattgagaaaatatgcaggcacaaattggatgcgtaaaccttggactcatcaaagctatgctatggctatgtactagttgatgagcttgcctccagtacttgatagaagcccatgactctctatctgaaagtggtcttggccgtaagccaataggcgtagttgtagcgaagcggcgtatatcgtagttgttcggatagcaagctacctgacgtgataaggctactagtgccctccactcgtgcctactttcactaacctatagctattgcatgcaagctcaatcttctatctcgcattgctacatgctcgaaacagccaattcgctcgtatagctaacgcaacctatagagtttggggagtgctgctattctttccaaatggtctctgagtgcggtctgtcaattcctgttgtagacatctgaggagagggggaagaagagtagacttactacttttgcaaatcaaagaaagaatttaaacagacatcaatcatctaatctgaattctttgacaattaatagatacctatcatagaaaaacctttctccaaggaagcttgcttcttgttccagatttgatctgatcctaaaataggttactttgctttccgctctatcggaaaacgttctaacgtattgattccgtaattctatttcaaaaaagagtgagactcaatctccttatgccatcccacgctaccgaagtagactcgctccgtctatgtgtcctgaacccgaagatagagaccccagctagacctatttagtttagttgcctcgggtgagctgaactaccagaactagttctttacaactcgtgccccggagccctctatctagaatagctctctctagatttcccagaaatgttaccagaataagttacaactgactatatcttcttttcccagcgacgcgccctcccactaagctctcaaccaatccaaggttaagaaaagaaagaaccaatggaatagttgcgaatagatcagtcaaacctcatcaagtccaggttttgtaggcaggtatccggataggtttatggttggaagagatagacacgaacggatagccttgtatgtatcggtatgaacagtgttcaggtttaggaagagtaatttgaacagaagggctagctgtgcttattctgacaaggctgaacatgagttgctctcaaaggacttgacttctgaaatctctattctacgtttttcaactaatccacacgagaaaatcctatctttcaagctttctctcactaacttcgccaattgtccttcgctccagatggtcaatgtcttcagactagccatcagcccttggcttctgtacccttcaaacgcaaataaataaaaataaagaatttcagcacgcgcatccgttttcttgctcgaaaaaatgattcaatctgactttatcggtattctggattgagtaaaaaagggatatatgaagttcaaggccttgccaaaaccgtcatggccctattatgtataggccgtactaagccaatagtgaataacaaactctttcctgctccctcgaccctaattaactcccatcctgccaagcctcagctgccagcgcattgtatctaagcacactgcggcaaattgatacaagtagctaaagatctcgcatccgacatccccggccgaacggttaggcaacactagggcgcctgggtcccaattccgtttaccaaacaagatgtcgagaggcgaactctgtaattcccccccagcaaaagtgatagcagctgtagcatccgtgtggaagagggtaagctttcggcaacacctttttcagattggaaaggatgaatacttgtgttgggtcctgcagaccaggatagccttagatcaaaacctaaatgtgccaggggttgatcatagaagccagggcaataagtattcaggaatttgagcgcttatgtagctaataactctgccacctgaatacttgattcattaaggtcgtcacccaatacccggaagtctctatcgttttctttgtctgttaagcttcacagggttgggactccctaaatcaaactgcaatcgctgtttatcaaccactcacgacgacaccgagatcttcgacttagctcccacaggtctcggggcggaagataacgaaagggagacaaagtcctaactaaatcaacacacaataacctcaaccttctaccatccatcatatcagtcgagtcgaggagattcgttcttatctatagataaggcaagagagaacttatgacctcgcggatggagagggattcgaacccccggtattcctatcaatacttcggttttcaagaccgactctttcaaccgctcagacatccatccctgcgctcgcccgccctatctatctgcgcgctggcaggtaggggcaattctatgtgattcgctacgcttgcttgcgctccaccccgtaagctaactatattgcctagcggttagcgacacttttccggtagtacgaatcgctacgcttcgcttctttttcaccgtcggttgctgcgctccctgcgggtaatagcaagagagtgaagaacgaacgatcatcagttagcagtgaatgagtccgacttgagttcgtgagtcaaaggcgtggcaagagagcgagttcgactcgcgaacgacctgcaagtgaaggaccgatcctttaacgccagtactgttgcgagactggtacttgggggctcacgagcaacatatagactaaggttgcccatcactcccttgctcctttttgaaggcccaccgctccccctttctttaagcatctatcccggcttgcattttggggcgagtactacagttcctccataatcacacagaacgcctagcttcgtagagctgctctctccccagtccacaacaaggtgtggaatctggatctacagtgtgttctgactctattggatcaagtcagatactaagccttctactactacttaggtacttaggagagaaaatgctatatttcatagattggactctcttactgtgtttttctcagggcagttcccgagccgggttccctggatccattctgacctaattggatgaatgaagaagggggcgagcagatacgacggcctctttttagccgaataaagctggatctactacatagggaaagattaagaaagcaagagcaagcctactctactatcgattcaaaaggtaaactgcccccgaagactttatcaatgaatggatcaaagaaggaggctctatctatgtcatcgtatataataagggaagaagcccgcccctgatcgaagaatgaagaagctagcccgggtagactttaagagctcttgctctgcctatccctatcgctctgccttctttcccctcgcctctgtaaggagtgatttgtttggacaaagccgaccaggaatccaactgaacgacacgagttactctcccgagcctcctctttattcagaaatgaaaccaagccatctgatctaaccttaggaaggcggtatggattgactataactaaccaaagcgagtgagtgggatattgtgatactaagaaaggaagcaaatgtctcatatctggccaacaataccatttacatcagtcggcatgttctctgcgacgaatctacatttccttttcaatctgtgccttaaactactcccactacttactccacttcaacatcttctcatacaactcttccagtcatctcctcagtctctgcttctcctcttaattcctctcgtccacctcctccttccccatgtccttaacactctcaacaaccgacacactctatgaccactcgaaccacagatcgcactatgaaacctcagaaattccctgatttcattgcctactcatctaccctgcatccattgcctccttccaatcaagagactaaaccaacatgttattcaggggctgttaaacatccacagtggcgctctgctatggcttcagagatttcagctcttgcaaataatggcacttgggtactggtaccacctagtcctaactacaatataattggtaggttgtgggtttacaaaaccaaacgcaagtccgactgtacgattgagcggtacaaagcgcgtttagtcgccaaagggactactcaggaggatggtgtttcgtgattcattgaagctactcccagattctttaagttctttaggtcaaagtctctgcccagagctcggcagtaaaggtgaagtagatcatacgtctgtagttatggataatttcgcatctaggaagagggaattggtagagaagcaagacatattgggtggtattatgctgatcaaaatatctattggagtctttacgagctttatattactacaaggatgatgaccttgtcttttctagcgctaaccatctttaggaaggattattatgatgagatgagtacacctatagcaattcctcataggactgctgatgagtttcttcataggggagactatggaggtcatgcggatgtgtataagctgtgagaattttttctattatgacgttcgctctctgtatccgtttataatgaaatcatccccaatgccgataggtgcagctaaatgggatggtaatttacagggagaggaactgtatggctttctcgaggcatatgtggactgtcctgaaacaatgaataagccattccttccatatcgatcataaaaaagactggattgcttattttccccggtttatcggagtttactattcagagaaacttcaatatgctgatatatttggatataaagtcagacctctttgtggctatctctatgataagggtgatggtttattcgataaccacatggccccttttccctttaacgcaactaggtaacaatacctcgctacctgttgctgtcctttttaaacccgtgggaaacttcatcatcaagtgaggtggaaactacagcttcgattgcattcagccttcctcgtcctaatattgcatgataggccggcgtccaccaccattgacggtcgctatggccacattcggagacttccaaaactgaactggaagatggtacccaaagcttataaggtttaaccggtaaagcttatgagagaagttcgaacctgggacaagattttatcatctcgttcgagaacttctttatgcaagaaatgggctacccgtgtcgaccagtaccctttttactcggtgcagtacccactcggagaacgtgagagtatattcccccgccctcttctagactttatacacttgtaaaaatatgtcatgcgccactggcgccttctctgcttgcttttgtctccctacggtgtttacatacacttcccaccatgtggcatgccattgactcacttttaggacatatttgtacatcttttgtctctatcctagtcaactggtacgcatggcgtaaataaagatgacccgaccacccctgttcaccttcctcaaacccaattcaaatgatggctgtgaaagtcagaatccttcctacctaggaaactctcatcagaatcattgatggtattaactgacggctgtgtggaaggactactatctcgtacataactctgtgtacactccgtgttgataatttgagacctaatggacacatcatacataagaacccgttgtcgagattccatcaatatcttgcttggcagcttcata

SEQ ID NO: 5314 - DNA, 14555 bp, Oryza sativa
aacatattttatgtaattgatacttatgaattttgagcctaaaaattgagattgcatggttttatgagagaagaaagaagagactatgtgtaccatagatctatcatccaaaggctagaaataattgtgatgtggcttcatgagagaagagagaaatagcattaactacacttagtggggatgaactataagtatataggattaggatgatccaaactatgatgtgataatatcttggtttttgggttaagggtggttgagccttatattttggaatgtagggaataatttataatattgaccaaccatcccaaattgtcttattggtttacatgatggtttttatggaatacagaaagctccagtaaaatataagaaaatgtggatgatttacatgatactacttttggtttcaaaaaagaaacaacttgtgtttcttagttttcattaagtcaaatcttacatagatattgcagcctacagagtaatagtcatgaaggactttttgtctattggatccaaccataaaacctatctaattttattatgtcactgtgggatgcatcctgccattagcttctgttcctatagttcaaggtaaggtctaaaggagccaggtgtctatacccttagttagcactatgaattcccgtagtctctcgagaaaacaatgtgctgaagattaaggttaggtcttacagacacttcacacaaatgaaaattgtgtgttactaaagcagcaagtgcaacagcaccatttaatcaaagctttcactctttcagcatatatcagctataacatttcacattatcatagtgcaatgcagaaactagaaaggcggtagaagtacattggaaagaaaaaaactacatgcctcaaagtttgaagaaaccgttggagtagaagccaaactacttttcagagcatctgaatcagcagagctaattaatgatttagtaaaatccctgtaaaataagaaggtgtttcagatagcagtgcttgcatgtaggtgtgcgcacacatgtctgtacagcaacctgcacaaacacataatctgtccgaaaaataatctaggacagcacagagcttagtataaaaaaaataattgatatgcagttgaatgttgaacaaggaactggcacctttcatttgtaagttggaggattggataaaatggcccagcaagcagagccaaaaagtgtacactgctgtctggagtgtctgtgacactagcgaggtcagcctgcactcagatagacagcggcgattaaagggaaacaacaaaggcacaacataccatacatggacatggggagatgcatgctagtcggaaagcttacctcaatctggggcagaaatggtggtagcctgcttgcaatgtctttgagtaactaatatcaaaaaaattgcatgattagaagaaacttatatgttgccaagacacagacagaagtaagaagaagaagaagaaacaaacctggaggtggatattttgagaggattgtttgtgtgcagtgatatgtggcaataggtagttgactagaggctggaggtcaggttccagtccaggtatagggattccaatgagctgaagaagaagagtgacttattactcggaatatatccggaggaagagtaaaagttatactagtagttactcctacctggatgaagaagatggcgatagggttgccgcgcatacaagagatgcggacgtagcggcaaggggtgtggttggcaggatagagtatgtcgcgcttgggagcctcgcagcgcgggcgaaccttgacgaaggtatctggcttgttgtagcgcaggccggcagtgatctcccactcgaggacggacttgttgtagatgcggatgtgggagaggaggcacggctcctgcagcagcaaattcagcaattcattcagggctagagaaggagactcctagttagagagggggaagaaacaacaagtcgctagtacgcacgctgagctcgagcaggatccactccttggtgttggtggcggtggaccagtgggagcgcaggtctggctacagcacattggccgccttctgcgccgccggctcgcacgaagacgccttcacccggaaacccagcaccccgacaccatctccccactccgacgatgcctccctctccggttccatcgcgcagcgcagcccagccggcctcctcctgcggctgcccacacagaggtagaggtagagaggaggaggaggaaggggagagtccgagtcctagtcctagtccgaggaggaggagggttgaagacgacgacggcccacacagataagagtcgagtcgatatcggatgggccttgggccttacttcctacactacgggcccctttgaatcgtaggattgaaaaaacggaggaataggaaaaacacaggattttggtaggaatgcaagtgtaaaaacagaggattgcaaaacacaggaaaaatataggaatgaccgtttgattagaccacaggaaaaatgcaggaattagatgagagagatagactctgggaaagttttccaagaggttagagtggatgttaaatttcctacgtttttgctctagaattgtaggaatagaaaagtttcctacatttttccttttctcattcctacgaatcaaaggcatgaatagtgtaggatttcaattcctttgtttttcctccattttccctccaattcaaagggggcctacattttttagcccacaccacacatttcgccccgccgcagacggcagaccacaccttacaacttcttcttcagttgccttccttttggatcctctcctctcctcctctcccgcaggcgcaaggtgtttgatgaaacgcctccatgcatgcatgtacacgagctgtgtgtctacatctctgtctcctttaatttcaatctcaccaacctggttgttaactgtgagtctgaaattctgcaggaagcagtttgttcattcaaaaataggttcaagaattagatactgtagtttcatctatctagatctggactagatatatacaccctgtcacactgaagccggcctgatcgaactcactggtttgtgtgccttcacactgcaatcctaaagggtcttcgccattcacactcctgcacactgctcttcgtatggtgcatatatattatctgctgactcgatccattgtcgcgtgcctatctctaagtgtggtactttctctaacctgcaaatatattgcattctagctagcctttctgcctgaaaatatatattgtattaactgattcaagtactgattgcattgactgcacctttttgggatagtttaacagtgtagcatggacttgattggggttatattaggtgcatgtgtgtgtatacaccaatacaccatggtatcgtacataccatggtcgcattcgtacggtgtctcctgtggactttgttgagtacccaccttgcttacagatggacctataagttccatagcttgcattgactgcacctttcttgacttacaagcacaaaggctcatttttttaagacatcatccctagattaaattaaaactttacatgaagcttgaaaacatagccaacgtgcttctgttttttttttacttttattttcgctcccaattcattgattttgtcaaaagcagattaattcatctcttggtgaatcctttcaaaaaaattcatctcttggtgaacaaagaatcattatataccatttccattatctaaaaaaccaaagaattatcaagtttaattactgaactgatatagagttctagacttcttttgagacagctgtgcttttcaaattgcagatcatgtactctaatccacacacaaaataatctgttagctcttttttttttgaacgaaaaacagtactatagtgccttttcattgaatagagcaggagaaaatacaacccctaggggcaaaagaaaaaaaaatctggagcctgcagctatacactatacaaagtgcgggattaactcgcgcagccgctttacccccgctaaagcccaaaggttagcttattctttgattctcgacatgaggaaacttgttgccacctctttgtggtcaaagattcgccgatttctctctttccatatttctcatacaactagcattatgagtgatcggagcccttttttcggagcatttggcatgtttgcaaggttctcccaccactgttgcactgacagtgcctcctcccattgagccggctcaatctgctggtagccgacccgtccagcaacgaggccctatatccttttagtgtatctacaagtggcaatgagatgcagcgccgtctcagcctcgcagtggcagaggacaaacacccattgttttgccatccccttgtcgcaagtcgatctgaagtccatactctattttgaatgatgagccaagcatgaaatttgcatttccccggcgcccaggctttccagattaaggagttgaaacttgtgctcggtgttccttgacattgcgcatggtaggccgaggaggtcgtgtagcgtccgctacttgtgaatttccaagtaatttggtccggttctccaatgcctaagtggacattccggaccgcttcccacagggcaaccagttgtcaactagttctactataataggcgagtgtgattctagagccaggtcctgaacccaggcgtcctcctcctttccatttcgaagagacctccctctgtttttagagatcgcatagaccagtggcatgaggtctttgggtctttgtccctcgatccaggcggaatcccataagcgcgtcatgttcccatctccaattgttatctttgttgaggcggcgaaaagactcctgtcaatttcatcgcagggcgtttccagtcccacccaaggcttggtcggatccttccactcgtgccataaccatcgcagcctcaagaccctcgtgaatttctctagatctaggactcccaatcctccctgactggttggcaagcacgtctttttccaattgactttacattttcctccggtgatatctcccgttccggcctagagaaagcgacggcgctgcttgtctatttgctcaagggattccttcgtggttttcaaggcagtcaggagatagataggttgtgccgtaagcatagatttgacaagcgtggttcttctagctgctgccatgttcttccctgtccagtttgttatccttcctgagattttgtcaaagataggttgcaaatccgcctttcgtaatctacccagtaccaaggggaggcccaagtactttatggggaagtttgctcttatcgccggaacgccctcaagaacctccgtcaactcaatggtgtcacatctgatggccgccacttgggatttttgaaggttggtgacgagtcctatggcaatgccaaagcgatgtaggatgtctgcaaaagccgtgacatcgcctcgagtggggttaatgaagatgactgcgtcgtccgcatacatcgaggtcctcagacgggtcgttctccctcacaacttcgagattgcaccgagctctgttgcctttgagaggattcgttgcagggagtcaattgcaagtatgaatatcagtggtgaaagggggtccccttgtctaaggcctctgccatgcttaattcgctgccctggcgaaccattgaggagtacttgcgaagttgacgttgagaaaatagcccccaaccaatctctccatcttgttgggaaacccctttgctatagcaaggcaagaaggtagtcccagcgaatggaatcgaaggccttagttatgtctagcttgaatagcagcattgctcgcttcaagcggtggtatcttctagccttgtttcttacgaaaaggaagttgccatgaatgcttcttccttttatgaaggcactttgattgaccgaaatcaacgtatgcatgtgtggccttagccgcagcgcaagcatcttggagaagatcttggcgataccgtgaatgaggctaattggcctgtagtccgcgaccccctcagccccttctttcttaggtattaggacgatgttcgcggagttgagcagatttagatgtgcacatatgagattatagattgagtctaagactagaagaatgtcttctttgatgatttcccagcagactttgaagaagatcccagtgaagccatctggccttggggctttgtcggtgggcatctccttaatggccctatgcactagggctgtcaacgagccgagctcgagcgagctcgtcagcctaggctcgagctcgatacaagctcgagccgagctcgagccgagcctataaaatgttcgagctttccgacaggctcggctcgagctcgattaccgagcttgatttttaagtaaaatatatatatatttcaaagataatctttaaaaaaataattaatttctagtttatcatactaatagaagaggaaaaaagaataaaataaatatattatgtcaatataagacatacaaataacatatttgatctcctaagttattaagtaacaataaaaatgatatattactaggctcgttagaagctcgagctcggctcgacaaagctcgcgagcttagggagaggctcggctcggctcgtctggagctcgagccgagctcgaatcgagcctaggacgagccgagctcgagcagctcgcgagcctcgagcttttttgacagccctactatgcacctcttgctccgagaagggctccccttttagttttctttggcttacaatttgatattatcagatgtagtgtcactgaaaagtatgccaaagcaagtgctgctggttgtgcatggtggtagtgtactgatgtgcctcagaaaaacagtgcttcgtcatgcttgttagggcaatttgattgcacatggtaatagtattgttttttattgaataatggtaatagtattgttactcgttatatactcttccttcatcgatcgtgatttgcaaaagcaaaacccacagccaactcttgttaatttgaggaacatataccaacaacaatatcttactcctgtaaacattcaattaaaataaatatatagccgttcctattgttacaatcgtagaaacaagctatggctaatacaaatgaacacgctatatagtagtataaaagtaacttacagttgtccattctaaaaaaaaaaagtaataacttacagctgcctcttggtggtattaattaattggtcccctagtaactgtaaaaaataattgtgtgataactggcagagagtaggaagtattggatcctatattggagtattgctcattttatttaatttaatcattatacgaatgttcttgtatcagagtgtgaagtctagtgggagggtgaagtgccttaggttgagcaatggcttgaaatcgttgagcagatttacattgtgatccctccaggttcgattaaggtgaggctatcaagttattgatttatttttttcaatgctgggtgttctttcctgaccaaagctttttctggcagatgaggaccttctccttgtctgccttgtattcggtatcatgcttgtcacagttccatctcattcctttgacaatgatggctacagaatccagaaagtaggcgttctcgcggattatggcataaccagtgggacgaaggatacggtccatctcaagaagtacaaacttcatctcgcacctgcaattgcaacgtacggtaagtacgtgttaattgtaactggatggagtatttcttacttgctttcttgtgaatttgaagttagaaatgctgatttgcaagtgtacgtacctatgagactctgcagtaaacaagccatcaagatgcaatagatcgtacgtcctggggtatgtagagaatgcctcacacctacagtagagttgattggaaggacaatgagtagttgaataattaagctatgatatagtagaagaatgaattaaatgcaaatagtcaccagtcgtggttggtgccgatgaggcctctgtcgaagacgacgccgagggagttgggtccgtaggaggagacgacgttcatgacccagacggggtccttgatgaggctggcggcgaagcctccgtagacggtgttcatgtccatcacgttcctgatcttgtcgctccccagcgccgggagcagagccttgtagtgcttggtccggagcttccacttgccatcgtcgtgcttgaaggcggcggcactgctcccggggacggtggcgatgcgctctggggcgacggccaggcgctgcggccacttgggggtggcgtcgagcgccagcttcttgtagcgcgaggaagtggaagaaggcgaggtgaggcaggagcgcatgggcacgtaccaggcggcgtccgggtcgacgctgtcgtcgcacttgggcggcgaggagacgggcgtgagcttgtcgtagcaggcagggtcggtggacttctgccacacggccgtcgcgacagccacagcttactagtaatatgccaaatggtttataaccctatggatataagcgttggctaaaccttcgagcgttagtaatatgccatgactacaggtattgctccacacttgctacagtcactgctctttttttcccttcttttatatctgaaagccaccgaaataagccggaaacaaaccagataatatttgcattcctcggggatataaagaactaaaattcacaaccaattttcagacaaatgatttttcagtttttctctaaggtccttctctgttaatgcataccaacaaaatgcatacttcctatagcaaacaagaacaggccgatgaacatataaaaaacaatacatttcgagctgcatcgtatatttttacacagagaaaagaggaaggaagattaaaaaagataagggccaaaaaaacaaccccacgtatatattgtttgaagcaccattcgagatagaaattgaatctgttactatgctcgaggtaaatatataatatacacggtgcaagtaagagtatattatgtttttctaccggaatccattttgtcatgcattctgtaagaccccaacgatccccacgcatgcaagagacaaggttgcactaaaacctaaactcaatttattcatccaaaaccacgatctgaaaccatacatacatccctagtaaatctgaaaccatacataagatgccactggtgccggtcctcagtaccgatcttcctcatcatcgctacatgaagagaaaagtatgtatattccctccacatctaaactgagtataagggttgttaattagaaaaaggtgatctcagtcatagaagtaaaaggatggctcagattaggtgaaattcacccaggaaaaaggatgtctctatgatgtacagatgctcatcatgttaacacttcactgaccgtaacatgtcaatcatgaattccgtgttgtcatctgaagaagcctaaaagagataaggtcttttaaaatggtaaaaagaacaataattgagagagtgaaggctagagtagacgctacacaccattttggaaaatgataactgatgttccaaacaaagttgcctcgcaatttccttaaaagcaaagtaacagaagcattagcatggctgcattggagttgataaagcatagaaacaactatggagttaactgaattggtggacaggagttaagagagagggagatctggttcagagagcatgtggaatacagaaattgaaccaaaaaagctggcatcagaaagctctaaccttcgtggcacagttgtcatcactatgtagcatcccattcagcctgatctgaaaaaagtttgcacaatgatccaactggactacaagttaacaaagtctaactaattgtgcattatgatatattgtccttttggctaggccatgcatttgagaatataaaaatatgaaaggaatttctacatttagccttgtccccttccgccctaaagcgccctgaaacaaactattttctcgtaacctgtgtttatttcacggccaacgtaggtaaatcattggtcgtgtattacgcaaatacatggatacatttctagcaacaagtaaagtcaggatattgcattaggatgctccttcttcagatcgtctagaaccatgtcgacccctgcgaagaattgaaatatcagtccaggccaaaacaacagatagcataaagtcgtagaccgcccactggcacatttcgtcgaacaccacccctgcattccagaaaactgctgaaaggggaagcagaaggaaaacctcacagccgcaggggccgaggagcaggacggagttgttgcaggcctcggagacggagctggcgacgaggtacttcagcttactgtgcccaacccagaacaaagcgcgtcaatcatgagggaggcgtctcgcgacgcggtcggcaggagggactgggcgccggctgcgcggtcagcggcgaggggcggcgccgccgtcgctggaggggggcacgagcgtcggaggcatatcgcgagttcgcgacgcggtcggtggggaggggagccgtcgcgctggtggcgaaacggaagggtggcagcaggggagagaggaggaggcgattagggtttgccggggggagtgcggcggcgcttgtggtggcaggggatgcgacggcgctgtaggttgggagagggaggcggagcgatttaggttggggaaggagagcgcgttgaagatggcaggaggagcgatctgagcggcgtgattttcggttgaggggagttggggaaatgcgcgcggaggttgagggggtacgtggaacgattctgtggcgttggattggatgattctcgtccgtagtatttgatgaatgagtatgtaggtgtaagaatgagttggtgaattatagggtagactagtaatttgcccgtgctaacgctacggttgcaatagtcaacccggcggcacaacgctactatagctgcacgcttgcctccatggagaaaataccctcaaattttcaatgcaaacgtaagcagcaataccaatatcaatatgtcatgtctcattgtattcacaaagtctcttttatataaaaaataattattttcgtgaatgcctttgaattttcaaatgtcttttgagttttggtagataatccagaaaagaaatgcattgctttctttcttaacaattgcatctacgaacttaacaaaaccagaggcatatttcaaggtcgcgtgcataccatccaccatgctcttcaggtgcttgggtttcgccacacaaacattatggtgcttacatgctgttaactttcctttcgatccgatggcatgaaaaattcagcaccagtaatcggtggtaaacagcagtcacaccggcacaagacaggcaagatgaaactcaaaacaatcgccatcctcaatattaattaatttgttcatttccattctgcttgcattacaccataatatggaacaaaatgaacagaaaagtcattggtcagacactcagacctatagtacaattgttgcactcaagaaaacgcctaaaactgctaaccaattaaataagaagaataaaatataacgaactgaaattctacccgggagcgctgatgccttcatgccgctggttttcagacttcatgatgttaagggagcagaaggaaacatagagtagccttgtctgatctataaactgagtgctttggtactttttaattagggctgaaaacgatgcctataaatgtgagttgtgacccaagatatgagatatatagaaaaatattaatacctgaagacgccaactattggaagacccttttgcattgcaatgtcacgtctcattagtaagacagctcgagcaccatcacttacttggctagcgtttcctatgggttaaaacaaacactaatcttgagaggtgaatacaactaatcaacagttgtgcctaacaaactttcattacacattaccagcagtaggggtgccatctttagagaatgcatgtttgagttttgactggactgccaatgaagtgcctggtctagatatattgactcaggactaaagtgtcttcaaatattctcagtaatacgcccagccttcaaattcagtagttttatttatggtgtaacatatatgctaggagtaaaatttttcatggttaaatgcatggtaattgtaatgttaagttggagtggcaatgttgagatcagccaaatggggaaaatgaacatcagtacccttcattggccatttgacattgagaagaatatgtgcaaaatatctggtcatatcaatcacacaaggaaaacagaaataccatatactgctacagtggtcagtcattatatttgtgttagatgtatttttcactaaataactaaatattgcatcttagagatactgcttttgctattgatccgaccactattttgttaatttcattgcattttaggcatggtatctcaattagcagaaaaagaaagatgttataacgcatcaatgagatcttctagagatgatatgatttttaattttgtactgatcatcatcaacatataaaatatattccccatcagttaaaattttccagactgctctattgatagaaccgcttagcaatttttaaatggtacgatacatagcttgcgtacgtagttcatgcacaggtaagtccaggcaatatcaatcaaatgcgcacaggaccaaatcaaggaaatactaagccaaacatcatggtaaaggagccaagaataccttgagctagcaaggtccgagcttcccttcgtgcatccctggcggtggacagtaagccgaggtggacaggtgaaaaaacagccaggagtcccacaggtcaggtgacctctgaaggagacaagggatatgttgattgtttctattattcatatgacaaatgttgaaaaaattcactcaaaggtaatattctaaatttggaggtaccgatgcaagaaaaaccactacttatgtggcataaaataaatttgtagaagctagaaggttaatttcagagcgaacaagatccgttcttgtaaacttgtactgatgcagtgatataaactctacgtccaatcaataatttaagtaacatgatggagaccatgtagatatcactcaaaatacaagacaagtatttcacaatagacaatcatatgcagacattcacgcacgacccaatcatccttttctaactttgcacaacgatagaagaaatgaaaggttttaagccatgataaataatcaaagctgtagaagcttccgttcaatgaagcatccatgtaactcaaaattatttatcatggagctaattagatagatgcatagaaggacagtaaacaagacttaagaaatgatgacatgtcattgcccaatgccctagacaggtctatgcaccttgttagcattttactaaacacatgcttgtattcataagggtactataagtataagtatatacattcatatgggtactataagatgtaatttaaggcatatatgtacattttcataatatatttaagaactccaaggcaagcattccatcaagcaggtcacaagcagtggcgcgtaaagccagttcccgtgtgttggccgggatgataatctattattctattgttcatcatgcctaaagcacaagggatgaagcaagcacaaaaggctaacattgtgctaagtactttacttatgttggtaattgcaagagatgagtagctatttaatgtgtagccatcctcaattagtgcacagattactcatgatgcaccaaaagttcagaaattcagagattactcatgatgcaccacaaattcaaagattactcatggtgcactaaaaattcagaaatggtcgtgagtttgaatgcatttgtgcataccgggtcagcaagccagtgcatccggggcacgaagcccaccatggcagagagcgcactctgccacacggcgaaggcggcgtcggtggtgagcccctggatgggcctgaacctgttgttgaggctgtcctccgcgttgatcgcgaaccgcacccgcgagcaattggtggagggagcaagggggggcgggcgctcaccgtggcgaggcggcggagaggtcagggcggtggagggtgagggcgagggcgaagatggtggtgatggcggcgacggcgagcaggcaggcggtgaatctgccggggggcgacgtgtggtgggtggcggagggggaggtacccgcagcggccggagccgtaccacctcctgtcagcaagttccagccgtggcgtcgcccgcgtctcccgtcggccgtctcccccgccaaacgccgccgtcctcacgccacctgccgccgtcgcccgctccgtcagctcaccggtcagttccggtgatgacgggccggatccagccacggaagggccagatccggcggcggcggatccgcagccacgcgccgcgaggccttcgcggcgcgctgtgccgcctccttgcgccggagacgagccgccgtcgggggttttggccccgccgccgccatcccagcgtccgcgtggtttccggcggcggcgaggcggtgagaggaggggtgggtggcggcggccgggggctag

SEQ ID NO: 5315 - DNA, 4315 bp, Oryza sativa
gtcttcaacacctcgaaattctgaaaaacaattctatattgacatttgccaacatgtcaatttaaggtttacacaaacacatgattttctacgtaaagtggcacacggattaaataaataaccaggaaaattcatagtagtttggagtatgtttcctagaatgatttacaataaaaatcggttgacaacttatttttcttaaaacccatccaacaacgggttagagaaccttcatgcaccagaattttggcattatcatcaccaactttaaatacagaagcaacttgtcacgtagactcttgacaagttcacttgagtcggcatcaattttgggtcatgttttaggatcaattctgaacatcagatcagaggtgtactttccagttgaaattctacagtaacagaagttgtctgcactacactggaaacaccattgctactgctgtagtgatttactacaattaactgtagcacaagactcatttcagtattgatgcacctctgcagtaaggatcagtttccgttgacactgcttcctctttttttccctcaaaaacgcatgagagcattgctcccatttttatcaaggtaataagctgcatatggtgtcacttcagctaacaagaccaacctttgcagatcaaccagtccaattaatcaggaaatgggccatgctaacattgaggtccaaaaaaatctcatatgactgcctgctacatcatctcaatggctaatgatcatattgttctgctaacactacagatataaattaagtgaaaagattcaggactgaattttacagctgcagaggggcacttgtatgtcttaccagccagggtcagatgcctcccagctgccatcccatggataactgctagaaaataaaatgtacaactctgattccttatccgtttgtgctacaaatagatgtcaagtcaaaggagtaaaattataaacacataaccatggaaaaatcaggggaaaacacagcagtccaacaggaaaaaaaaaatgagtttaactacagccctcagaacaaacaatggcacaagatatgatggaaatatagaggcaacacatggtcttcaggagaagttaagtgcagttcaacccagggtataaatgatccacatatttctcataatataaaaactaaacaggaataacatagctcctgaagaaaacgatttcagaatttcaggctatctgaacagtataggatatagtaaaatctcatagatcaccaaaaaatccaaataaagcaatagcagatgttctcatggatagtggtaatcttggacaaaattgaagatcattacagcatgactccaagcatatatacacaaagagacatgcacagaacacagaagatccaggatattatattctaactcagaacacacatagtttgtctaactaaagaaagcatcaacggattagatagacacactagtgggaggtttctgatgtcaaagggtggttcactgaactttacaatctgcaatcaactgtagaacgaaattgctagaattaatctcttctacatttgaacatacctggcatcaagtgtgacatgtgcagtagtatagcccttcatggaatccaaatagaaaaacactaaaaaggggaagagcttagacatagtcaatcaagaggacaaggccattggattgtgaatgtgattcatccatgcaaacaagatttgctatggtcagtactcagtaaacactaaacaatatggaaataatgtaggctaagcaagttgttaacattgtgaagacgtgtgacatccaaaacctgaaaaatcatgatggatttaaggcaacaggaatatatgctgtacagataatctgacagcatgctttatgaacattcgaaatacaacatcaccagtggcggattcactgttggggctggttggtgtgccagccccacctctaatccctgctcttaattagttattaacaaatctaattagtcattagtgaagaaatttcccgaatagcacaggctaccttagttcttctactgcccaaactgataaaacagaacatcctccaagtataaataacaatatattcacatatatttgtgaatattttaatatagccacaaatcaaaatagagagtttttttttatcatatgcacatttggttttcattggaaaatactttagttgatatacctttatttgttttaatcatactccctccatccctaaatatttatgccgttgacttttttaaatatatttgaccgttcgtcttattaaaaattttaagtaattattaattcttttcctatcatttgattcattgttaaatatacttttatgtatacatatagttttatatgtttcacaaaagttttcaataagatgaacggtcaaacatgtttaaaaaagtcaacggcgtcaaatatttagggacggagggagtataatattttttacactagcacctcctcaatttacaccctggattcgccactgaacatcactgaaactatagtcttatgttatgtccaaagcattttgtggattcaacaaacatcacatttgtgaggcatctagtcaaatattttttaaaacttcaaaatcatgtgcatagaaaatatgagttttcagatactgacagttgctgaaaggagaagcactctaatcaagaataaatttaacaatcagtctagcgctggcaaggggacaaagaaaacggaatccatgcgaggatagtaatgggactgggttcgcccagggagatggctagagagtaggcagaattttctgggagcaaagtcattaaaaagactttgttaaacgcattaaattgatggacttctgatcaaatcacgaatggccatgatgtcctgtatcatctagcaatcatatatcagaaaattttaaattgatgcctttaaagcacaaattatttgttttggggagacttggaggtaaggatccaacttcaaatatgaggtgtttgatcaaatcaagcgctagctaggactacttgtatcaacgctccatgtatagccaaactgatgctggtgctgttataataaagtatagatacacatctaaattttggtcaaaaaattggaatatccatgatggcatgatgttcatgttgctaatatccttttctaactttgcacaacgatagaagaaatgaaaggttttaagccatgataaataatcaaagctgtagaagcttctgttcaatgaagcatccatgtaactcaaaattatttatcatggagctaattagatagatgcatagaaggacagtaaacaagacttaagaaatgatgacatgtcattgcccaatgccctagacaggtctatgcaccttgttagcattttactaaacacatgcttgtattcatatgggtactataagtataagtatatacattcatatgggtactataagatgtaatttaaggcatatatgtacattttgataatatatttaagaactccaaggcaagcattccatcaagcaggtcacaagcagtggcgacgtaaagccagttcccgtgtgttggccgggatgataatctattattctattgttcatcatgcctaaagcacaagggatgaagcaagcacaaaaggctaacattgtgctaagtactttacttatgttggtaattgcaagagatgagtagctatttaatgtgtagccatcctcaattagtgcacagattactcatgatgcaccaaaagttcagaaattcagagattactcatgatgcaccacaaattcaaagattactcatggtgcactaaaaattcagaaatggtcgtgtgtttgagtgcatttgtgcataccgggtcagtaagccagtgcatccggggcacgaagcccaccatggcagagagcgcactctgccacacggcgaaggcaaaccgcagcgtggagcacggcacgatgaggtcgtcgtcaacggagaagacggcgtcggtggtgagcccctggatgggcctgaacctgttgttgaggctgtcctccgcgttgatcgcgaaccgcacccgtgagcaattggtggagggagcaagggggggcgggcgctcaccgtggcgaggcggcggagaggtcagggcggtggagggtgagggcgagggcgaagatggtggtgatggcggcgacggcgagcaggcaggcggtgaatctgccggggggcgacgtgtggtgggtggcggagggggaggtacccgcagcggccggagccgtaccacctcctgtcagcaagttccagccgcggcgtcccccgcgtctcccgtcggctgtctcccccgccaaacgccgccgt

SEQ ID NO: 5316 - DNA, 11601 bp, Oryza sativa
gccctacagatagagcccgtcacaggtgagtttgcctagagcaattttattttattttatttcacttagttcttttattttccttaacatattttcacatacactacatatttttttatacttaattattttatttcactaacagtagtaattgcacttcattattatactactttaattattttatttccaatgcttatacttgcttaattattttatttcacttctagtgggtgcttcacttaattattttatttgactatttcataagcaatatactattgatcattgcgaacatattagagtcatacagataacagacatgtagacataaactacgtacataaattacaaaaataatccttcctcatggtcgacacgtgcatattgaacttcatcttcttcttcctcctcttctagaggtatttcttgacctatgccgtggacgtgctggttgtaatcatcctcgtctgcaatgttgtccaatccaacaattctccttttcccttcacgaacaacatgtagtttcttgttacacgggtcaactatgtagaacacttgaacaacttgtttggcgagaacgaacggttcatcattgtacgcgttgttagccaagttgacagtggtgaaaccttcattgtcaacttttacattgcgaagatcgacccatcgacaacgaaacaacgggactttgaacttcaagtaatctagctccaatatttgctcaactttaccatagtattgatcacgacgaccaccgtcactagcagcctcgatgcgtaacccactgttctgcactgtgcatttgctgtcttgctttaccgtgtgaaagatgtatccatttatgtcatatccttgccaggtggtggcactccattcaggaccctgtgacaaccactaaagtgtttcactagacaacttaagctttctggccaaatggtacttcaagtagcactaccgtaccacacactaacaatactagccgtcaacccgtgcgttgcacgtgctctatctatataatataaataagtatggaagttttaatcagatgccgaaacgttgattatttatttttcaaaatatttctaaaaggcaattagcaggattgcccctacaactttaccttatttggatttttgattttcccacacaactctttaatagatagatagataataataaaaatatcaagtaatttaattatcttattgagaataattaaatttttttattagaacaataaaatcttagcccacgttgaacttcgtgtgtggcaggcaatgcttgcagtgcaagatttttgtaattattgaattgctaaagaagtcacccttttgattatctatttaaattagtaatacaaaggtttactggtgtcgtaattttagattttttttgattaagtaaattcaaactgtagaattaatcaatgcaaaagtactggggcatcaactgttctttgggtatataatctataatttcaaattttgaaaataataagtatcatgatgtacttgtctaaatatctattttgtacgtattttttttgttaatgtaatagttgtcaaaatttagaaaaaaactatattagtgagtcataactaatgtgacccatagttaacatgattatgttggtcgccaacctgtgcatcacatgtgctattatataattattataaatattaaaaagttaatatgctaaatgttacttttctaattatatctatttaaaccaaaaagggtccacatcaaggactgcatacaaattattaattttaaacttctgaattaaactaataaaatattataaaacaggagtcaacttcatatttatccattcaaattttggaattagcattttttaagaaaaaactgaaactaaagagtgtatgatatttattaattcaaattttggaatttttaggaaaaaaactgaaactaaggagtggatgatatttatgtaatattctattgctcaagaatatttcaattgaaacataatctgttgtgttttacttgaaattatacttacaatgaatagattaacaaaaactaattaatacaaccgagagttaaaatactaagttatttataattcatgcaaaatcttaaatcgagaattgatatttattaatatatgcatgtttgtaaataatgaaatctaattgaaactgcaatgaagttgtttttatatttgcatcatatgtgcaacaaagttgttctattttgtggatcaatacctaaattttatagtatcagacgttatgatggtgtggttgagttctgatctcatttcagatgagaaacatgtaaataaaacaaccaagatgaaaaaaaaagatcaactcaaaatctggatggagaaaatagtctgaacctacagagtctgaggttgtgtgtatccaattgacgtcgtcagttaagcagtgtatgcacacgccggcacgctgctgatcttcatgtgcaagacgaaggaggtcgatgtggcctccatcatgccgtactccagcgttgtgaagagtaggttattggctttgtctctgagtaatctgcgggcaaagattgatgaaaagtaaaatcgtaattacctgtggatgacacaatggatataagatcctcatagttaaaaattgccccataacatagattagttaaatttaataatatcttgaaaattgaacgtgaaccatatatatatgtcggtccaacgattaaattgcatcttgtctggcaaataaaattagtaatgaaataaccaagcaaaatggttgaagcgtagccaatcttttggaatgatacaaaaggagcagtacatcgtaaaaggtgtgggaaaaaaaagaactaaccttaaatgaatctgcatgatatgcatgataaagatagctataacaattatagtcattaaacttttgctctaagaaacatagcaaagtaattagcttggctaaaaacaataatatgtaactcaaagataaacatttgcatgtaccattgtttactggaaagtaatttgcaagtagcaaagtaattagctttcagttgaatctgatgcagatgccattgtcttgctgattggttacctctgcagatctatttaatatatacgtacgaaaaataatgatatatttgtaattaccggcacatgatgttcaaagagcagcttttctatttccatcactgttattttggctgcaagaagcaagatcatgttatcggtcaaatttgtgtacgcaaatataccgtgtggccacttgaaccaagcaatccgtattatgaattagtaacggcagaaaataaaatcaaacagtgcaagcagttatataatcccctctcctgttgtgctttctcttcataattgttctctctccttattgaggatctgcctgctcctgcagcagcgctgcatatatacacgcatgcgcttcttgttaaacacagataaagacggttagggaaataaaattagcattactttttacctaattttgaagcagaaagattgaagggcgatgtccatctcctcgcgtggaacgaagttgtcagtattctgggtttgatcggattaacgttgatggccagccggcgaatgcatctgcctggtttacgctctcgtcgttcccatctacgttccgctcgtataattgactggctattggagatgggatcgatggggtaggctactacggagagatatgatacagtgcgttacatgtaccgcaaggtggaagggctttaacgtgggccataacattaagtgtagagattggattttagatcaacggttacaatggtacgatatatctaaacaacggctagatctttctggttaacgtgagacctcgtagaaagtgcccaattagtataggtatagataattaagcttcctgatcacccaaattcacatctgactaaactgtctttcatctctagttggtgatttccttttcttttttcttgtaccatatcaccagctgtccatgcctcgcgggcgttggaggagcagcaagcaagaagaagtctggccgtgttctgtatgcatataactcagctgaatcattcaagtaaattgcatggagggagttgccatggatcagcatctctgtgttgcaagttgtaaacatctccggaaccttcgtgctcaaatttatcgatgttcgatatatacgttggtttcattaattggtatagtgggtatgttgaaattcaatggaactatcaactatggttgattatcaaccatgcaccgcaaatattataatgttgacctctctaagagcatccccagcgctcatccaaatatcatcctccatatacccatatggatggccatccaaaaaatattcctcattcatatctcttcccactctaacagatcatccatattacatcatctatatcacatcctcctatatgttactaatatctcccaactaaccttacacttgtatttttaagggatatattttgaacaactaaattttaacggtattatttatcacgataaaattttgaaatgagtaaattttaacgggtaattttttaattgatatatttgatttgggtgaatgatagcaagaaatatcataccaacacaaataaaataaacatactactactgtcttttctctcctcagtttttctactcttctcttcttctttacaggagtactactactcttttctcacagagaagagggcgaggggcgagcgaggagggggggggggcgactgaggggcggcagcggacgtgggcgaggaagggcgggcgggcgcgcgggcgagctggtgaggggtgggggaggggcggcggatggaggtaggcggcggtgggcaaggggagcggatggaggcaggcggcggcaggcaaggggagcagatggaggcaagcggcggcgggcagatgggcgaggtgcaggtagcggtgggcggacgggcgaggcgtgggcggcggggtcgccgggcagagggcggtggcgggtggacagacgaggcgcgggcggcggggtcacgggcacgggccgcggtgtcgcggcggaggaacgacaggcggcggcgggcgggcctctgcctctactccgaacctccaccgccagatccagtaggtctctcctctctacctccatgccttcacctctacccttgcacggcacccatggagcgacgcgatccggatggtggcgtgagtttatccagagacgggcagttgctggatggcatgaggagagagaaacgccaaatttggagccccctatggcgtatctgttggagcccccttttctctcctcatgcgctattttcaggatggagcatgtgatacaggaggtgctggggatgctctaacccgagtcaccacaagctactccctctgtctgtcgctttagggtttaaattttgttacaaaatacttgtcactttagagcaccttttgtaacatcaatcatttggaggcatgtcacaagggctttcgaccgaacctgccgaaaccacaaagaaccccacacccgcgaggcgccagttgaagcccaatgggttagcactcgggcgaaacacctaggcgaagtcgaaggacagcgtctagagggttcaccaccgagcctatgggactcatcgttggatcttcactttgggtgaagccatggggcgaagcaggaaagattcgcccgaagaggaatcatcttcgccaggaagcccaaaggacggaacgatccaggaaggctattcaccattagcgggctggcccaagaagcccatataggggcccatagctagggtagacactatatgcccttactaatgcccctatcataaaggtatccatataaattcctctgtatatatattaaaccctagaggatttgagcctgtactgagactataaatagccatctaggaccatgtaatgagggatcccaaaagtttttaccaattaatatattgtctttactacacatccaatcctctaagagtgccacgcctttcgacgtggcatggttgtcttcccgacaacaatttccaattcaaaattttctccatcctacccccaactaccttctcacttccatccgtacattattgaataaagggcattatgtttattcttcgtaaaccttaaattttgctaaacaacctgtacagaggtagtattagataagtgcaatccatacgcgcaatgtagccacccatcctcatcatgtatatgatgaaattagacctattttttgtatagtaattacaatgtcgaactaggaagaaaggagatgtttaataacaaatagcacacgccagtccactaccaaggcatgtaccgtttgatcatccgcttgttagcgatgacccaacgctcgtacaccaagagacccttctcatactatcttgcaaaaatctcaattatatatttcaagcgtatactcatgcacatctaacccataggacggttgttacctatgcaccttcatctcaattaatgacataaagtaatatggataatattctaaacatagtcaagggtactaacatcgttagagttgcaggagaaaaacaaaacatggatcatggtatgcccgtattaacggcaaaatttgttaatgttctttagtggattcagttttggaaagaggtcgatcaaccaatgaaagtttatcaataagagaccgagttcaaggaggaatcgtgaagaccacgtcatggcagtctaattctatctattaattaggcaagatttagtaactttccttttatctttaggaagtatttatctagtgtctgaacatgacttgtagttttccttttatcgttaggaaacttgtaccatgtccaatcaggactagtatcaacccgtgagtataaatatgtcaaccaaggtcattgtaatctatctccacatatcaatacatttacttccgatgcatctgttgatgaaaaatccgcgctcggccaatagtgccaggtctgtgttggcgcaaactaagtcaatgaacacaacgacctgggagaactgcttagctccaatgcaggtctaaatcttggtgagatgcgggcgtgccagttagtttgatcctgcaactgacaaggtataaaattgcagatcaatgagccaatcggctaataagtcgaaggagtaatttcatccgatgctgatgccagccgatagcaatagggttttgagcaatcggctaaatatccaacgtagaatctaacactcgacgtataaaggcgatcagctgatgataatatagtaataatataatctagtagaagtcaattagctaacaatgatatgatagaataagcactgatccgaatgttaaagaatacatcagctggagtcccaatgtcataaaatccacaagattagattaaacagtgaaatctttgttgcgatcggctaaatccaacttgtatgtaatccttataagctgatgcaacgtctagataactcatcggctgaaaccccgatgaaacccttattggcaatcaattagcaggctagagattatggttctaagctcgacttagtagatcaaacctaattgatgcaacactaagtatgaaaagaaacataatatctagacaacttagtagatcaagcccttgactgatttttagggtggtagatgccttagctaatctaatccagtaaaacaatttagtcgatatcagcagaaaccctaaagcgagagacaaccgatagagctaaattgagattctaagactagattaacaaagacatatgataaataggcaagcaaatatatcaaccaaaccagagcaatcctagaggtcgaatgtactgatgcagccttgaacgacactattgtagccagtacaattgcctgggccagcagaacattggacttaccccttcgccggagatcgaagacccatgcagccccgcgtcagttgccaagttcgccgtgataaataaaaagtagaaaaggtaaaaggtggcgatgcaccgatttgtattgatcgtgagatggtttacaatgacctcagatgtacatatttatacccatggggagatactagtccttacaggacactaaacacactttcctaaagataaaaggaaactaacgaactattcctcattaatacataacttgccatgccacatcctccttgaactcggtcacttctggataagcttcctttaatagagtaatttccttaaccgaataaagcaggaattcaactattagcggcatgataattctcatcagctaattctaggattctgaagccaatactgactctaggccgatgatatcttcggggcttaccaaatttcactgttaacagcactatcaccctcttttacaatgtttttactaccgacagaatttggcacctgaatcacctgaatcggggctacatcggcttcgatctccagcgaaggggtaagtcctaagttttgctggccctggcaattgtatcggtatattttgcctacatgatatttcaattgtatctctaattgcactatgtttagagatgaatcggtttacttaggactgtctcagttagatctgttattctgatttaggccctgtttgattcagcttagaattattataatctggattattaggagtaagctgaaacaaacaagtagattattatgctagattattataatctataagccagattactataatccaataatctcctctagaggagctttttccagattattgagtggctaaagacccactacccttagatgcctctaataatccagagaaacaatcaactcgtagcttattttatattagcttactataatccagcttagagtaatccgatttaataatgtagattacaataatcttaagctgaaacaaacatggccttagttgagatatctctacaatcacaatattgttttagataaatttgttatatccatcacattaaatagatttcattggctcattgaatattagattattatatacaaatcccatgctgcatcagttaggttcgagctgctaaattgtcattgataatctaagtcttgttaagccgataggtttcatgccagtgttttatcagagcgctagccgatatgttatctttgcatcggacttccagccaatgtatgttttaaccactgagcctacatttattattttgtatcaatattgaccggttgcttcattggacttatatttcatcatattatcaccgaccgattggattgtttgttcaaaccgattgttgaaaaccctatcgacatcggcttgttagcccatcggctttttgatcgtcaacatatttatctatcttgtcagtgcaagatcaaattgattgacatgcccacatcttatcaagatttaggacctgcactaaagttaagcagatctcccatgccttcgtgtttttcgcgtcaatagcctgtccaaccctcgtacatgcaactgactagttataatcatcatgaaaattggtgtcactctgcacattaaagtattcatcacctacatcaaattctaaatgcaactaccattaatacaaagcaagagttagtaaaaaaaaatggaaatgcaagacctaaatacatgcaagctgagattaggagggccatttgtggtcacaattttcagcgtaaagcaaattttgctgtggtatatttttaaacctttaaagtaagtacaagtaaattattgtagaaacatcatcatgcttgctgccctccacggcaggaagccaccacatgtcagccactaaacccttcatttgtaacccctccaggaaggtactgctatgaaaaaaaatgccggctccatgtacgtagcacgtggtgtcagtataccttgcatccgcagctagggtacattgcggtagtgcatgtggatgacctagtcatcaagaccagggagaaccagcccacaatgatcaatgaccaggaggaaacatatccagaaaaatgtgcatttggggttctagcaggatagccgactgggctagatttggaccacggctacgcagcctctagaattagtgcctttgccttgtttcaatgcacttcgccatggttcgcttggcttagcccttcaccgtgcttcgccaagcttcatcgtgcttcattcagcttcaccttaattattttttcacgattcgcatggcattgctgttacttgctttggctgacctacctccaacagcaaccacctgcacggctaaagggggtgcaacatttggctagttgcatggttgtggcggaagggtgtttcatctcctcgataggagagaaggaactacctatattcaagtggacccaagagactgaggccgccctccagattcaaaaatgtacctctccatgtccctggttttgactgtgcctagacccatggagtccttcttgccgtatgtcactgctatccaactgatcgtcagcacgatgctcatggttgagcatgacaaaggagaagtgaccgtctacttcgccaacaggtgctccaaggtgcccagacacgctaaaagggattatgcacaacctggaagccattggatgggcaaccaagtgggcgattgagctcgatgaagttgccctctaccttgttccttgcattgccctcaaaagccaatctgaagtcccaaaatccacatatgatcatccaatattatgatcacgcacatatggacatacataataaatttaaattgatgtactcaactttccatgccgaagggccaaaactctactaaaactttctcaattcaagatccaaataaaaaaccaaataaacaccataggataaggtcaagggtggacaagatgtataaaagtcagtaccattgaaatatatgttattcaccttctagggtttcctcatagtactgttcttctatattattacttatgcaagagtgagtacttatgtgcgtaattttacggtccatgaggaggtacgaaagataccatattttatagtgtaaaatttgttatgtctttacgagaaaaattagaggtagtatgcacctctaccataaaacttgctcgatcgcaatatccggttcttgtgcaagatataaagaataatatttatagttgagatgcccactagtttaccagcaagcattcaattccaatactcttgttccctaaaaaaaaattccaatactgttgaataaagcaactgatatatctagggaacatatcctgggtatataacttttacgtgcacactccatacacactaattaactaatgtcacaaaaaaatctaaaaaaacattgtgtagacattttgaaaaggatcacacctacttgtaaaattttagccgtaacaaaaaaaaaactgatagttttgagactataaatctattagaattttgtcttttatacataatgaatttgaggatgaaactttacaaatgtgatactattgaaagtacatgtgaatgtttactactccctctatattttaatgcacgacgccgttgactttttgtccaacgtttgaccattcatcttattaaaaaaaatatgtaactatcaattattttgtggtgacttgattcgtcatcaaatgttctttaagcatgacataaatattttgatatttgcagaaaaattttgaataaaacgaat

SEQ ID NO: 5317 - DNA, 5297 bp, Oryza sativa
cgcttggcattgcttagctccatgtattgcttatgtagctctcggcaagcaatacccatcacagctaacacattgtcctccaccaatggcatgcctagctcaaattgggctggcgccctcacgaccttccccgatttgctcaccagcatcgacgtcgcagccttgcccctttttggctccggcgccaactccccgaccttccccttgccgtgttcacgcttctggcccttgacaagtggtggggagctatcggcctttcttgtggtctttattggagccaagctttgagctatatctgccaagtccatatcagctccaccgggagaatgaggtactgacaatgccggtccacggggagcctcaattgatagcttagacttgggaggtgtaagctccgtcggtcgacttggacgaggagtcatcttcacaactatgtcttctttgggccattgtatgaacgtcttgcgcgcatcgcccaaagtcatgatttcatcatttgggggcacgggcagcggatagcctgaccaggtgtcctttactgtatcgatggacaccttggcatacccagctagcaggtctgcgccgtggaccttgtctgtaaccgagggcttgaaagccatgccctcagcgacttcaggagcgaaagttgggtggactctcgctagtaggacacactgtgctgcgccctgcataaggtgaaagtttgaatttaatattggaatgtgtaaatgtcttttattagatatggatcggataacaacaattacctcgatgtggtccactgcagctagtggtgcgatcgggagactaggggccggcacctctgtggatgcacaactactcctatgctgtgagggactcgcgtcgtgttgtacacgaggagttggttgcacagcaggtgttgtgactcggggtatattcatgtcggcgaggaccttgttaaccctttcttccacccttgcattcatgctagcttctagttcttgaatgacctcaaccttaagttcggccttcaaacgagcgtccctctcttccttggagactttccgtttcctgtattgggagctgtactgagggagtccatgcttctagggcacatcgctaccaattccccgagttcggccaggatgttctttggttccgagcgcctttgtgaggatgtcatcttcgcgcctcttcggcgcggactcaacctcgctttgtgaagcttgttcagcaaccaagcccaactagaaaagaagatagtcgtttatacgaacttgtactttatacgaacggaaattagttaggttgagtagtgaactcaccagttcctgatagacgacggcatcacttttgttcttaaatgtgacagagccgtccgggttgaccttaccccttgcccgcgcccagttgcgagctctttgttcagggatgtctgaaaacggggcagggacattcgctgctgcagcggctgcatcttcttgggcccatattgcctccttgccgatgtaccctgcggtgcccagccgatgcgggtgctcattccgctgttgcagtacgcgatgtgcctcgcttgattccctaaactcttgggtggtcttgagagagcagaattcctcccacaccgcttcggttatttgagggtattcatcgaacggcgtatgattgccgggcgggttgacaaactcggtgaagagcttcgacttccaattcttccaagctttgcccatcttttggaatgccttccgcttgagcctatcctttgcttcggctggaaatgtgaaccatttctccattgccgtccaagctcgctctttctcggcttctgtgaccttcccgatatctttatggaggatcccgaagttctcacgtgccgctagcccgcagcagttagaccatcttccaatgacagtcctgggcgccgtgggcctaccactagcgtcaacctctcttataacttgcactgtggtcggtcatatattttgtgaccgcggatttctactagacctacttgcacttgtcccgcccgacatcgacgtatgttgttcctgcggcaattctgcagcacaaacagaaggcaatatttgctaaggggtgctagctaaaatttatgtggtcatgtggtgaaaatttatcctataaattaccatgaatttcgggttgttggaccgccgttgtcgcgggatgaccttcggcaactgcctctgtggctggtgttggggagggcgggtttgcgccgagcgttgacatggtttaactttcgcgaaaaagattataaatttcctaccattagactaaatagcattagagccaatgtaatacggggtaaactatgaaagatatggcctcagttttgctgagaaatatgcatcaattacaatcatttgcatgaagggataaaaagaggaaatcataacatcaaaagagcaagtgcagaaaatctgttcttatgcataaaaaaagaacaagtgtagaggtatataaccactgaatcaatcatgcaaatttaaaaaacagcagcagcaagggtacaaaatttgcatgattgacataaaacagcagcaggaggagtatatatgccacaggggtagcaatagcaggggcaaattaactaaaacaacatgtctagatatactcctcttatcaatccagaagaaaagagcaagtgcagaaaatctgttcttatgcataaaaacagagcaagtgcacaaaatctgttcttatgcataaaaaaagaacaagtgtagaggtatataaccactctacactggccatttaataaggaacaagtgaacaagtgtaggggcaaaaaaatgaacaagtgtagataatctgttcttattgagcaattcatcactggctatttaataaggaacacattgggcagcagcagcaagggtatataaatcatcaaagaatgacagaaaacaaaatgcatggagaactttggtgtctaggtcggttccgtccatggactacactgacctatcctttttcggctaaatgtaaacatgatccacaaaattcaataggtctagcaacatatatagcagtacacactccatgaatggttatatgtccaaatggcacttaaatccacattcaagttgcacttaactaacagttgcaaccataggcagcagcatgggcaaacatagacagcaagggcaaacatagacagcagcagttgcacttaaatccacattcaagattcactgcaccaaaatcatgtaatacgaggtatactatgaaagatatggcctcagttttgctcagaaatatgcatcaattatattcatttgcatgaagggataaaaagaggaaatcataacatcaaaagagcaagtgcagaaaatctgttcttatgcataaaaaaagaacaagtgtagatactctattcttatccataaagaacaagagtagaggtatataaccactgagtcaatcatgcaaatttaaaaaacagcccacaataagggtacagataaactgttcttattgagcaattcattacttattgagccacaacaggggcaaaaagaagaatagataaaaaaatgaacaagtgtagataatctgttcttattgagcaattcatcactggccatttaacaaggaacacattgggtagcagaagcaggggcaaagatactccacaggggcagcaacaacataaaacaaggaacaggtgtattaacaagtagcccacaataacagcagtagcaggggtgtagataaaaaaggagacagtactactaacttcatgtaaacagcaattcatccattcaattcaagcaagtgtaaataataaaacagcccacaatcatttatgtggcagcagcagcaagggtatataaatcatgtatataaacaacaattcatgcaattgacctattcatagacaaaaagggtatataaatcaacaagtttagataatctgcaaagttccttaatcatcaaataatgacagaaaacaaaatgcatggagaattttggtgtctaggtcggttccgtccatggactacactggcctatccaccaaaattccccatgcattttgtattttgtgatggtttgataacccctaactagctagcttaataaactatttctagctagctaccctacctacctagaaacactattgccaatctatcaatccatcctttttcagctaaatgtaaacatgatctacaaaattttaactggctacacattcaagttttaactaacagttgcaaccataggcagcagcatgggcaaacatagacagcaaggggcaagtgtagataataaaacagcccacaataatttatgtggcagcagcagcaggggtatataaatcatgtatataaacaacaattcaattattcatagacaacacgggtatataaatcaataagtgtagataatctattcttatccataaagaaaagaacatccactgctgcaaaattcatgctaagatcctctattgatgctaagattcactgcaccaaaatcatgtatataaaatctagcctctacattcatccaaaacatccacagacaacaaatcacatttaattcatctatacagcagcaccaacaatcgaaacaacaaatcacatttcattcatctaaacaatgcaattcatccatcgaaaaaaggaggaatgggggagggtggcggcgtacttggagaagcggcgtacttggagacggcggcgcaggccgtagttgtcctggatcctggtggcggcggcggagaggcagcggcgaagaggtcgaggcggtcgacggtggtcggggatcccggcgtcggggaggtcggggaagtcgatggacggacggcggagaggacgatcggcggcgagggcggcggtggagagggcgacggaaagggcggagatggcggcagagagggcggtggagatggcggcggagagggcggcggagaggttgaggcggtgacggtggagatggtggtggagaggacggcagcggtcgagagagtgagtgaggaggcggtggtgaagagggaggcggcgatggcggtgaagagggcgaagatggcggcagatagggcggcagagatggcggaggagagggtggcggagaggttgaggcggcgatggtggagatggcggcagagaggacggcggcggtcaagagagtggcggcgagaaggcggtggagaggtcgaggcggcggtggagagggcggcggcgaggagggcggtggagaggtcgaggcggcggtggagagggcggcggtggggagggcggcggagatggtggagagggcggcggtgaagaggtcgacgcggcggtgga

SEQ ID NO: 5318 - DNA, 5292 bp, Oryza sativa
agaagaacaataacaatcctaatcaggatgagaggacttgctttgtgtgtggccaacctggtcatctggctaggaagtgtccacaacgcaaggggatgaaggcacctgtagggcagacttctaagtctgctaatgtgaccattggcaacactggagatggaagcgggtatggtaatttacctactattttttcagttaattagtctactaattggtgggtttatactggggccaatgtacatgtttgtgctgacatctcattgttttcttcttatcaggtcgcacgaggttccaccgtcctaatggggaatgggtcatatgcttctgttcatggtattggcacggtagatctgaagtttacttcaggaaagatcgtctagctgaagaacatgcagcatgtctcttctatagataggaatcttgttagtggctcccgtctaactagagacggatttaagttggtttttgagtctaataaagtagtcgtgtctaaacatggatattttattggtaaaggttatgagtgcggaggcctgttccgcttttccctttctgatttctgcaataagtctgtaaaccatatttgtggcagtgtggatgatgaggctaatgtttggcactcacgtttatgtcatattaattttggcttgatgtctcggctttccagcatgtgtttaattcctaagttttccattgtcaaaggttctaagtgccatagttgtgtgcaattgaagcaacctcgcaagcctcataaggctgccgaggagagaaacttggcaccactagaactcctacattcagatctttgtgaaatgaatggggtgttgacgaagggtggaaaacgatatttcatgacgttgattgatgatgctactagattttgctatgtgtacttgttgaaaacgaaagacaaggctctagactattttaaaatttataaggcagaagttgaaaattaacttgatagaaagataaaaacacttaggtctgatcatggtggagagtatttctcaaacgagtttgacttattctatgaggaacatggcattatacatgagaggacgcctccatattctcccgagtctaatgggattgctgaaaggaagaaccgcacactgactgacttggtgaatgccatgttggacatcgcggagctacctaaggcatggtggggggaggcattgttgacctcgaatcatgtgttaaacagagttcctaatagaaataaggacaaaacaccatatgagatatggattgggagaaaaccatcactttcttatttgcgcacatgggggtgcttggcgaaagtcaatgtaccaataacgaagaagcgcaaactgggacctgagattatggactgtgtctttctgggatatgctcatcacagcattgcctatagatttttaatagttaaatctgatgtacctgacatgcatgttggtacaattatgtagtctcgtgatgctaccttctttgagagctttttcccaatgaaggatacacatagtagttcgagccaaccctctgaaataattcccagttcgatcacaccaccagaacaaactaaacatacacacgaacatgtcactaaggaggatgtcagtgaagctcctcgaaggagtaagagacaaaggacggctaagtcctttggtgatgatttcactgtgtaccacgtggatgacactcttaagtcaatttcagaagcatatgcatctcctgatgtagactactggaaggaggctgtccgtagtgaaatggattccattatcgctaacgggacttgggaggtgacagagtggccctatgggtgtaaacctgtagggtgcaagtgggtgttcaaaaagaagctcaggcctgcggtactattgaaaagtataaggctcggcttgttgctaagggctatactcagaaagaaggcgaagatttctttgacacttactcatctgttgctagattgaccacaattcgtgtgctaccttccctagcagcctcacatggtcttctcgttcatcaaatggacgttaagacagattttcttaatggagagctggatgaggagatctatatggatcaacctgatgggtttgtagttgaaggtcaagaaggcaaagtgtacaaattattgaagtctttgtatggtctgaaacaagctccaaagcaatggcatgagaaatttgacaaaacattgacatctgcaggctttgcagtcaatgaggcagataaatgtgtgtaccatcaccatggtgggggtgagggagttattctgtgcttgtatgttgattacatactgatatttgggacaaaccttgaggtgataaatgaggttaaatcattcttgtctcaaaattttgatatgaaggatttggaagtagctgatgttatcttaaacattaagctaattagaggtgagaatgggattacactcttgtagtcccattatgtggagaagatcttgaatcgctttggctacattgatagtaagccttctccaacaccttatgatcctagcttgttgcttcgcaagaacaaaagaattgctaggaattaactggaatactcccaaatcattggctcgctgatgtacctggctagtgcaactaggcctgatatctcctttgctgtgagcaagttgagccggtttacctctaatccgggagatgatcactagcgtgcgcttgagcgagtaatgtgctatctgaaaggtactatagaattggggcttcactatactgggtatcctgcggtactggagggttatagtgattctaactggatctctgatgtggatgagatcaaagccactagtggatatgtcttcacactgggtggtggtgctgtttcgtggaggtcttgcaaacagatcattttgacgaggtcaaccatgaaagcagaactgacggcactggatactgctactgttgaggcagaatggctgcgtgatctactaatggatctgcctattgttgaaaaaccggtgccggctatccttatgaactatgacaatcaaacggtaattgtaaaagtgaatagttctaatgataatatgaaatcgtctagacatgtgaaaagacgattgaagtctgttaggaaattgagaaactccggggttataatgttagattacatccaaactgctagaaacctggcagatcccttcacgaagggactatcacgaaatgtgatagacaatgcatcgaaggagatgggtttgagacccatgtgagttatacaatggtggtaacccagtctatgtgatcggagatcccgtgaattagaacctgggaagaacaaaccattagtaaactagaggagagtaccaatctataccctctctaagtgaagatgcatgtactctcgtgagctgcaaggtaggttggttatggcttaatgagttctgttggctttaattagcgaagatgttatcctgcagagcattcttgaaagaactcacctttgtaagcttgactattgatcgcagtctatggagattttgggtgaatcttctaggaagcttactaaagacctaggagtatgacttatacgctccacccgaggggtagtctacagacggtatagtactagataagactctgagtgaaacttgcttgcacgagacttgcaattcaaggcgtagtccattgttcaagttgtgagtaagtgtagtttggagttctaggtggatgttcaaccttaatcggtctccatcgaaccgctggtatataaacagtacatttgaaaaggcaaatctcagtgggattttgagatttggtgggggattgttggaattaatagatgggctaagacccattcgaagattaattatttggaaaatcacaaaagcccacctcatgggatggcatgcatgtggagtttaggaccaccttgcttattctaggagaggaggacctccttaaaagggaggatgccctcctagccacttgaagcatgtgtggtggagagaagagggggaacacacgcgctcgcctcgcctcgcctggcagggaagggcaggcgcgtcgtgctcctcatccttgcgcagatgcagcctccttttgcagttttgttttgctgcggaaaattcggatttgtttttgttttggaaacattccgaaaaatccggtgcgtgaaaacggcgtgaagtccggataagttacgcgcgacttatccggttcggttacacggagtagagatcgtgcgggcgccctgatcaagcgacctatctctatataaaccgagccgtcgccttcacgcaacatacgcaaaatcaatctagggtttgcctcctactctgtgctgcgccgtcgctcgtagacaactccatcccgctcgccggcgtgcaccggcgatcaggagagcaggtctccggaacctctaccttcatgtcctgcacggcgagaaggcggcaataaggtttttgggaagcgcttcgcgcgactgctccctgttcgttcgctacggctcgccttcctctctgctcgcgtgctgcgcgccttcgtcaacgcccgcaaccgcgagtagtacctgccgagcaaccggtttttccgccacctcggtacgtgttcgacatgttgtgcatatttgatccgttcatgttttactgcttagtttacatgtgtagatctaatgatgtgttcatgctagtttacatctgcaatgtcatgatttatttatggaataaattaaatcattatgtgcttataatttctacaatccaaaaaccttattataggcgctgtgattttactatggctggttttgccgatgcactgaggccggataaattcaccggtgtgcactttaagagatggcagatcagggtcactctgtggttgacagctatgaaatgcttctgggtgagtactggcaaacctgaaggagttcttactgctgatcagcagaagcaattcgaggaagccactactctctttgtgggatgcattcttagcgttcttggcgatcgtctggtcgaggtgtatatgcatttgactgacgctaaggagttgtgggatgcactgaatactaaattcggtgctactgatgctggcaatgatctgtatatcatggagcagtttcaagactacaagatggctgacaaccgttctgtagtcgaacaggctcatgagatacaaaccatggctaaggaactcgaactccttaagtgtgtcttacccgacaaatttgtggccaggtgcattattgcgaaactacctccatcttggagaagtttcggtactgcactcaatcacaagagacaggaatactccgttgaggggttgatagcgtctcttgatg

SEQ ID NO: 5319 - DNA, 11168 bp, Oryza sativa
ggccccaccatcaccgaaaaatacgacggaagcgtcaaccccgccgagtttctccagatctacacgaccgggatcgaggccgccgggggtgacgacagggtcatggcgaatttcttccccatggccctgaagggtcaggcgtggggttggctaatgaacttgccacccgcgtcggtccactcttggaaggatttgtgccagcagttcaccatgaacttccagggcatatatccgcgcccaggcgaagaagcggacttgcatgcggtacagcgaagggacgatgagtctcttcactcgtacattcagcggttctgtcaagtccgcaacaccataccgtgcatccccgcacacggggtgatctacgcgttcagggggggcgtacggcgcaaccgcatgctcgagaagatcgcctccaaggagccccagaccaccgcgcagctttttgagctcgcggaccgtgtggctcaaaaggaggaggcctggacctggaactcctccgattctggtgtggcagcttcggccgcccccgggtccgccgctcggtcagggcggcgggacaggaggaggaagaaggggtcggcccgttccgacgacgagggtcacgtcctcgccgtcgagggcgcttcgcgggccccccgaaaggggaggcctgtgagcgacaaaaagaaggaggccggcgctcccagcagggagcgcccgaccggcaagtggtgtaccgtgcacaacacctccctccacgacctcgcggactgccgcgcggtcaaaagtttggctgagcggacgaggaagtgggaggaggagaagaagcaggagcgctgtgagggcaaaaccccggcggctcccaccggcaaccggcgaggtgaggccaagcagaaggccaccgccgaggacatcgacgatggcgacgatgacctggggttccaggagcctgaggccaccgtcgccaccgtcgatgggggagcgtgcgctcacgcttctcgccggagcctcaaggacatgaagcgagagcttctggccgcggcccctacccatgaggcgacgcggcgggcgcggtggtcggaggttgccctcaccttcgaccagaccgaccacccgccgtgcgttgcccggggaggacagatcgcgatggtggtttcccccaccgtttgcaatgtgaagttggggcgtgtcctcatagacgggggtgcagccctcaacatcctttcccccgcagcctttgacgccatcaaggccccggggatggtgctccggccgtcccagccgatcatcggtgtgacgccggggcacacctggccgctgggtcatatcgacctcccggtcaccttcggtggttccgccaacttccgcacggagcgggtggacttcgatgtggcggacctcagtctaccctacaacgcggtcctagggaggcccgcgttggtgaagttcatggcggcggtccactacgcctatctccagatgaagatgccgggccccggtggccccatcaccgtccatggcgacctcaaagtcgcgcttgcttgtatggagcagcgcgcggaccacctcgccgcggcgtccaagcccgcgggtggcgacgagaggctcagcacctccgtcccggccgccccaaggcagcggatggtcacgtgcgacgaggtcccggtcaaggaggttgccctgggcgacggctcgtccaagaccacacgaatcggtggtcttctggacgacaaataggaagacgcgctcgtctccttcctgcgggcaaacgccgacgtcttcgcctggagaccggcagacatgccaggggtccccagggaggtgattgagcaccgtctcgccgtgcggccgggcgcaaggccggtccggcagaaagtgcggcggcaggccccggaacgtcaagccttcatccgcgaggaggtggcgcgacttctggaggccggattcatccgtgaggtcatccatctggagtggctggcgaacccggtcgttgttcccaaggccaacggcaagcttcggatgtgcatcgactacaccgaccttaacaaggcatgtcctaaggacccttaccccctgccacgcatagatcagattgtcgactccaccgcggggtgcgaccttttgtgttttctagatgcatactctggttatcatcagattcgcatggctagggaggatgaggaaaaaactgcattcattacccccataggaacttattgttatacgacaatgcctttcgggttaaagaatgcaggtcctacttttcagcgtactactcgaatttctttgggtagccagataggaagcaatgttgaggcctatgttgatgacttggttgtgaagacgcgcaaccaagagaccttactctcggatctagcggaaactttcggaagtctccgctccacccgcataaagctgaaccccgataagtgcgtgttcggcgtgcctgcgggcaagcttctcgggttcttggtctctgcccgaggcatcgaggccaaccccgagaagatacgagctatagagcggatgcgcccccccagcaagcttagggatgtgcagtgcgtcaccggctgcatggccgccctaagtcggttcatatcgaggctgggagagaaggcgctacccctatttaagctcctcaaacgctccgggccgtttacctggacggaggaggctgagcaggccttcactcagttgaaggcgtacctcagttctcccccagtcctggtcgccccggagccagatgagccgttgctactctacctggcggcaaccccgcaggtggtcagcgcggcgttggtcgtggagcgcgacgaggacaaccctcactccgcgcatccccaccctgtgtcgactcgacccgggagagagcagggaggagaggcccccgagccgaacggcggcccaaggcccccgacggtcggagctggccctccgcctgcttgtccgacggtgccaggcgcccccgacccccaggatggccccggggccactgcgggaaggctgcgcctgtcgccctctgaccccgaggtcatcggcacagaagccgagtgcgccccgcgtggcctctcggacgaagagcgccctggagatgcggcccctggcgaagaggattggccccgccgaaaggtgcagcggcccgtatacttcgttagcgaggccctccgggacgccaagacccgataccctcaggcccagaagatgctttacgctattctgatggcttcgaggaagttgcgccattatttccaggcccatcgggtcacggtggttacgtcttacctcctcggccaaatcttgcataaccgagaaggtactggacgggtggtgagatgggcaatcgaactctctgaattcgatttgcgctttgaaccacgccacgcgatcaagagctaggccctcgccgactttgtggcggagtggaccccagctcccgagcccgtctccgcccccgaggccagctcgggcccctcgcagctgcctcacaccgcctactgggtgatacagttcgacggttccctgtctcttcagggcgccggtgcgggggtcacgttgacctcgccgagcggagacgtcctcagatacctggtccgcctcgattttcgggcgaccaacaatatggcagagtacgagggactccttgcggggctcagagtggcagctggactggggatccgccgcctcctggtgttaggcgactcccagttagtcgttaaccaggtctgtaaggagtaccagtgctctgacccgcagatggacgcttacgtgcgccaggtgcggcatatggagcgccatttcgacgggatagagcttcggcacgtgcccagacgggataacgcggtcgccgacgaactctcaaggctcgcttcctcgcgagcccagaccccaccgggcgcctttgaggaaaggcttgcccagccgtcggcgcgacccgaccccctaggggagacggacgcgcctgaacggcccccgaggcccgtcggagtccaggcctcggggcccgaggggagcgctcccagctcccctagattgattgcttggatcactgagatccaggcgtacctcgcagataagactctacccgaggaccgcgaagggagtgaacgcgtccggcgcatctccaagcgctacgtgctggtggaagggaccctctatcggcgcgcggctaacggagtcctcctgaagtgcattcctcgggaacaaggcgtcgagcttctcgccgatgtccatgaaggcgagtgtggagcccactccgcctcacgcaccttggttggcaaggcctttcgccagggtttctattggccgacggctctcaacgatgcggtcgacctgatccggcggtgcagggcgtgccagttccacgccaggcaaacccatcggccggcccaggccctgcagaccatacctctttcgtggccgtttgctgtctgggggctcgatatcctgggtccgttcaggcgggccccgggcgggttcgagtatttgtatgtcgctgtcgacaagttcactaagtggcccgaggcttatccggtcatcaagatcgataagcactccgcgcttaaattcatcaggggcatcactgttcggtttggggtgcccaaccgtatcattacggataatggcacccagttcactagtgagctcttcggtgactactgcgaagacatgggcatcaagctctgcttcgcctaccccgcccaccctagaagcaatggccaagtggagcgcgccaatgcggaaatcctcaagggcctcaaaaccaagaccttcaacatcctcaagaagcacggcgactcgtggatcgaggagctgccagcggtgctctgggcgaaccgaaccacgccaagccgagcaaccggggaaacgcctttcttcctcgtctacggcgcggaggtggtcctcccatctgagctcaccctgaggtcccctcgggtcaccatgtattgcgaggctgatcaagatcagcttcaccgagacgacctcgactatttggaagagcgaaggcggcgcgcggcgcgcgctaccagcagagcctgcggcgctaccatcagtgccacgtccgggcccgatcactctgcgtcgacgacctcgtcctacgccgcgtccaaacgcgtgccggactgagcaagctctcaccaatgtgggagggtccgtatcgagtgatcggcgtcccccggccgggctccattcggctggccacgggcgacggcacagagctgcctaacccgtgaaacatcgaacaccttcgtcgcttctacccctagtgggggtcgggtgtcatgtctcgggctcgggccaaccccgcacccccccgggcgtgcagggttggccgggggctaccacatgcatatacttatcttttttctcttccgtatttcaataaaagcattttcgatttcctgaggactgtgtctgtgccatcgtttccttttgaagaatcttggcttgaattagcacgctcgtgctcgaccctgccctcggtggcccgggccggctaaaatcgccaaatggggcccagaaccgagccgtttcccggggcgtggtgaactccgggggggaatcggcaaaggcccacaatcgggtcatccataaccctcggtcaccgctctcccggcctggccagtctcgacacgtggatctccccaggcactagccccgacccgcgccgtttgaggctgggacctgggcactagcccttgttcaagccaagacacagaaggaccgcggcacagaccatcctcgtcttatacacacaacaaacagaactgacgcagaaatttcctctttacttgattgcagattaaatcagtctatacaaaaagggggcccgaaggcctcggaagaagaaggaaaagttattaagattggcggggccttgggggctcactccgacgcgcccgggtcgccggcctcgtcgtcgctgtcgtccgcactgtcgtcaccgccctcctcgtcgaagtcgagggcgaacgcgagccgaggggccgtaccctcaaagctgtggacgatgtggtcggcggaatcccggacctgcgcgcgcgcgccgtcctcggttccgggagggaaatcttccagtgctgcccacggggagaagtcagggtccctggcctggtagcttgccagtacgagctccaccgccccccgggcgaggtccctcgaggatgacttgatcgtctcctcgagctcctcggggagccgctcgagggccccggccatctctgagaggcgctgggcgaggcccccctggttggcggtgtacttcgcgtaccgcccgccccagaggcccgcctgctgcccgaagcatgccgggccctacctcgctcgccaagcggagggcctcgacctccccggcggacgagtccagcgcgccctgcagctcggcgatggtgtgttcggcggctgcgaggcgggcggctaggtcgccgtggcccgcggccgccccgccgctgtgcgctctcgcgtccagctccttcgcccgcgcctcgagctcagcggcccgctgatccagtgcggccctctcggcgcgggcgccttccagattgcggcgcgcctgctcctcccgcgctgcctcgcggaggaacaggctgttcgccagtcgctgcgccgcgggctcggcctcttcgagagttcgcccccgctcggtgagcgcgtcctcgcggaggcggagtgcggactcctctttagcgcaggcggcctcgcggtccgccaggtttctctccttcgcgtccagggcgcgggcgcgctcctccagcgctgtggcgcgagcctcaagggcctcttcgcgctgccgggacgccgccttgttctccgccgcccgccgttcccgggcagcggcggcgtcaaggactccccgggcagcgtcgagcttctcctctagctccgccgcccggctcccgtattggaggcggaggtcgtcccgcgcctcgtcgagcacggcggtggcgatgagggcagtctcccgctcctcctccacctccctggcgatctccgccaggtccctacgacgggcctcgagctgtgaggcgtgccggcggtgtgccttgcggcccgcctccaccatggcctccaccgagcgccgcccctcctcgacgtgcgcccacgccgcgtcgagctccgcccgctccgcatgcagggcctccatctgggcacttaacccgtccagcaccgtgctgttcgcggcggccaaggcctgcaggaggggctccgcgctcagtggggcagcggaaggcagaggggagagccgcctcagtgtgggtgccgcgcggctcggcccgccgatcgacgtgccggactcgggggcgtcccccgaacctggctcgtcccaagcgtcgcccgaggggtcgggcccgagcggcgcgcccgcggcctcgtcgtgggtggcctcggaagtcggcgtcgcctcgggcggagtcgggtcgggggtttggcaggccgcctggcgtgcgcgcgccgcctctgcctcccggacggactccccggcccggcggagtctagcctcctcccgagcggcctcctcagcctggcgaacccggacggcctcctgggcagcctcctcggcttcccggaggcggtccgcggcttctcgccggtcagcttcccgcctccgggcctccgcggtcgccgtctcctcggcctcagaccggctggacttggaatggcggggagggcgcgacgggatctcgcttaggcagaagaaaaaccagaagacaaaaagaaacgggtgagtgaaaactcgccttgaaaactcgcggtgggcgcggggacgaacctgcggggatgtcggctaaacgaccacctcgggggcgagatgaggctctcccggcatggctcggtccccccatcttgcggagccgtttcttctttcgctccccctcgggctgcggcgtcgacacagcaccctccgggcgcctgctgctggcacgcaccgccccgccccctcggggaggagatgggggaggggtaccctcctgcttcctcttcccccgggcgtcggtagggcggatacccccgggcccccgtcgcggggcccagaagcacgaccccctcccggggtagattgttccctcctgcggctcccgcccgcgccatcgtggcctcggggggcccgctcccccgacgccccgaccacctacatgatggccaggatcttggcgcgctctggatcgcagcagatggggaggaccccttgggggatgagggatgcctccacggagctgagattcagcacccgttggaccaccatcctgaagtcctcagggtccaagtcccatttgcgcccctggtgggtcctcacgtagtcctcgggcccggtgtacacccaggcgccccgggcgcgccgctggagcagcgcgatccggcgatgaaggtagtcaccgaacaccatggcccccgtgagcccctgggatcgcagacccgccaggcggtcaagaacggcgtcgtagccgtctcccagatctaccgtcgcccgccagctggaggcctgcgccgggggctggctcggaagtcggaggcgcgcttcgtcggcgaggggggtgtagaaccaatcgctcttccagtcatcccactttttgcggaggacgcagagaatgtagcggttcagcacctgcccccgcggctggaagtagcagccaccgactaccgtcggcggcgacaccggctgtacggtgaagaaccaccggaacagccggagagatgggcgcaccccaataaacatctcgcacaggtgcgcgaagatggccaacgtcattatcgcgttgggggtgaggtgcgccatctggagatcataaaactccagaatatccatgaaaaaaatagagaatggcgggaccagccccgccattgcgaaagagaggaagaagacggaccgccccgggtagtgtggtgtcgggcgtccctcgcccagcgcgaccacctcccggccggtggcggattctggcatgaatcggcgcggcagcccggcctgcctctcgctcacgatgcgggaaggcggcagcacgctaccgtcgagcggtgcggagctccgtgccatgacgccggcggaggaggagcttgagagcgagcgagtgcggcaagggtagggcacaggaaacgaagagttagagcacaagtggcgaaggcaagggggagagtggcgagaggaaaggaacgaatcccttcctcgacgtctttacacccttgccaatgctatacccggcttctcgcgcccacgcctccactaacccactcgctcgtttgcggcgcacgcggcagatgtgcggccgtggcggttgagatggggcagatcgtgcgcgcattaactacgctcgccaaccgtgaaaagcgccatcatcatgtctccaggcgaaacgaaccggctcgtcccgattcgcgcgctgctcgagtaatgtagcagtcttaaagaagccgctcattattgtcggtcggttttcccttgctgatgcgcgcgatttgcgaccgctgggtttctgcccgcctgtagggaccggccccacctgtcaccgggcctaaggagtggcgtcacgcccgagcgcttccctcgaggggggcgatcgccctggcgtaacgccgggggctactgtcggtgacatggggccaggggtatcgtgactagaggcttgggtagccgcggtcacccacgtggcctgaccccctcggggggggggggggtcgggcccgagggtgacgtggccacccctccctctgtctccccgaggggtcgggccgctcccgtttcggccctgagggctggggcgcccccgtttcggccccgagggctgcgacgccccgaccccctgtggttttggcgccacgtgtgtgagttaggtgagcactgcggggctcacctaaccgcatttataacaggttggacgagcgcgccacgccgcatttaatgcgacgcagcgcacgcttatccggtccgtgaccagtcgcggtgtgtgaccggtcacagaccggtcagatcacgggttaggtggcaacaggcggcctgtcacacgcctcgccccgtcccgtcggaatgatgagagcttcctggctctcgtccctagccggagccggcgtgctaactcctggagttggtatgtcagtcccggtcagaaccattccaggcttcagcgcaagtatggcaaggaagtcgctggccattaaatgaaggttgaaatgggcgtccaccggaaaagcgggcgagcggggcaggaggcgtgtgctctgcttgtcagaggtcacttccggctgtagactagccctcattgtaaaaagcatgtttcctttcttaggcagctggaggcccttgtggtgacccctgaccagataaaaaggaggcccaggcctaggaaagggggggactctggagagaaaagagaaaagaaaaaaagaaaggggactctggagggaggagaaaaaaggggaatgggtgctagaccctgaactctggctcgctctccagctctctgtattccttcacgcacagatccactagaacacaggagtagggtgttacacttcccagcggcccgaacctatctacgtcgcccgtgtcttgtgcacttcctctctcgcggacgttcctcagatcgagggcaaagaacctcacttagcgcccccggccgaaccggcaaaggggggcctgcgcggtctcccggtgaggagccccacgctccgtcatctggcgcgccaggtagggggcgcgcgtgtctttttaagccctcgtcctctttcgtgtgcaccaagcttctcccgctcagcctaatggccgaacgggcagtggcgcacagcctctctccgaacgctagcggtgacgacggggagcagaacccgcgccgtcgggctcgcaccccaccgtccccctctcactgaaatcttgggcggggggaggcgctcggggaggtcgaaggaaccgcgacttcaccgcccgcgggcgacgggggaggacggcgagacggggcgtgtcgccgcctcgtctacggcgatggcggcacgccccagggcgcgctccaggctgcgggcgcgctcctgcgtcacccgcccgtcgtccccgatccagagactccagcccgacgttggctggatgacgtggccgacttggtcatggcggcgcagcagcgcctaggcgccggcgggcggtcctccgccaccgaggcctctggcgctgccgccgccggctccatgtcgtcgaggcggagggcgcggcg

SEQ ID NO: 5320 - DNA, 1853 bp, Oryza sativa
ttacgcctatagttagttctgcacaggttgcataagtttcctctcctgctccactgcacaataacaccggcttcagttcatgtataaatctcaaataaacttctgttcatgtataaatctcaaataaactatcatttgaacatggatgtaagtaatcatgcacagaaaaataattgaacgacctaggaatatgatgtgcagctttactgtctcttcattggatagcatgttgatttctctagccctgaatttgtatgcaacttaaagagaaatgttgaacaatatgatgtatgagctgcgaccaaatttgcacaagaatttgacataccactggtgcatgcttttcaatctacggccttgtcagcaaatgaagatacaaattttacctcagtttccgttagcacgcttttcaaactactaaacggtgtattacatgcaaaaactttctatatagaagttgctcttatctacaatattagattaattaattttctaagtttaaaataattaaaactcaattagttatgtgctaatggttttctcgttttgcgtgcccgtacttaatcttcatgttcatcacttgtgaacactagtggtcacattctggtttaaacttcaagtttatttccaccaagttttatcgtatgcatgattccttagtcgcaaattcatacatgactatctaagctagggaccatagtacattaaaccactgatcgaaacaagggcatacagttctcagttgcaagaacagaggcaacaatgctaaggagaagaacaactccaagttattggtgttcataatgcaaagtgatcaattcatatcatgttaccttgacatcaaggaaacacatgaatttacttagtaaagaaagctatttgaattttaccttgcatggatttctcaaagttctccagctgagacatgaatccctcattaggagccacttgaggtcgtttgcttctaactagcgacaacgcgttctcaaggctcatttgatgcttcttcatcagatatgcaacaataatcgtgacactagacattcagagaagttagttagtaggacaaaagaaaaaaagcaccacacatctgctcttaatgaattcaaatattctttacaaaatatctatatattaagaaacacgtaattaatcaagggtgatctcacctagtggaatgaaattgagaatttatacacattatgaaaaccatcataaaacagtcaaagctaacatctattagagtattttccttacgagaaaattctttatttgtccttaaaagttgatcgcttccatcgtttgccctcgtaaaattggctccttctagtgctccgcattcttaacttttatcctttatttgccctttccgttagttctccgtcaacctactgttaggtgggtgaaaagatagttttgcccttatctttttatgcacagcagctatttttatactttatttttgttgccaggagcaatttttatactaaactgatggttcatatatctctaatgaacctaaatgttattttagtaagaataaaatacatcagtgcttacaagttggaccatggtatcatctacgtccttaaacatgtataatgaacatctgcttccctaatcttggtttaatgtatcacttgagatccaaactatagatgacggagctcaggcgctgacgtggccatccatggtggcgagaattttgcatttagaccccttcactacaccatgcccgtgagaaggaaggcaaagaaacagaaattatgcgggctgggattgttggcgataggtccccatggccgatataggataaagtgatcctggctgcgtgattgttaccattaaggcag

SEQ ID NO: 5321 - DNA, 22177 bp, Oryza sativa
caggagtcaagtcttcaggcttagctcgcttttaccttttccgctgcatttgtaatcctttatgtttttgtaagacgtggatctgtatgtcaacaattgtcgtttgtgtaccctggctggtcctggataggggtttaatacacattcagcttagaaattctggttcgtgaatttctgggcgtgacagttgtacccaaaaagaaggcgaggactttttcgacacttattcaccggttgctcgcttgaccacgattcgagtactacttgctctggcagcctctcatggtctacttgtccatcagatgaatgttaagacagctttcctcaatggagagttggaggaggagatctatatggatcaaccagatgggtatgtactagaaggtcaggagggaatggtgtgcaagctgttgaagtccttgtatggtctcaaacaagcgcctaagcaatggcatgagaagtttgacaatacacttacatatgttggctttgttgtgaacgaagctgacaaatgtgtgtactatcgctatggtgggggagagggagtgatcttgtgtttatatgtcgatgacatattgatctttgggtccagccttaatgtgattgaggaggtcaaggactttctatccaaaagctttgaaatgaaggatttgggagtggctgatgttattcttcacattaaactactgagaggagatgagggtgggattacacttgtgcaatctcactatgtggacaaggtcctgagtcgctttggttatagtgactgcaaggcagctcctactccttttgatcctagtgtgctattaaggaaaaaccgaagaatagcaagggatcaattgagatactcccagattattggttcattgatgtacttagctagtgcaacgaggcctgcatctcatttgctgtgagcaagttgagccggtttgtttcaaatccgggagatgatcattggcatgctcttgaaagagtaatgtgctatctaaaagggacaatgagctttggagttcactacgctgggtacccaaaagtactggagggctatagtaattcaaactggatatctgatgctgattagataaaggccacaagtgggtatgtgttcacacttggaaggggcgccgtttcctggaagtcttgcaagcagaccatcttaacgaggtcaacaatggaagcagaactcgcatctttagatactgccacagttgaggccaaatggcttcgtgagctcctgatggacttgccggtggttgaaaaactagtaccagcaatcctgatgaactgtgataatcaaacagtgattattaaagtgaacagttcaaaggacaacatgaagtcatccaggcatgttaaaagaagactgaagtctgtcagaaagcagaaaaactccggagtgatagcattggactatgtccagatggctaaaaatttggcagatcagtttaccaaggggctaccacgtaatgtgatagactgtgcatcgagggagataggcttaagacccacttagagttgcacaatggtggaaacctgtccattgtgattggagatcccgtgaatttggatggcgaaacaaactattgggtaactgagagaagagacccaaaaatgagcttatcttcatgatgcacttctcttctaatctgtatggtaggatggtatacaccttaatgtgatccgagtggcttttcataaagcagagatgttggcctacagaacatcttagaaggaacacgcctatatgactccgactgctagtcacagtctatgagatctgggtgatctctagatactcatgaaaaggccaggagtatgacttatacgctccaaacagaggggatgcaaacgacagcccaataccagttaagggtttgagtgaaacctgaatcgcacaaaactgacaattacaaggcataatccattgttcagttatgatctggtgtaactcttttcctaggtggaagttcaacctaacagtctccatcaaaacactggtataactaacaggttcagttttgagaacatttcttgtgagccatgaaatttggtggggattgttgaaataaatgggctaggcctaatttaatttaattaaaatctcaagagcccacaagtaatgttagagagaataatactaccttgaaaaattaggtggaagaacctcaacttaaatagggtgatattggagattccctgttgaccggttgaggtgatggttggactgccacacgcatgcgcacgcgctgagtcggcctcggccatggacgtagcgaggcgaggcggccgaccgagccgagcctgcctgctgctcttccgtttccgttttgtaacaaacgagaatgaagtcaccattaaaaaatgaaattcacaacaaatgagagattcattgtgttgtaacctccacaacaaatgagagattgattgtgttgtaacatccacaacaaattagatttatttttgcggtaatggagatctctctctatatataacgcaaggcagaggctctcaaagtgtgtgtcttcctcctgtattgttccttagcgatactctcgttctgttcctgcgctgtctctttgtttccccggttctgttcatcccgtgcgcacgggtgatcggaatgagcaggtgcctccgaaactccgtccgcttgagaacctgcacgggtaagtgggcgatcaagtttttgggtagcgcttcaagcgcgactgctctgcatcatcttcactaacatgttgacaaccggcgacaacaacaacactagagacaaggagaaggagcttcccgtcaacaccaacggaggcaatactgtctcaaactccagcggagggccattctcagggtataacgtttcactcttaccgttcgttctttgtttcctacaactgtcggtcgcaatattattgtgttctcttgtctatgctgatgcttattctatattaagcatactcaagttgtatacatgtagcactgtcactatatctactaatattgcaaatgttatatttattgtcttaatattttggattaaaatatgccaaattatgactaaatttccaacaccaccgtcatttaggaaacttcaattctcgagttgtggagctaggttgagggtatttgattatttaatctttatagggttctgtagcgtgcactcagcccttaggacttaacatgacagtacatgagcaaatgggaaagcagtgaatttttgcatcaggctggctcaactaaatgattgttatgtccatttggttattaaaatagaattttctgttgtataccacctcacatgctattaagatacattttgatttacatagcaattatgtttctatgtgaaagaaactaaatatatatttggtcattttggtaactgttagtatctcaagcagtaccacccccattcacttcccacagataatcactctccactgtgtactccatttccttctttttgatctgctctgctcgcttaacttgcatggcatgttggctaacccagaattggcaactggaggggggcagttgctgttcagtggctgacttggctgaccgtaggtacacgtatctatagtcaactaataaacggtatacatctcttcatgctaaatgtatatccttttcatgacagaatttattcaagaacgaaatgaaatctgcctatagtcagtagcaactaaatttacatttttagcatgtaattaataatgtattgtttacaggattcgctcgaatgctactctcaagttgtgggcattcgctacaatgccattttcgctgtctgttgcatttgcaaaatactatttttcatctaaataattatttcttggccctttttgcccctcactgccatctctctctctaaaccacgcactcacaactgagaccgagccgagtgagaggataaaagggcaaagggaggggcaaccatgctggcgccgccgccttcccctaccatccacgacattgagggcggttagaatgaggagcaggcagcagcagttgcgatggcgcggctcggtgtggggaggcggcgcaaccgggaaggcggcggagcaggtggtgggcggccccggcgaggttggggaagaagaagcggcatggatggtgggttaaggcgacaccacggatggcgagaaaggcggcgcgaatagcgggggcaggtggcgcggtcaggaaggtggcggagtaggtggtgggcggcgccggcgaagttgaggaagaagaagcgacacggatggtgggggaaggcggcgacgcagatggcgggggaggtggcagcaccagtgtggtcgcctctcccttcgctaggggtgcaagtgggcctgtctgccacatcctgattttcactttaggattcataaattatttaataaattatttttagaatttatattaaatgttcattaatttacaagtaaagttaaatgtgggaaataaaatttcctaaatataaagtatggctggatttaatttttattaagttcgcattatactctctggaattttctttgattttttcggagctcaattcttaattttaataatacaaacaacatttaagtaattattcacatattaaattaatcattaaatggtctgattttaattttgttaaatacttatagtgttcaagtactttcaggattttttttgaaattatttgagcaatagaagtatttttaacaattcaaggatcatttcagtgattaatttaattggaaaagtaattaaaatccccttttccttttcgggccgaaactggaaaggttcacctttagttctcggcccattctccctccctttcggctggccttatccctcctccgaagtccatttcaggtccctccttcaatccggcctagtagaggatgctctcggagaaagtctgctttacgtccctcgctactgttcatcttcaacctcaggacagccgaactgagaccgagttggctcggtttttctcctccgaatccggccttatctctcgtgttttccgaaaattagttgaggggacttgtttccttatcctcctctatctctttccccaaaaatccggttttatccctttgaattcgacgcgaatttggattcgttttcgagtttatctctccaccaaaccctaggttttcccgacgcgattccttgcgttccaagcccgatatctctctcccgtggctataaatagaacccccaagctctcctctttcgtttccaacccctagctcgagctcccgtgccctagccgtctctccctgcgagtccctctctctccagcgccgccaccatctccagcagcgccgcgccgcctctctggtcaacgccgccttgagccgtcgcctccctcggcttcgcaagggtcagctctaccccggccaccggttcttttgcgccaaatcccgccgggagattgccgtcaccgtgaaccagtgggttgccgccttgttttgatctccggcgaagcctcctcatcgaccccaaggtcgccggacctcgccgcagcctccctcggcatcgcagctgcgaggagaaccccgtccacccctcggttgtcgtctcccgtcgctgaaactccgccgccaccatcgatcggtaccccgtcgtcactcccgatctcatcgccagccgtttttcatcgtcgtgccgcccctcagtgagttcccctcgtcgtgctctttcttctggtgcctcggcttggccgcctaaaccctccatcgccggcaatgatgtcgtcatgacattgttaatcctgttctgtataaggctaaaatcatatttatcttgtaaaattgataactaattcatatgaagtcggaattaagtggttcaagtctctaaattcatctaaaatcatgatctacatgtttgtctactttttatgtactgtttatttggtttttattagtctttttcttcgtttttcgtgttagcttgttgtttccgtcgttgcgaaggttcgtgagtgcgtcggaagtgttcaagaagattaattgaagaccgattattgcaaggcaagtcacacagatctcaaacaaccctttgagcatgttgaacctatctaaagctattgttttatttcaacttatgcattattttcgaatgtcatcgggtggtgagccattcccaattaattatggccgaagatgactttattttcctatgggtaataaattgattagcttggactttatatattggattggttcagctaaatgctatatatataattgcttagccataaatgagatgaatcacactacattgttacttatggttatatttaatggtagctcacgatggttaattgtgttatgataattaattgataattaaaacttgataatggtgggttgtgagcacatggttttgaaggtcgtgctcatgacaattaaggaacggttcacgagctattgttgtgaaatatttaccgtgccaagcacaagccagcgtgggcaacggatttacctttcgtatagcatggttcattgcggggcaccagactgagaagcggcgagaagtccatgagggtcgctggggagtccatgcctctggttgtagagggggtgattatgatccaggaatggtgcactgtggtgagttgtgttgtgcgaggggtactgtcacagttcctttccaaggtaccgtggtggtattgaggcgcatggtgacatgtcgtggagctgtgtcttgtgggtacagtggtgatacacctctggccagagtaaaactattcgaatagccgtgcccgcgatcatgggcaggttgaacaatgtttttcgtgattagtctcacacctctcacagtaattattgatgctataactggtaataatttgcttagctcctggtttggagttagatctatacagccgggtatggttgttcaggatggttgggcctgagcagcatgggtgtgctgttcagtgttgaataacattgattaattactctactatttttcaattctcaaatgtgagctaaatgctgctttcgcaaatgagtctatattatgccatcttttggtatccttgtgcacttgcatatttgctgtgtggcttgcagagtatgtcatatgctcaccttgcaataatcaatcaacctcagttgaagaaaaggatccagaagaagacgtttggcttataccccagttgagctgcctgtgggagtggagctgaagccatcgctagaccgttattccgctgctgattttcttttgttttgtaagtatgtaacgttattattatgatggatttctatattaaattgtcagtttgtgtacctcggctgattcctggacgaggattctatacacaaattagttcggaaattactagtgaatttctaggcgtgacattgtccacgaacccgcttataggcaaaattagtacgtaacctgcaggtttgaccaacgggttacctatcaatttgatctataaatgagttttcatatctatgatgcggtaaactggaccgacgcgaaaacccataaaatatgatttatttgacctataagtgaactcgcgggtcggcccgcttgcatccctaccctggcggggaagaagatgccagtaagcttcatttagttccttttttattcaacttcttttcaaatggatcttcagtaacatatcatatgatcatttgttttgaatggttcctctcttttttgacatgaagttgaaactttgaaaacaccctatggaaaaaggtaagattctgatctacagagggaactcaattgcaagctgatagaatgtacttacgaactgtgttctcttgtatattcatacgtagttgtagcatatatttttcgcttatgaattctattggacttggtaggccagactagagtatctgtgaggtgtcttgatttactcttttgttttgcacccgtgctagcaacctttcattatcaaaactgagatgtgccatctatagaacatcagaactatgttacacattttctagctatgaatatactaaaatgttctaccagccaattattttcttttttttcattcataagccttattttgtttctgtttatccataagttctgtagaaattggcaatatatatttttaaaccatacattgtacaagttctgacctacatttatgtgtagtaaaaattaattgatgtcatgtggcaccatctctacaatgttggatccgccctcatggtttcttatgagtttgatctcctcaataatatgaaaggagcgtggtactcacgtgttcgaaggaactgcatatacaaatgaaagtacgcgttgatgcgtcctggaggaatggtggtcttgcataccgctggattaggaggtcaaataataggtggcatgagttaaagttagatcattttcggctatttattctactccttccgttccacaatgtaagtcattctagcattaacattaatataaatgtgagaaatgctagaatgacttacattgtgaaacggaggaagtagatgacaagcctttactgcgactagattggtttttatggttcatgttatattaaggtttttgttacaacaaatttaggctcaatgattatttaacagcattttacgcattttacgcaatgtaatttaatatgtctgtttatttttttcccgttgcaatgcacgggcacccaactagtagagataccaaattaataatgtgaacacatgttggggaacatgttgttggatagacccaacatgagacaccgcaagagccatatgtgttgtgtcatcagtgatctcatttagtgttggtgttgaatccttagacctgagattatcatggttcccaacatgtgtagtagcttacttagagactgataaacgctactccgtaattgggtagttataaaagtagtttccgggtatgctgtgaaacatgtagtgtgatatgaataatcaagatgggatttgcccctcctatggagagatatctctgggcccctcgatgttgtagattatggaaatgcatggccatgccaaaggtgattgatgagtcaatcacaagttatataatctatcacaggttcgagtgaatgattgagcgattagaggatagcacatatctagccttgagcttaatcgatatcgtgaggcaaagtggatcatacaagtatacactagaggttcagccaatatgatctttatgtatgcccggtaggtcaatacgttctgctagggaccgctattgtcacgtggaccgaaaggagttttcgggttacagccgagtgtacatgaatctacagggtcgcacgcttaatgggccggaataaggggattggatggagatccaatatgagtttaattcggatagggattcaaataggagtcctatgggccttggaggcccgaatcatggatcctatatattcgtgaggggtgtgatcggcggaggtattgcatcatgtgagaaactctagccgccactcccctccccgagcaaaaccctagccgcgagcgggtgctagcacatctgcgcgtggcgttccgtccctgtacgtgtggataccggtagaggcgccgttggtttgcggtgctggtcgacgtgggagtacggcgaggagaacgcacgaggaggagaaggtcaagccggtgcgatcgactacttcctctacatcaacgcgcgctacttcgcgaaagttccttcgacttcttagcgctttcttccgctacgcagcgtgtcgagtggtaacgatttatgatctaatacttgcatggtttctggtttacgcggtagaaaattttgatttatgctatcgtagcctacgcgtattccatcaggttgtgcatcactgcctactccgctgatagctgctccacttccacgaccgtctctgaaccaacgcagctccacgccctcggctaatcatctggaacatctgcctgaaagcaaggtaatccctgtagatattgcgatctactaagacataagtgctaagcctaacatgatcaccctaatgcggaatttaggattactgaccgttgtttgaagccattgcaattgttctcgcttggtccggagtggatgtagaggatgcagaacctcgaaccacctcgcgaattgtcggtgtaggagaagtggtcgtagcagtgagtacaccggcttaatcccgaagaggtcgccggtgatcacctgcggggtggcggcggccttccggtcggcctaacatgatcaccctaatgcagaatttaggattactgaccgttgtttgaagccattgcaattgttctcgcttagtctggagtggatgtagagatgcagaacctcgaaccacctcgcgaattgtcggtgtaggagaagtggtcgtagtagtgagtacaccggcttgatcccgaagaggtcaccggtgatcacctgcggggtggcggcggccttccggtcaccacttacattgtcccggaacagcactacgaatcccttcctgcgcaactgagaatcgggaaattagggttttgggatgtcggggagattggaaccgtgagtgagattgtcaccttctcacgggccggcctccccttttattttgcactgagggaatcgggggctgctccaaaaggaaacgttggttgcgctaccgactattgcgcgtgcatttaaggaaatttaatcgtgagctaatcacgctggtcaacgggtggaaaacaggatcgcgtgattttctctcggtttccttagccgagagattatttcccaacaatcccttgatatcatcttgtcacatacaactatatatgtaaaaatgaaaattggatggtttgcattaggtcctttgaataaaccatgtttcttgttaggtcctgtagcataagttgtactttaattgtacttcaattgatctctgtgttgtgctttaattgtactttttattggaaagaacatgctaccacaatttttagtagatctaaaattttgagcattgtcaaatcgtgctacagatattggccttcatagactgttggcgctagatgtctgtgactttgatcaaacagagctcttgtttccaatgttactgatggcaaaattttattttattttattttttccttggcaggaactttgcaaaccattttcaagtttcagaagcttctgaagatatcattgtgtgggaatagtaatgttgcacagatcgacacctgttcactcttatcatctgaattaagatttggtactactctaatcccatgataaatacttatatgcaatactcaacctaaggttcttccagctgagagcgttatactgaaaattatgatcagactaaccctgaaaaaattaatgaaattttacctgttgtggtgtttctgggagctggttccatttgctcgtacgcttgtggcctccggtggcagcgcggttcaggtgttcagctacgcgtggctatgttgagttagtacggtgcgatatcaaccagtgcctttgatctgtcgcattttgatcagtgatgctcatttagtgagttcttacctgtgctagattgctagaatgctaaatggtacagtttctgtcttgatagctgcagcacctaaacctgttctacatcatcggtaatgcattttgtatattgataactcaaaattttaaggccacatacttatcggaccaaagcaatgttggaattaatagatgggctaaggcccattcgaagattaattctttgaaaaatcacaaaagcccacctcatgggatggcatgcatgtggagtttagtaccaccttgcttattctaggagagggggaccttcttaaaagggaggatgccctcctagccacttgaagcatgtgtggtggagagaagagggggaacacacgcgcacgctcacctggccaagcaggcggcgcgcgtgcacgttgttacgcgtcgaatggtccgcaaaattagctcctcactcttgcgcagatgtagcctccttttgcagttttgttttgctgcgggaaatttggatttgtttttgttttagaaacattccgaaaaatccggtgcgtgaaaacagcgtggagtccggataagttacgcgcgacttatccggttcggttacacggagtagagatcgtgcgggcgccctgatcaagcgacctatctctatataaaccgagccgtcgccttcacgcaacatacgcaaaatcaatctagggtttgcctcctactctgtgctacgccgtcgctcgtagacaactccatcccgctcgccggcgtgcaccggcgatcaggagagcaggtctccggaacctctaccttcgatgtcctgcacggggagaaggcggcaataaggtttttgggaagcgcttcgcgcgactgctccctgttcgttcgctacggctcgccttcctctctgctcgcgtgctgcgcgccttcgtcaacgcccgcaaccgcgagtagtacctgccgagcaaccggtttttccgccacctcggtacgtgttcgacatgttgtgcatatttgatccgttcatgttttactgcttagtttacatgtgtagatctaatgatgtgttcatgctagtttacatctgcaatgtcatgatttatttatggaataaattaaatcattatgtgcttataatttctacaatccaaaaaccttattataggcgctgtgattttactatggctggttttgccgatgcactgaggccggataaattcaccggtgtgcactttaagagatggcagatcagggtcactctgtggttgacagctatgaaatgcttctgggtgagtactggcaaacctgaaggagttcttactgctgatcagcagaagcaattcgaggaagccactactctctttgtgggatgcattcttagcgttcttggcgatcgtctggtcgaggtgtatatgcatttgactgacgctaaggagttgtgggatgcactgaatactaaattcggtgctactgatgctggcaatgatctgtatatcatggagcagtttcaagactacaagatggctgacaaccgttctgtagtcgaacaggctcatgagatacaaaccatggctaaggaactcgaactccttaagtgtgtcttacccgacaaatttgtggccaggtgcattattgcgaaactacctccatcttggagaagtttcggtactgcactcaatcacaagagacaggaatactccgttgaggggttgatagcgtctcttgatgttgaggagaaagctcgggaaaaagatgctgcgtctaagggcgatggtgggcagtccagtgccaatgttgtgcacaaggcccagaacaagagcaaggggaaatacaaagctcaatagaccaccaacttcaagaagcagaagaagaacaataacaatcctaatcaggatgagaggacttgctttgtgtgtggccaacctggtcatctggctaggaagtgtccacaacgcaaggggatgaaggcacctgtagggcagacttctaagtctgctaatgtgaccattggcaacactggagatggaagcgggtatggtaatttacctactattttttcagttaattagtctactaattggtgggtttatactggggccaatgtacatgtttgtgctgacatctcattgttttcttcttatcaggtcgcacgaggttccaccgtcctaatggggaatgggtcatatgcttctgttcatggtattggcacggtagatctgaagtttacttcaggaaagatcgtctagctgaagaacatgcagcatgtctcttctatagataggaatcttgttagtggctcccgtctaactagagacggatttaagttggtttttgagtctaataaagtagtcgtgtctaaacatggatattttattggtaaaggttatgagtgcggaggcctgttccgcttttccctttctgatttctgcaataagtctgtaaaccatatttgtggcagtgtggatgatgaggctaatgtttggcactcacgtttatgtcatattaattttggcttgatgtctcggctttccagcatgtgtttaattcctaagttttccattgtcaaaggttctaagtgccatagttgtgtgcaattgaagcaacctcgcaagcctcataaggctgccgaggagagaaacttggcaccactagaactcctacattcagatctttgtgaaatgaatggggtgttgacgaagggtggaaaacgatatttcatgacgttgattgatgatgctactagattttgctatgtgtacttgttgaaaacgaaagacaaggctctagactattttaaaatttataaggcagaagttgaaaattaacttgatagaaagataaaaacacttaggtctgatcatggtggagagtatttctcaaacgagtttgacttattctatgaggaacatggcattatacatgagaggacgcctccatattctcccgagtctaatgggattgctgaaaggaagaaccgcacactgactgacttggtgaatgccatgttggacatcgcggagctacctaaggcatggtggggggaggcattgttgacctcgaatcatgtgttaaacagagttcctaatagaaataaggacaaaacaccatatgagatatggattgggagaaaaccatcactttcttatttgcgcacatgggggtgcttggcgaaagtcaatgtaccaataacgaagaagcgcaaactgggacctgagattatggactgtgtctttctgggatatgctcatcacagcattgcctatagatttttaatagttaaatctgatgtacctgacatgcatgttggtacaattatgtagtctcgtgatgctaccttctttgagagctttttcccaatgaaggatacacatagtagttcgagccaaccctctgaaataattcccagttcgatcacaccaccagaacaaactaaacatacacacgaacatgtcactaaggaggatgtcagtgaagctcctcgaaggagtaagagacaaaggacggctaaatcctttggtgatgatttcactgtgtaccacgtggatgacactcctaagtcaatttcagaagcatatgcatctcctgatgtagactactggaaggaggctgtccgtagtgaaatggattccattatcgctaacgggacttgggaggtgacagagtggccctatgggtgtaaacctgtagggtgcaagtgggtgttcaaaaagaagctcaggcctgacggtactattgaaaagtataaggctcggcttgttgctaagggctatactcagaaagaaggcgaagatttctttgacacttactcatctgttgctagattgaccacaattcgtgtgctaccttccctagcagcctcacatggtcttctcgttcatcaaatggacgttaagacagattttcttaatggagagctggatgaggagatctatatggatcaacctgatgggtttgtagttgaaggtcaagaaggcaaagtgtacaaattattgaagtctttgtatggtctgaaacaagctccaaagcaatggcatgagaaatttgacaaaacattgacatctgcaggctttgcagtcaatgaggcagataaatgtgtgtaccatcaccatggtgggggtgagggagttattctgtgcttgtatgttgattacatactgatatttgggacaaaccttgaggtgataaatgaggttaaatcattcttgtctcaaaattttgatatgaaggatttggaagtagctgatgttatcttaaacattaagctaattagaggtgagaatgggattacactcttgtagtccccttatgtggagaagatcttgaatcgctttggctacattgatagtaagccttctccaacaccttatgatcctagcttgttgcttcgcaagaacaaaagaattgctaggaattaactggaatactcccaaatcattggctcgctgatgtacctggctagtgcaactaggcctgatatctcctttgctgtgagcaagttgagccggtttacctctaatccgggagatgatcactagcgtgcgcttgagcgagtaatgtgctatctgaaaggtactatagaattggggcttcactatactgggtatcctgcggtactggagggttatagtgattctaactggatctctgatgtggatgagatcaaagccactagtggatatgtcttcacactgggtggtggtgctgtttcgtggaggtcttgcaaacagatcattttgacgaggtcaaccatgaaagcagaactgacggcactggatactgctactgttgaggcagaatggctgcgtgatctactaatggatctgcctattgttgaaaaaccggtgccggctatccttatgaactatgacaatcaaacggtaattgtaaaagtgaatagttctaatgataatatgaaatcgtctagacatgtgaaaagacgattgaagtctgttaggaaattgagaaactccggggttataatgttagattacatccaaactgctagaaacctggcagatcccttcacgaagggactatcacgaaatgtgatagacaatgcatcgaaggagatgggtttgagacccatgtgagttatacaatggtggtaacccagtctatgtgatcggagatcccgtgaattagaacctgggaagaacaaaccattagtaaactagaggagagtaccaatctataccctctctaagtgaagatgcatgtactctcgtgagctgcaaggtaggttggttatggcttaatgagttctgttggctttaattagcgaagatgttatcctgcagagcattcttgaaagaactcacctttgtaagcttgactattgatcgcagtctatggagattttgggtgaatcttctaggaagcttactaaagacctaggagtatgacttatacgctccacccgaggggtagtctacagacggtatagtactagataagactctgagtgaaacttgcttgcacgagacttgcaattcaaggcgtagtccattgttcaagttgtgagtaagtgtagtttggagttctaggtggatgttcaaccttaatcggtctccatcgaaccgctggtatataaacagtacatttgaaaaggcaaatctcagtgggattttgagatttggtgggggattgttggaattaatagatgggctaagacccattcgaagattaattatttggaaaatcacaaaagcccacctcatgggatggcatgcatgtggagtttaggaccaccttgcttattctaggagaggaggacctccttaaaagggaggatgccctcctagccacttgaagcatgtgtggtggagagaagagggggaacacacgcgctcgcctcgcctcgcctggcagggaagggcaggcgcgtcgtgctcctcatccttgcgcagatgcagcctccttttgcagttttgttttgctgcggaaaattcggatttgtttttgttttggaaacattccgaaaaatccggtgcgtgaaaacggcgtgaagtccggataagttacgcgcgacttatccggttcggttacacggagtagagatcgtgcgggcgccctgatcaagcgacctatctctatataaaccgagccgccgccttcacgtaacatacgcgaaatcaatctaggatttgcctcctactctgtgctgcgccgtcgctcgtagactactccatcccgctcgccggcgtgcaccagcgatcgggagagcaggtctccggaacctctgccttcgacgtcctgcaccgggagaaggcggcaataaagtttttgggaagcgcttcgtgcgactgctccctgttcgttcgctacggctcgccttcctctccgctcgcgtgctgcgcgccttcgtcgactcccgcaaccgcgagtagttcctgctgagcaaccagtctttccaccacctcggtacgtgttcgatatgttgcgcatatttgatctgttcatgttttactgcttagtttacatgtgtagatctaatgatgcgttcatgctagtttacatctgcaatatcatgatttatttatggaataaattaaatcattatgtgcttataatttcaacaagcaaatgtacatgatacagagagaccatttctgaatttaacaaatttagaaaccaatgtagccatggtccagaagaagtcaaagaaccaatctgactgtatggaggtgtagatgggatcgtgtttgctgcaccaatttctggggaggcatgcgaaggaatgaaagggtgcaaaatggaaaatagcaagaggtggttaaacaccatcatcatgttgccgtaagtatgtaattaggatgctaagcataatttagcaaccgacaactgcatgttttcttagggatttctactactctcgagggatctgtctaagcatttaatggctgaggggtttggctaccatacaggtagcctagcaattaaattgggttagtggagtgtatttggatttttcattgtgctctgatttaatctgcactaatagcttcaatttttcacttttgaacttttcaagcaaattgtttgttttcatgcttctatgtaattggaccccgattaattaaccattgaatttatgccgaaagtacatggcaaagattgtgaaaaagaaatggagtagtactatttgtagatttaaacatatataatttataaacaatttatatgtagcctctgtaagttggttttcttttgaattcaggtaaggtttatctctccagtctagacatcagttttgctacactacagtgtattattcctaatggtatatattacaattgtctatcagaattacgatggtggcatattcaataagatcgttgcttgaggagagaactgggagaatccaaaggttcctaacgaataagttagcttgttttttatttactaagataggcatatggttgcctggtagtgatgatggttttgatgggtaggttttctctaagatggaagacattaatgctccataagcacgatgcaatagtattgtatctaatttagttcttaacgatgatgtcgatgctaaggctccagaacataatttatttatttagatttttttctttcttttacgtttttgtgcttaatacttgtgatcttgtttgaacataatgtcagaaaacttttgaaacatatattgttacttttggttgtttgctttacattataaataatgtcgtagcgttagcacggacatattactagtaaaataagtttaactaagtggaagaaacataaagcactctattactattcttctaatatacactcaaatcttagtttacatctgctaatatacaatcatgtggccaataccccctaacagtgtcctcctggtacttcgagagaccacctgggttggcgagatacttacgacaacctgtcatggccgtccaaccggggctacatatagaggagtaccctcccttcgaatttgtcttaggaatatatactaacgtggagaaatacccatactgagctatcaccatcagcggcccacctctaatgtcctgcaacatatatgcccaattaatgatatttaataatctaagcaccatgctaacattactaaatactactctatagccgtgcacccgacatagagcaactgataaattagacattaaactcgcaccattacacctctctggtaggctacccacacaattcatataatgcagatataaagtaagaccagtactaagactaagcaaagcacgaagatatataaagaagagtatttcattaatacggaaagtattacagaagagattacaagagctgctagagccataccgaaaactcttccgaagactccgaggactccgaacactattctatactactacacttagcattataccactaatactaatgtatgaagaggaattgagcttgcttgagtgtgttgagaagtgaagtgaactcctccttttatagggtcggtatgacggttactgatatgcgaaatgtcgattttacccctgtaaccatcatcagcaagcaatcttggatatccacgtgtaaggctaggctgattggacgccgccagggttcggccgaacctgggctggcccaacaggcctccagcttcggcagggtggctgacaggtgggacctcatggcgattttggcagttaaggctgtttccggcggttacacttgacatgtgggccctccgtatccatttgcttgtttaggagtgaggttttctccaatttctctttattttatttgataaattcctgcaacatgttattctccaagtacaagtggaaatatattatttgaaaacaaacatgcattgtaagcatagctaattcttcattattttagttctattggcagtcaaatattgtctgtaacaaccgtcaacgaaacccccaagcttaaacctttgctcgtcccaagtaaaggacgaaaggaaaataaacttggttgttgatcaggagttgctaccattgttatatttaaaatgtacaagtgcatagtttgagtactctctctctcatgttaagtaaatgtgcacggaggcttacccttacgcctaaaaattgtagaacacccgcttctcaccaccttaggcaattgagagacagaacagatcaactggagcagggaactttatactttgtaaccattgcctactcataggttgcacaggagaaactttaattttactagatgctagggcgcgccattgcgcgctgcctgcatacactaaaatacgtccatgtactaaatcaatcaattgataaatatattagtaacatcatatattctatattaactctcctgtgtatatcaatgacaccagacttgagtcagtaatccattctatgtaacaaatatcccatgtaactacaaagtaatgggcactttattatcaatgcaaagcatcccctactaaaacctcagtttgttacactattagttcaaacatgaacacaatgctttcattatataaaaaatataagtaattccgcgtacaaattgctttggtacatacaccaagagaatgcattggtgtcataaataattgatgacaaatttaaaggtcataatctttgcaaataggacaattgaagaacaaagggctcgactttccaatattagattcagcatcgcatcacatcctgaaaaatgtaaacaggttgaaatgaaagcaaacattagctaattaaatcacattcaaaagaacctgcagacctgcaggtacatactaataccctaatagtaacatcttatcatagtgcgcacacactaagggaaaaaaggacaaccttgtttctaggcctatcagtgctagaggaacattgatccatggatgtatttttatgaggtagcagcaatatataggagtattttgcaaaatcacattcatcaagttataaaccaaaaaaaaaaaggattttacccttgaagtaatgccattctatcttctcacagctgcagttttgtagccatatacaggatagtgtaagtggagccaaaattgtagcatatctattgtgtcatttgtggaattactaatattagtatccttcaagctgaaagtgagaaaagcataagtaacttaataactaataagtctccaaaggctcatccatcttttactaatataaaaaaacatagtggcggtgatggtagcattctatgatgaataatattgtactatctttttggtaaatgagtgaatcattccattagatactcatctgtatatgcatgaggccatttcatttaacgtgaactcataaggaaatattttagatttggggataccattttttttctagtttagaacttttgatatatttatgacaaccatcgacaaaatactgatttcaaccaagtataacttcccaattttttgctgaaaactaatcaacgtctagcataagatgcagggatacgcaaacatgatttacatatttataaaaatagtcatgtgcagagcacccacacaataccaagtgaccgctggcccttttgaaagcatgaaagagcagggaaaatagatggctaaatccacaatatatacatgcattttttgcgaggattatatacatgtaatccatacacctttcttaaatgaaatacataaacaacttgcaaaccaaaaataaaagcacaaagggacgcttaaatacataaaaagaagatatattgacatttaaaagaaatcttaatcgtatgagtaaaagctagagaaatactacct

SEQ ID NO: 5322 - DNA, 32331 bp, Oryza sativa
  unsure (1)..(32331): unsure at all n locations
atatccactttctctaaagggtcagccgacgaaaaaccttgtcctaatttttctacttcatcaaaatcatcaatagcctcccaaatatcgttcttatttgaccgatattgctctgcacgtttttgtaaccaatctaaattgctttctttattcatttataacatcacactactgagccgagctgcagaagccggctttatagacacgggtacaaaaccatccttagtgacaataacataatcataatcagaaagatctaagcctgttaaacactgaatattaccatactgccaatcaactgaggcatcggctaaagcaacgcaagccgaagtatctgcatgaacaacctctacatcatcacctacccactgtattaaagtttgatgcaaggtagaaggaacacaatggtttgcatgtatccaatcacgacccaacataacattataattaccttgcacctcggcgacgaagaaggcagtagggagagttttgctcccaatagttagctccatggaaataatgtccttagcttctgttggctctcccgtgaatccattaagtgtcaaattagcttttagaagctcactgtcctctctgcccaatttcttaaaaactgaatatggcattaagttcactgtagctccaccatcaaccaacattctagaaataggcctcccattaatatgccctttgatatacaatggtttcatatggcggctcgattcatcaggcttttcaaaaataacatctttaggagcaagacataattgtgcaatctcttcatcgacgaccctaaattcagaaggtagtgtaaaaaccatattaatatccattctttctggaagcggagagccatctctaattaccggggaaccacattctaacagatcatgctcttcatcactgttttcttgaactgaagctgcaacttgtttcgccctccattccctgcgaacacgtaccatgggttcaggattgatatcattgaaaatttcttctctcatcttctcagccttagactgtctcaactcttgtgcgcgtaatctttgcagcctccgcttccgagtgtgtccaatatctggagggcaccattggagctgtttacctttgccgggctgcatagacacattttctccacatgaaccaccaccacaatcagctgctggcactgcagcggaagaactgttcatttcggcaggcacggctgtgattgcggttctgttcatctgggctggtactgtagcagtcggagcactgttcacctgggcctgttctgtagcaaccgcagtactaatcactttgttactcacatgtgaattgccgctcgtcgactgatcattttttgctgccaaaactgcactcgaatttcctcctgaatcgccaccttctttcacacgatgcaccttattcaccaatccaccatttttctcatcataagaccgattcctttgattagatcggtcatccctaggccatgacagcctatcaaacaccggcctccttggtgcttcccaacctggatggaatggttcaaatggcactggatggaatggtccatatggcactgggtggaacggttgatagggcatcggatggaatggctcataagtcattggagcaggaggcacccatggaccacaccaaccccatggtggacaaggaggaaaaccaacaggaggaggaccccatggtaacggcatcggtggcccaaaaggaggatatggcggtgatgcatggaaatcctcccatcgacgatccggaccctcaaacccttgcattggaggtgatcttggtcttttaaaattatttggccggctagcaactcctttgccggctcttccctcatattttgccgaaaggtctttgaatgtgggcttcggcttttcaaccctttttgtagctttgttcctactctcattaaccttccaccgaccaatttctgggcttctaggtttaatcatccttggcaaactactctgaccagacccagaactaggagtcttcactgtatgcataccaccatcactaactatcacagctttatttttagtggattcggcctgagatggccgaacaagtaccttgctattctcaaaatcaatcacattgacaggaaagggattactgtctagttgcatttttgggctctcagcaaacctcaatcgtccttcattgatggccgattgaacctgtcgacgaaaaacattacaatcattagtagcatgcgagtgtgaattatgccatttacagtatgcacttcgtttaagctcctcgggtgatggaatgacatgaccattaggcaatttgatttgtttttcttgtaataggtaatcaaaaattctatcacacttagcaacatcaaaagtaaatttcatttcttcttgccaattcttttgggacaccggcttcaaagcggagcaaacaaatggtttagatttcgatgcccatgaccattcggctacacacatatccacattctcatcatccgatgacatgagatcatcgtctacaaaattgacagggcgactagatttatcattagacctctaaaaactcttggactctttagcacggctttcttgagccagagcttgttgtaatacctgactaacatctaaaatgattttaccctctaacttttctttaaagtgtggaagtaatccagaatgtgctagttcagcaaggtccttgtcagataatgctaggctaaaacatcggtttcttgtgtctctaaatcttctaatataatcaacaacaggctcattatatttttgcttgaccgatgtcaggtgtgctaacctcaattctacatctccagtataaaagaactcatgaaatttctgctccaactaagaccatgtatgaatagaattgggtgcaatagcggtaaaccatgcgaatgcagtactagacaatgataaaggaaatagcctcaattttaaagcatcactaggaccagcttcaccacactgtgcagtaaactgactaatgtgttctaaagttgtcctaccagcatccctggtaaatttaatgaaatcaggcactctaaaaccacgggggtatggcactgtgtcgtaaaaatcaggatatggttttcgataagtgcgtgctctactcttaggttccacatcaaatgtttctctaaaaacactgaccaattgctctctaagtgtttccggcaccacatgtggctcggccataggccgattaggggtcacatcaaattgtggttgctgctaaaaaatgttaggctgtggtgtaccatgcaaaaattgtgtcatttgggtcggcggtgtatatggtgcgtgttgtaaaaaactattattactattaggtaatgcaccatatgtaatgactgaaccctgtggtggaatacgaggtatattatacgccacagtaggatatggaggcacaaatgtactttctaaattcccatttactcggctatcataatttgaattagtgataatcggagccgagctagctgaactatttggctgtggcaatgtgaatggtgtgcccccctgtccaacatcatgctgcatgggaaatggcaatgctcctgcactaccagccgaacccccaccattagttcggctatatatttgtgtcatcggcgtattttgttgtgttgtaaacatcgccgatgcatctaatccttgctttgatttaccagtagtgctagaagttgaagcattagtattatgtgatacttgtcgttgtgtgtccttcccatttgatgcactaataacagatttaacacaagcattgaaacgagcatctaatgcgtgatccatatttttaataaatacttcatgagtattaaaaaccacagcactaactgattgatcaatcataagagcaatttgttcttgggtcaccggtggatcacttacagtgggttttaccttaggttcgacatagacggatggcagtgtagcctccttctggacgataccttgcctcgtcttctgaaagcacaataatgtcagccgctccagttcttgtttctttctttcgatcgattccccagcggagtcgcggagtcgccaaaatgtgttgccaccaagatttgccctaggaatgcaacacttgatctgtcctgaaaaagcaacactgaagtttcacctggtacgattgtgtgtgcgtgtaacggaatgtaggagatggcttccttgctgtggcacagatgcacaacaagcctatcgcacagcaagccaggagcaacacgtctcctgctgctgctaccagccgacgtgcacgcagcagcggctgctctgccgcggcggcgtcgccaccagcaggccggagggactgcgacgacggtagacaccggcggccgtattggggatcgaacaaaacaacacaaaggaaagcaaaacgagtaaaaggaaatatgacaggaattttgtatcgattgattgtgtattgtctgtttccaatcggcctagacccatatatagggtgcctggtctttggcttggtcccacactaattagattagagatcacatggtattaaccaaaacaatgaaaattaacatagaaatgaaaacgttgcatatgcacagcgcctccgacttccttgcctctgtacgtcacctctatgctgccaacttgatcatgtgatcttccatccagcatcacagcatattaattttgttctcaagctttatcttccatagaaaatgtactgctgctacgccaggagccaggaggcaaagtaaaactggaattaaaccatacatgcatgcatcacattcaggagaagcacttgcccatatattctctgataataacctgattaaccattgaacaaccgaattcaattaagtagaagaataaaaacattcggcaagacctcgtccaaataaaataaccgaataaaaatcatcggctgtcaatttttgatatcaacacacacacatatgtacgacgttgaagagaagaaaagaaatgcccatgaaaattatggtgagttctggactgacttggttatatggtaggtcttacatcacattattatttagttttggagtggttggacgaaatagtcgtggctgggatgttgggcttggcttgtttgggtcgatagacggatgtagaatggaaacacccggacgaacaattggaccttccctaaggtaattgcccaagcatatagcatttaataaatatgagaatgcatgaatctaaattagcattactaagcatttgtcataagtgactagggactcatacgtaattatgggtacaaaggaataaggtaaacaatagtcaaatgcatgtcacaatagcaagtaggatattcatcattgcatacatttttatttgtaaacaaagtaagttcgcaattgggatcaacatgcttaagggaggggtgatgacttatctgctcaggatagtccttattcttgataatacttgatccaccttcacctcctggaagttgcatgagttgcctcacgactaaccgatacacattctatgataggcgataaaaaccaatattcaaacaacaatcaaatatgctcaaacaaaatataaatgttggagtcatacctagggctgctcatactactctcgtttgcttatggattgtatggtgctaagagatctcaaaatggcggtagcggcttatataggcaagggggaaaattgaggtagcttaggctctaaattactcaacatgcaagcaccttatgggcaagagagcttaggggctaagacttcttaatccttctattgtcatgatggcttatttaggagctaaccaacacacatgatacatacattttgttaacatgcggtttagtctacttactgggctatggatggactatcactacagtggctccactctacataaaatgattggcactagagacgtgaaatggctcatagagtaatctaaatgtaatgattcaaatggacaggctggggattggcttattaatggagattggaaatcacataacattagcaagactaacgtatatggttgatttatttgttggcacagtttagttaacttccgctagcattattactagaattcttcatgacatatgatgggtagattttttctaattgtaattaacattcaacaaatatccatgctcagtatgttagattcgtgtggtccataatattgtagttaaggattatctcattgcataattttacaataaacaatcctaagtcacagttgaactacaattatatgaggtcaagatttagaattaatatttttctactatacatgcttatcatgtactcctctgtcccaaaaaaaaaaaaatctaattctagagatgtatctagacaacctgtatgtccagatacatccctatgattagactctttttgggacagaggaatgcaaaaggtaggctattgttcttctatataatttaaatggaatgtagagtagctgtgagtgtaaaaatatactagtattggatcatttactgagcatgagctatttactgttttgttaattaatgggtgctaaccaatccaactatatgctattgcacaaatcaactttatttggtggttcattcataatagctctgttattattcctcacaaacaatctaaggactgatctatatgtattcatatttttagtgacaaaaatataaggctaaaattcatttatataatttggaagtcatgtgtataattatatatggacatatattaataaatggcactagtatttcctaagcttcaattaattcgaaacaatacttctaattgatttacatggtttctacagtggcacaacatgttaaagacaattattctcctacctagtttactgtacaatgacaattttcatttattagcacatttttaggtttgccattatctaaccatttgacattagttattttataattataaaataaattttattaaataattaattatataccattggaaagctcctaaatttagatgaattcaggttcaagtttcactcaaatcagagctaaaatgagtgagatatagtcaaaacaatattcaaatttgaagtaattccaataattgtgaaacagtactgttcctaattgatttatttttattccgaaacattatccacaacctaccatggctgacatgtggggtctaaggtttatttatctgatttaccaaattatttctcttaagaataattttgtagaccaaatgacaggtgcttgactctagtcaaaatcggcctgaggtcgtcttcaacctctggactgggaagtagacgcatgagcgttggctggtgcgaggcggactcggccggggatggctcggctacgaccaagggaggtgcgaacgggttccgacggccctccacctgtggtggcggcgcaaggcggagcaggggcgagcgttgcggcatggcaacgccatggccgagctcaaggaggttcggggctttggcgatagtcggggactccggccaatttattgaatggaggagtgtacagagcgtcttggggttcgattttgctaataaggtgggtgagaggagctttgggatggcatgtccacggtgagctcgacgacggagcaatgtacgctcgggtctgcatggctatgggcgctattcgccaaaattgttggaggcgccagcttctatggcactaggaagaggctacaagagctagggattaccatgatggcgtggaggataagctcggcaccttgctcggtctcggttgattcctttccatagtagtggaagaccaggttttgatggcgccctgctggttgggtagatcctctgcgcgtgagccatgtttatgattttattatttcagatcggaaaggaattcttgaaaaaaattgactattacatatcacaattgtttgcaaggggatgaccagaatatatgaaaatgccgtttggaactctggagcatctgcacccataatctgcaccgttggatgcgcttcaggatgtgtgctgcttaatgtgcctggctctcagcaaatgaaggttgctacagagaaaagaggtggggaaggtacaccttgcactgcagcattaacattggggcagctactttttgctgctcaattcccaaccggcccctcacccctgctggccgcacacacaccagagcccctcattttaaccctatttgaaatggttttgggagttgagggacacatagtatctgtatttcggttcagggatgaatttcagactcaatgacaaattgagggacctgagtgaacttattctggtggaaaataaggtgggctaggtccctggggaagagggcgtcaggtgggtttgagggatggatgggaacatccagattcagcctaaaagatcttatagactttcattcaaaatagtttttgtttctaaaaatccatacacattaaatgtctataagaaatacatcaaaataatttctaaatatctcagaaaatttcataatggtcctcctgttgcaacacacaggcataatgctagttattagaaaaacaatttttgtctacagaacatattcttcttggaaatgtaacatctaaaaatttacaggacatccagttccacaaggtcaagatttgcatatgacattttacaggactgttcagttccataaggccacgatttggatgggcaaaaaccctgcctatccacatgtatgggcatgattttagttcaatttcctgcctatacacatgaatgtgccaatgagatgtcttaatttctcctccagagtgaatccatgttaatatatgataatattaagattacatccaaaatatagcatcctctaaattctgtttattctggattccaatcatctctatcacgtgtcccatatgaacttccatttttctatttccccttacttgttatagctccactcttttactaggctgcaaataagtgcattgctttcagtcataatatttatgactgaatcacttttattttttgttattataccatgacaaacattttaaacgatgtccgacaaatatgaacaaggagaggataagaacatatacagttgcaatatcaatttgacaataaaggttacacagtgactgttgtaagggaacacttaccggccaagatttcaaattgcaaaaaattccataataattgaaaatatcatctctgtcttgttgacaatagtttggatattttatttgcttttgagtagcaccagcagcaagttcaaaactttgtattagaataaaagaaagcatatacaagattggataacaaatgcattatataatgagatattacctgacaattgagtttcttgtaacctaatgttcatatgtgaagctgaagaccgaaatatgccctactgtgtcaaagtctataagaattattgttccttgagggagctatatttctaaaacctacaaaagataacatgatcgtcaaaatatttaaataatataaaggtgtatggactaaaaaagcatggattaagatttaagagcataggatgattgacatgtctattgtacaacacaagtaatcacactcttaacactaaatttaacttttctttttgtgtacccagaacatctcattacatctccaaacttttcaagtgagattgtttgagccaattttttacaaattcaaaatgcatcttgcaactgaaacaaaaccgtgcgcacacaaaatatgtgtggtacttaatatttgtagtcctgtattcacatacaaactgcaccaaataactactatcaatgctagaaagattcacttagaactggccatattactacaatgtttgtacgattgaacatggatgtcattcatttaccttaaaaagtaaaagagtctaaacatgtaccgaagactgaatgctggcatcactgacctaggattattaattatcagacatgtcaattaagcacttataacactgaatatcgaagttcggagatgcaattatccaaatgacaacatggcaaaggccaaggggacctccataagtgatgctaatctacttttccagctaatcttcttggcagtctaacagccaatcaactttccaatatgaatagttgccatgtcatgttagagattctttagttcacatattgtttagtctaaaagagcaaaataatgattgtatgtgttggctaacagaacagatcaagcacgaaaataaactgcttgtcgcaattagttcaccgacataagagcagttttgcagttgtcaccaaaagagtgaaacctataattgtagaattccactgcttcctgtaagtctttccaaattctcattctggagttccttcctcaccactgacacattgctccaatgaccagcatcagcatagaggtttgacaaggctattttggatgctccatggcttgggtcaagctttgacaattcttctgcagccttttctcctaaggctacatttccttgagtccttgcagctgcaaggatacaaccccaggctaccacatcagctttcattggcatcgtcttaataagcagttctgcttcttccaaatacccagctcgacaaagaagatcgaccatgcaaccatagtgcttaatttctggttggattccatattgttgcctcatggactcaaattggcgcttcccctcagctaccatcccagcatgacaacatgcatttaacacaccaaggtatgtgattgagttgggtttaatatgggtggtgctttgcaactgtgaaaacaattccagcgacatgttcacatagccatggatagctaaattacagatgatagaattccaaggagacactgaaattgacttatccttaacatggttaaatagctgaactgcttcagcaatgctaccacactttgcatacacgttaatcagtccagcgctcagtttatcagtaagctggattgatctgctgattatgtagtcatggatccatcttgcttgccccaaggtgccagaattggctactgcagacagagcacttgctaaagtgatctcattaggttcaacaccagcatctagcatcgaacagaatatctgcaaagccatgtttgaattcccactctggacatacccagatatcaatgtactccaagaaatggtgtccctctcaggcatgtcatcgaacagctgccttgcttcatgcactagattccttcttagtaggctagccataagggcattccaggaagctacgtgtgacttgtctgacaatttgaattgcatctgggcatggtcaataaaatcacaagacccgtaataatggatcagggtagcctgtacaaatgcatgagcgtcaaaaccattctttagaatgactgtgtggagttgttgcccttctgagacagcggaatgtcgagaacatgccttgaccaaaccaacaagtatcacctcattggcccttatgcccaccgtacccaccatcgcaacatatgtcctgagagcctgcagtaggaaatccgcacacatatatccatctatcattgtcaaccaagagacctcatccctctctgggatcacaccgaacacctcagcagccatgttaatcattcctgccttgacatagcaattaagcattgtattccaagtgacagtgtttctatctggcattagctcgaatatggaacgggcagaaggaacctgtgacactgctccatatgcatggaccaggttggtggccacgatgacaaatccatcaagcccacgccgcacggcaacgccatgggcagcaccaactggtgctggtgccccgtggtcacaggccatcgccgtgagcacttccgcaagtgtaacctcgttgggctgcacggcctcggtgagcatatcgcggaagacggccagggcgcgctcaggatgaccggagcgcgagagggcggaaatgacagtggtgaacgagaccgcgtccctctgaggcatctccgcgagcaggcactgcgcgcgttcgaggcggcccgcgcgggcgagcgcggagaggagaatgttgtgggcggtggcgtcgcggaggagcgggggtatttcatcgaacaggtggtaggcgaggctgggggcgacgcgggagtagaaggcgaggagggagttgcggacgaaaagattggaggtgagcaggcccgacttggcagcgagcgcgtggagctgctcgccgtggctgaggcgtgcggcggccgacttgagggacgagacgaggaagacggcgagaggtgcgccggcgcgggtggtcatgcgcgactagagatggcaacgcaacggggtgccgttcatccccgggcgggagtgggacgaggccgccgtcaccgagaaccgcgagagcgagcgccgccgcgcttgcgcgtcggaccgtggcgagaaggtgtggggattccggtaagaagagactagttacatttggttgactactgagctgctgcgttgagatggcacagtatgggctgaccaacaaatcgattgaattgcgggcccgttaacggtgaacggtaatggggactgcagtgcagtccctcggttaacgaaaaccgtcagtcctaggcgcaacgtgaagttaaggaattcagggttgagtttgtcacgaaaataaaccaaaccaaaagttagtattcataaattttggcatattttagtattactaaattttggcaatgttagatatgtttagtttgtagcattatatgtttagtttgcagcattatcaaaaattacagtattcgtgccaaaaaaaattactagtatttatgtgagaagaaacttttgaaatgtcaaattttggtagagtgatgatacaatattatgtttagtttgttatcgataacaccaaaaattattagcattaaaacttaaaagtggaagcaaggtgaagagctcttaattcatacttacagaacaaaaattattagggttaaaacttaaaagtggtagcaatgtgaagaagcctttaattcgaacttttacattggttggttgaggagcttataatacaatgtctatcttgacgctcctaaatgtatcgttgagtggtacttcttaaaatatagcaacttctaatatttaaaatttgtcataaaacataataactccaccattattctcttctcggtcaatcacaaactttcaccattcaattttttccacctacatctacttttcaattaatcacaacatccgtttcctcaattagttttatctactttctttatatccggctgttagcattaaagatctgatgtattagattttagacctgcaacgatatatttagcaaattaatttggtcttaatatactatgtattttcaaagcttaataaccacaatgatattccacacagaattttaataactggtgtcttattttactcttaagaaacaatggctatataaaatttacacatgccccaacgacagaccacatttaatatatacataaaatttgcaaccatattattccaagcttgtgggtggttccaggatcacctagaaatacgtagccaaagatacatgtgttaaaaagaaagaaaaactattcttaggaagagaaaaaatacatttgtttgcaagggtaacaattagcaaatcatatccttatgtcatgatgaactaactgtatattatctcactttaacaaaaataaaaaattatgtaagttagaccatctaaatgctaaatgctagataggccactgcccaaggagaaaaaagaactatctagagagagagagaggcaccagtaggttcttgataattttagctattccatcggaacagaggagccaactcatccactactgtgtatggggcaaatggaaaaaattaactatttgacactcttcaattaatttaccactcggatctatatgtcattaacacatagatgacaaatagttaaatgtccctggcgcttcacccatagctttttttttatactttctcatcgtaaaatccttttggattattgaagcaatttctacaaacgaacgaccttcaatttagatatatgatgatcacgaatgatgtatcatcatgcatgtagtaggccaagacgatcaattctaacttcagctgatgcataaacactactgtcattttcattcacccactaaagaatatacaagatggttaatttgttataggccgtcctcttaacatgcaatgtaatttggctttgcaaacgccacagatactggaagggtaaatgatgcacaaagcatccattttccaggagcaacgagccgcactctatgcatttcaacatcggacacgnnnnnnnnnnnnnnnnnnnnnatcctctgcaattcaaggggtgtgtgtcaatcgataaacagaactatgtatacaacagttctaacttaaagaaaaaaaattttggtaatactcgctgcttacctcatggaagtcatattcaggatcttctgctttggagaatccatacacgtgtatatttggcattacacaagaaggcacagccaaatggtggttccatgagattcctctgaacacatctggggaaacagtgaaatcataaaataattaattggtcctgtgattagcctaactgtcaaaattcccatccaaaaaacatcggctgcatattggccattagaatggacaggtaaggttagaactaaatttcaatgttcaccctttttttgcataaatatactattttttttaaaaataatagaatatacctgatttgccaggtggcatgacgacactgctgttgccgctcggcagcagacggtgtcaccatatggccaggtaagaccgaccgcctgatgtccctaaccgagcagcagccaatgcttggttgcatgcatagcagcagctagctagtcaattagctagatttgatttagttagctagctcgttagtcatcattgcgaatcgattaactagttcgtggatgttgtcgccaagccgggaggcaagaccggccaagtataacacgtgctgccttgccgcggggcgacagcacatggtgtaagagaagaagaaaataataagactggtaaatgtcccaaacgcccgtctcatttagttcccaccctctcctccactctcatcaatatactccctagtccctagtccctaccactcatagactttcttcccctatttagtttctatattggtaatgccattttgtagaagaaagattttctcccaaacaatttttctcccaaacattcgatgcgtattcacatttgatgtgtattctgtaaatctgcaatgtgtaatgccatataatcaatgttataagatgcaggttacaaattactacatttcagctgatcacaatccaaaaggcattgtgtgttcttactcttctatagtaaaaaagtgagaggagagaacccgacatgaaaccgtgcatatcctttgtaatatacatccccaaaattcaacagaattttagtggatgtttcacaacgggcgaatgagtgaattaagccaataccatactagaatgaaatttgttctctaatataatcataagaactcaagataacagttcaattaagtaacacaaataatgaaaacccacctaaaaattctgcagcatcattgggcaaattcattactacttgtgtgactggatgcacatgttggcttgagtatattgaactgataaaccttctagcgtccatgttaaaaacctggttcgacaaaacaatgaacaaatatcaacaagagccataaagacggagaaaaaaatccacactaaaccattagatacacttgaaacaagtcattaacaaacgaacataagcactaaaatggtgtattttctaatttctagtggtgcaaaaaggatttccaaccaaatgcttttctgagacagcggtaagctttgatgctaggttgctaacaatgaactttatgtaagctacaataaaatctgaaagccatcacaggaaatttattaataaatagaaagacatgagtgctatctcgcttatctcatagttggaactacctcgatttttctctcgagcttgttaagaacaatgtttctctcaaggtactccactgcagtggggtttaggtcattcgcatagacatatttgacctttcttgcagctgatattgctattggaccaacaccagagaacacatcacctgcataaaggatgtggtagcaattgatctttcactcactacggaaaaggttataatcaagtaaatattgtgaagcttaagagaagatgaaattaaaaatgtaatagttactgtgaactactccagaaccaggggtgcatacatcataaaacatactcgacccagatgctcgaccatattacattacaggagttgtaaaatacgattattcagtacatatacacaaatactgatttatgtgatcatcagaacacaccccgtaaatgatgattacattattttcttctacatggaccatttggttgtccacaaaagctgagcatgatgaagaacatgcatggacactgattatcatatttaatatatgttcataatgaagacagcaaatgcttttcatgtgaataggaagagaactgcaggaataaaatggcagtcaatcttttgctgtcatgtttatacaagctaccagaacaatacaataccaatgcagaaacactgcaagacacaatatttcaacactaaacagcgaacaaatacttgcccaacctatggtgcattgctatgtatactttctaaaaattgccgctgcccctgaggaggtatcagggtcaataccaaaagtaaatagtacacatgtttgcacaagtagtggcacatgactatgtgtttatcttttctgcaaacacagtgtaaattgctctaaatagaaaagatcgatatcttgaaagggaacaaagttacaaaacaatgtagactgtcatcctgattccacaggccacaaaaacctctgttataataaaaagcagggctagaacttacaaacaacatcagaatttttgaaaacatggtcaacaagcctctgtctttctgttgataatctagaattccaataactgcataagaaagttgttagccattcattattgagaatcggaaacaaaatcataaattgtgtaaaaaaacacgccaaacagttacatttggtggtctcaagaaaatgttaagatatctaaatatattcttgaaatcagacagaactagctaacaaaaggaatgtaactagagtatcatgtattcagatttagtgatcaagttcaatactccctccgtcccaaaaaattgaggcgtataatttttttgcagtgtcttcaatgtaaaactttgaccattaatttcatacatatatcatcaaaaactacacaaattaacatcatatgaaaaatatttttatgaatctaatgatgtcacatgcatgacactaaacattatattattagtacactttaactgttagtcaaagtttgcaaatgttgattttcctaaaattgtgggtgcattatatgttgggatggagggagcagcatagagcattgcattttcagagtctcggtttcactgctaaaacaacatggaacaaaatgctttgcaaggaatagtggtggccaaaaatactttctgaaacatcagccacgagtccctgacatccctgagaaccactcaatgtaaattagaatggggaaattgtgttcttcccctattttcaaacacaattgtgattttacccctctttttttactttatgattttgccatcacttttgtaaccgaagctcccgtttgcccctggtttggatgtttgttaggtgtgccaagaattagggagttaaagaaaagaaaaagggaatgaaaaatgatttacagaataaaaggattgttatacccccaaatacaacatcaattagccacacagcccttacatgtgtgttaccccattctccataccaaaccctggctctctcgtcatggcaacagcagcagcggcgggctaatttcatcggtgagcgggcacggagcagcaagcaggcatgagagcgccgtgcggcagcgcgagggggcaactaaacgcgcaggaggaggggcggctcagcgtgcaggtagagacctcttctccctgcctcatctgctggagcccctcgctgtttaggccataaggcggtgaccctctgcagatatcgccgccaggatgcgaccaccatgtggtctcctaaactgaagctgcatgtttctggaaatactacctaaaattatgggtattcattgtttctaaaatttatgagctgtctagaaaatttccaattgaaataatgtattgaattttttaattctatggctaattagtcgccctgtgggatacatgtttcagaaaacaatagagcagagattgtagcaacagaaatttgcacagaaaactagatgaatgagcttgtttggcagttggcagatctggttgtcgaaatagcagcttaaaaaacagtaaggttcatggccgttgtttcagaggaagaagagaaacagagtttttggttgaacatgtcccagttggctaatcacttgtcatctgatatgaagaatgatgttgctactcatgtgatttggagtctatacatgcaagagaaaatagaactgatgaatttgttgttgcaagtggaacaattgaagtcatgttgctcaatgacttttgcttgaatatttatgaagttgtcaaatgatggctgaaattatattgaaattctgttatgtttgtcaaataaaactcgatcagatttgaaatatgtgaaattcaagtcagcactggggcaaagttcttgtcaaaatgcttggtatcaaaataagggcaaaaacagaactagtgtacaaaagaagggaaaatatgcaagggcatacttgtctttttaccatatacttaacaccattaggatgacttaacagacctggggtagaccgaagcttcagttcaaaaagtgagggaaaaatcacgatgtctgaaaacaaagggtaaaaagacaattgcacttgaaaatagggacaagaatacaattgccccaaatggaatacatacaccagggaagcaaatttgacctccaggacgtctaacaacaccaagtagtgtttggtttggggactacgtgggatgggatgataccatccctgattttagagatggagcgatcccatttacttgtttggtttattggatggaatgatcccagttttttgtttggtagaagggatgggtagggatgggatgaatgacatttggagtgacgttagcaccatgttactcccagcgagaaaaggagcgaagctgcagaaggatgagcggcgaccggcggtgtgagcggaaggaggagcggcgaccagtggcgcaggcggaagaaggagcggcgctgacatcagagacaacgacgatatggacgtggtggccgcagaactcaccctcgcccgccatcgccgtcgccgccgccttccccgccatccccgccttcggattcgccgccgccaccgctggattcgccgccgttgcccgaggccgcctccggattcgccgccgccgccctccccatcactggatctgtcgccgtcgcccgagcccgcctccggattcgccgccgccaccgccagattcaccgctgtcgcccgagcccgcctccggattcactgccgccgccctccccaccactggatctgtcgccgtcacccgagcccgcctccggattcaccgctgccaccgagccatccccgccctccccgccttcaccaccgccaccgccggattcgccgccgtcgcctgagcccacctccggatacgccgccgccgccgccctccccaccaccggatccgccgtggccatcgcttgagcgcgccgttgttcgtcgagcgagcgagcacgatgggcagaggagcagagcacgacgtgagcgagcgagcggggcgaagcggcacctcacgccgtgcgctcatcccaggtgggatgagttcgtccgccagatttttccggatggcttggtcccggatctgagaggaatattcctctctaggaaccaacccattccactcacccctaaaccaaacacctctaaaagtgggttcgtcccgtcccatcccatcccatcaaccaaacactacccaagagaacaagcaaacttaagcatgcacttatcatgcagaattgataaatgagaccatttactattcctgctacacatagtttccaagtaaaatttagaataaattgacaaaactcaaacactaacaagctatggttccatctccaagtaattgagttttcgcttgaaccgaggttttaaaacccaatacaaaaatgcaggtctcctttgcaacgctggtagttggttggttattgctggttaccagaacttactggaaatatttgaatccaaataatgtttaccggccagtgaccggtagccggacctattactagtcagtaaccaggcagaataaatacatctataagaaatcaataacattctaattcaaaattaaactattcaggctcattcggtccaatatcgaatgccaccagtttccatacccttactttgacactatcatattgttggctaagacatgatattatttctaaattctattcagtattctagaaaatgctaagcaagtaagcagtagccactatgtagaggccaagtaatcggactaggctgccacctagatagaaatatggctgaaaggaggtgacatctattcctaggtaaacaacctagttgtggagattatggataccccatacctacacggcatgtatagtccgactgggtatggggtgccatgtgtagatagaatatctttagaaggactcaggttaaaatctaaacttgtatgtcaagaaaatatccgagatcctagtcggttacgattgtattttatctgtaactacatattccgttagggatatggactgtattttgtaatacggaccccttcccctatataaggaggggtccgggtgcctctaggggcacgaatttcacccagatcatacgatcaataatatactcggcggatcaatccccggacaggagtagggtattacttcttgaataagaaggcctgaacctgtataaaattccttgtctctaaacccaccacttttccagcttgatagccacccccttttagtattgccgaaatcatgtttcaacactagtggtggccgccatttagaacagtaaagctggtcatgcacttcaggtccagtttgtgctcacctccattctcatcgatcttgcaatgacaattcatttgccggcttgggccattaaggccattgataaaattagacgtggatttctttggagaggaagaaaggaagcaagtggtggtcaccgtttaattgcttggcccatagtttgtcagcctcaagagtttgggtgttttggaatcttcgatcttaagcttctcagttatgctctaaagggtgagatggctttggatgcaaaaaaggaaccattgaagccatggtcgacgtttcctatccgagtgagcggattacatccttgttctacatggcagtgagccagtgatctctggggttgggaatggtgctaatacgctgttttagagagatcgttggctgtttgggcagcacattgaggaagtggcgccgcgccattttgctttggtgccaaagcggaaggttaacaagcgtactgttcttcaggccttaaccaatcgttcgtggatctccgatattcagggagctttttccattgtggttagaggattttcttggcttatggaatgccctttgctcggtgatattacaaccagggtcaccgggcatacattcttggaggttctcaacttcaggtgtttacttggccaaatctacttatgatgctctctttgaaggggccatttattttggtcctttggagtgcatttggaagtcatgggccctggaaaatgccgtttcttcatgtggttagtggctcataatcgttgttgtacagctgatttgttaggtgggggatttcgtatgagcgatggcagaacaagttcgaagctacatccagttcggcagattgatggtggcttgtagggcaaaagctagtttgagtgtgttacgagtttgtgcgtgtctattgagttacttatctgttaggatcagtcttgttagattagagatatgattaggagagtatcgccatcgtacctcgacatccgcggcgccagaggctttggcctccattgtttcatccgtacaatctacggcaattgccggtgccaggaccgagcctctctctctttcaccgaaatgaagaatagaaccccgaatcgggaaatttctcaagtggtcgctgcaagactaatttaaggttctatgctatgctactcctaaaacaagataaatatgaggtttctcttataatttccaggctaactagctcgattaagaagcgattacaattgaaacaaaagtgagacaggaccacatcataggatgcactactgccagctcaaaagcagagtaaaatgacaactagaattcaacagtggtcccccgacaagaacggactctcagatcttcattccgattcgcgattaatcctgaccgttcttttctcataatcatccttccaatgcattttcttcagaatcttcagacttcagatattcagttaactcagagaccattcatccatttcaattcccagctcctgacagcccgggccgtgacaacttggtatcagagcatcttcctgccgcctgtgaacatgtcgggaacacaaggaacaatgggcagagcaacgctgcgctggcagccatcctcgaccagctgaaaaagatggagatcaccctgggagagcatacggccaccatcacccgccttgagagcaacaaggcaaccacagatcgcaaggcaaaaggcatctactcccatccaggtgggggacacaacgacggatcatcagatggcaagggtctgaacagctagatcatctttgaagcttggtctatttttggtaacatcggaatgattgtgttttcaacggaatagctccaagattatcaatcacctttatattagcaagtgaggaagcccgcctatggaatttggcagggactaagaggctctccttattaatggatcccggctaggcatggttctggttccacccttgcggtgggttgttgtgtggtggcgcgagttcgtctactacttgctgttctttggcgtgttcgacgccttttttcttctattaatgcaatgatagcttcttgcgtattcgagaaaaaaaattatttgctacacaaggttggcctatatgggcaatgcccaagtgtatcttttgggcttcaagttcattgtttggccccagttttgctctttgaagaattgaacaggactagacactactagctgtagtagtggatatatttgtttgcaatatttttttcctacaagattggagagcaatatattgccatccaaggtaacgagaatttgaactcaatcaagatcatagacacgattcatataagattgattatcctaaaggatgggaggatcattagtctcatgattaagttaagaaacatagaagattattataatcaaacaatacacatcattcagaaacaatgaaaaatcaaacagtaacaaaattcttagcttccaaatcattgcaccaattaataagcaaccatagatttttttttcgtcaaaaaaaagcaaccctagattgagaaaaagagatcatatagcacagtagctaatcttatggattacacgagggaccatttattcccatacacctattcataaaaagcaatagtcctattatgaacttttcaaaacattcaactaaaaattttcaaaattttctattacaaagccatcttaagaatgtgaatgttgaattgagatttgactatatctttattacatgtatagaataagaaacactagggaaatcttttggtgaagatttgttactggaaaagaggttaatgatagcaattaaactatggttcaagtgcaaacaatagaattctttatagacatagcacaaccacaaactacaaatatgtaggtaaggattttatcctgcaaataatgaaatcattttgttttgttattttgcaatcacaataaatcagaaatgttgtgtgacaaatatgagccaagagaggatagaacatacactgttgaaagatcaacttggaaccgaagaccactttcaataaccgtagttacaagggaatcaataccagctaagacttcaagctgcattgttctgtagtcattttgaatagcatcaatcttattgacaacagtttggatctttggcttgtttttgtccagtaccacctgcatgtcaaatgttagagcacaagaaaacatactcaagaatggaagctatcatgcaattagatattacctgagcaataagcttcttgtaaggtaaatggtcatccctcaagttcaagtgtgcaatatgccctactgtctcaaaccctgtaggaacgattattccttctgggagtatttcctctaaaatctacaaaaagtaagattcaatcaaaacagttaagcagcagaaagtgaacagacaacgagcatggtgcataagaatatttatttttttccatgtgaagcaatgttgatcaacatatctaatagaccccacaagtaacaatgtgatgacatgctaatacagtcctcatgctcctggaacatacagtttaatatctaaacatttcggtagatcaaaccattatacagcatttggattgaaaacaaaatctgtggagttgaaatttgtgctgcctaaaagttaattagtaatcccacaattcatatttgtgcctcgataatgcatttgtacgactgagttttcaattgcatttctatgttgtcacatctttgaagcaagaacagagtagaccaatcatctatgagaaaactgggaccagactctgatcttgagacaattcaatctaacctgtacagactgaacttttggtctgtatccggtatttgcaaaggcagtgttacctggacagtacagaagcatcagatactgacacaaatgagaagcttgaaaagaaagaattctacagactttgaagaacttgaaaacaatacagtaaattaaacaagcattattttaaatctacagaaattggataattttattctagaacaaaaggtaagccacaagggtaaataccattagaactaaaaaaaggtgtctcaaaggaactgagcatagcccagttggtaaggaggtaaaatggttcatcttacccaccttggtcagattgacctaggcacctaagtatcagccacttgtgacacatgtcaaacaagacaagtagtctggccaagtctaagtaacactgcctgtaagaaccaactcatattttgttttctcctggataaagtctttcacctctatttttttttacatgtgacatgcaacacttgcactaagatggtttacatttatcagctgtaacaatgtttcttactttggccggtttcagcaaattgaacagcagcaagatgttgttcttagcatatatataatttatggcttccagatcaacagacagaagcccagaaggttgaaaacacaaaatgaatggctatttactgcacatagtcaaaccaactttgatgattgatcctttcaatcaatcgccaactcatgatagtagttggctcacacttctgctaactgattctttgtgtttaaatccatgtgtatcctataatattagggattagggatacaactggagactagaacatctcaaggacaacactggcattagataacaaaggaagccgttggtataatgacctaatcaaaaaaatgcactggcacaaaaaacagcaaatacttggacaaaaataataacaagagatgaagagaactgaaagaaaatgatgcttagaccatcaactgtaaacaggtggcaaaatacctcattcattggccagtaattgtagaacaaggtcaattggcattgcacaagctcgtaggatgaagatccatccttgttagtttcatggtccaacacaacctgaaaagttggcttaactaaaactagtaaacagattccactgaaagagaaaatctacaaaagtaagatatacatcatttcttcatgtatcctcttggtatctattttgtaataacttcataaaccttgaagataattttgcaaaaaagaataaaaaataagctaccatttctgggtccaaataaggtaatattgtgtcaaaaccagtgaaatacgtaaattaaaattttaaacaggctgaaagtgtgattttcctcatctggtctcgaaaagaatagttagaaagaaaatactgtctagtctggtgagttcttgtgagtatcatcaaggtagaatgctgaaccaatttggccagcgcacacccaaacctcatttgatcacagttgaatccacagaatcattcaaatagaaacttttcctaacctatgtgatttttatttctacaactgcaactatgaaaggctatttggtgacaagaattcatcaccttgacagcctccgggaggtcatcaaccctcttgttggcatagttctcgtccaggagcagcaaccgggtgggacctcctctccacgtgatcctcccgaacccctcctccccgaccaaccccatccactcgtcgccgtgctcctcttttctctctccgatcacctccaccacatatactttgtctttagtatcccttgccgtagccgcagcctcgccgcctccttcatccttcttccccttccgtttcctcgcggggggccgcgacatcttggcaaggttggggaattgcacgaagcctcgggcgttgaactcgcgggccagcttctctcggcgagccaccgcagttggcagggaggagggagtggcgaggcttggatggggaacggggaagaggaggccgccgtcgtcgccgggttggcggacgacgttgcgcacgcgaggccagttgaggaggtggccacggaggcgacgctcgaggggcgcacaggcggcggccgggacgcggagggcggcgagatcgaagatgcgggcgaaggagagcaggccgtcagtttcgccgggcaggcggcggccgcggcggagcgaggggccatggagactaggtggaacttgaggcgctcgcgaggaggaggtggagctactggtggtggtggtggtggtggtggtgtaggaggaggaggagagaggtttgaggcggaggtgaaggaggagacggccggaggtggggcggcgaaggcgagggaggaggcagtgcgaggggagatcgaggagcggcggcgccatggaatggaatggtgaagtgtgcagtggacaaaacaggcctccgtctacagtgtaggaataagagggggcattatgcctataaatctaaagtcttcaaaccggccttgatctgctcttccgtggcgtggatgctgtagattttgcaaaaaagccctctcttttatacctattctgttatacgttcttgctgtacatttttcggctttaaaatatttcgtttaggcccttcgaatcctacgaaatccgatacgaaggagacaaaaatctaaagtcttcaaaccggccttgatctgctcttccctcagcgttttgcgctggcgtggatgctgccgcgtcgcgacacgtcagcgcgcgctggtgggctgctggattttgcgtcctctcgtgcggccgcgtcgtctctgtagattttgcaaaaaggccctctcttttatagttattatgttatacgttcttgctgtacattttttggctttaaaatatttcgtttaggcccttcgaatcctacgaaatccgatacgaaggagaaaaaaatgagaaaaaggaccgcccctgaatcgtggaatctcaggggcctttgtgaaaaatttccttctttcttgcgttctgcctccccttcccgaaacccccagtctccagccgcgtgaaagaaaaaaaaagaaaaaaccaccgccgccacgccgctctcatctctctcgctctctcctgcccgccgcctggatctgccagcgcggtggccgccgcccgctgtcctcggagcgccgtggccgccgctcgcactcctccctacgcgccctgccattcgctgctccaaggggatgttgtggatgcacggtgtcatcgctgcgccctcgctgctggcggtctcgttgctacgccgccgccgacgcccactcgaaagggaggccgtgggtgctggatgcggcagccacgatttcctttccggcggatccggtcactcagagtggagggcgagcgctagcgcagaggctcatcaatggtgtcgacgccggccgttcttccgcagtggtgagttccacagggaaagggccagctcacccaccctttctttcttcacactttccctctctctgtttaatccagatccaaactgatggggaagttcgatgtggcacatccagggctatcgggtatgctgagctcggtggtggcggcagtagcagctcggcggcgatggaggaggtcaaagcgttgatgtttgccgccggcgtggatgctgctgagtcctcgcacattggccacgacccacggctgcaatcctggtcagtttggggctttgtggttgcttgccaccctatccgtttgatctagatcgtgtggcctttgttcgtcatagtttgtgcggtgtcgtccagttgcgtttgtgaattttcgttgtgtttgacggtgggcaatgcattatcgatgcaattggtctatggctttggtgccgctggcgtgtaggccatatggttagggttggtttcatacctaccatggaatatgcctatgtaatgaggcacaactgtgcatgcttgctcagggttgtcagcttggggagtgcggttgtcagcttgggatggggcaagctgcttgctgtgattggctcaatttttctcggttgcatcggtgcctattggtgaacctggtctatatactcctcctggctgtattgtggggccttatccgatgtagtattagcgaggcctctcatggtgtatagtccagggtgtttccttcgttacgcgagatgtattaggctattccactttcaggtggggttgaatgccatggggtccatgtatgctgcttccctattggtgggtatggttggtcctattagatgtgatgcacaagtctatgccttcttctctattatatattcctttgcagatgccgggagccatcttcttttctccgcttccctttcaaagttgcaccatcgttttcatcgctctatcgttttcatcgctcttttgctgcttgcgtcctcacgtgtactacttgatacatctatttgttgttgcttttgatcattgaatatggcacggtaagatgtaggcgacattgtagtttggttgtcagcgctattcgatgtcgcttttcctgtttttaggccttctaatcattctttgatttctggcttgatttgtagagggccggatttgcacgggctgaagcggtgcttcaagggttcttgattgattttgccaaggaatgttcgggctgctggttcaatcaagcaggttaggttctttctactgtatatatatgctttaaacgatatggaaatatcccctgtatttgtggtgccttctgtttcaggtttatgtttgctaacaatctttttctgttgcgcagctctggtcacctttattggtgaccgtccctttctaccctttcttctatttctcggtcaaggcctttgtcttctgtgggtatctttcttgcgtggcatcttcttggttacattgcttctgctgcgttgtcaacacattgggtgctgtttcgtataaggtatttccatctctctcataccctatttcagtatttccttttctgtttattgattactattttgcactattttctgcttcttttcaatattgtgcatttatggtgctttgtttgtcgctatattaatagcttatttctgacacttatcacttggtacatgcgtgttgtcggtttcctatgttattgcagccatataacggtcactgcagtgccttttgtagccgttgcataggttcttgtgcacacacttctcgcatagtactctctttctctttcctgatattttgtcccttgctgcccataacgatgttgcttccctccacctcatctttagttcttatcaaagtcggctaggtttttgctttgttgtccctgaactcatcttttcttgctttagagctattattgtgaaacttcctctttccatctaatatatttgctattcacatctcgcttgtcctgctttctaaatgttgttcacaacgtttcatgcttctagctctacctccctttatccaaagtaagattaaaactgtcattcgatagtttgtaaaatgtgcatttgacgttttaatcctacatggctgcacaacttctgcacattatctctgattttttttcggagaagttagtaattatttttaaggtaagctagccatatgaagttttaaaggtataacctctattattaagcattggttctctctggtaaaaaaaaatacaactaatcaatctgcgcactgcgacctcaaaggaaaagttttgcttctcacctgtcctcgcttttatacagattaaattgaaatctaaataaacacccagtgatttgcaggatggaaaacatacacatgtatggagtttatgtgacggctaggagagtgggagagtggcacagttgcttgcaagacatcttttcccttttgaaacaaaaaaaaaaatattttatatagtgcaagatatttggtcagcgagcaaataaaaatggactagctctgcactttgattaggcctttgcttttatatataaactctttttagcattctttttgtactgctgcttcggagtgacatttctcattcagctctgcacattatctctgattttttttttcagaaaagttagtaattatttttaaggtaagctagccatatgaagttttaaaggtataacctctattattaagtattggttctctctggtaaaaaaaatacaactaatcaatctgtgcacagcgacctcaaagcaaaagttttgcttctcacctgtcctcgcttttatacagattaaactgaaatctaaataaacacccagtgatttgcaggatggaaaacatacacatgtatggagttcatatgatggctaggagagtaggagagtggcacagttgcttgcaagacatcttttcccttttgaaacaaaaaaatatatatattatatagtgcaggatatttggtcagcgagcagataaaaatggactagctttgcactttgattaggcctttgcttttatatataaactctttagcattctttttctgctgctgcttcggagtgacatttctcattgagctttcagcgctgcagttgtcaaactattaaagcgacttgatagttctgcatcatgggtagtgtgcctttagactattatgtttttttttttgccttttctgcaagcttagttcaatttttttatgaaattgtgcaagatgttaggtcagatccatgcttactattgcacaaaataattttaaggcacctcttatatctatatttaggagtatccgtcactgcagttttttgctttagtgccatactgattacttcacattaaacatgcctcgtgcatgattaatttttgtattgtgcaattagtattcagtgcttctaaaacattgcgtattgatattggagtttggcttttgatattttatttatggttgctgtataatgtgaggctattactacaacatgctcccacaatttcatcatatatggctattcattcatgatactactgcttgtctgtatatacatacgattatcttttgaatccattatgaattctggagacattcatttgctgtatatacatagggttttgtttagtttcatcttatagtgtataaagagtagaatcagctgtatagcaatttaatcatcagaccagagggaggttcaatgccctgtaaagaaacattttctcatgcatcaggcttaatgtatgtccccgcttagagtgttttctctgtttcagttttgcctcaaaagtaaaggcctagcaaattgttggaaccttagttttcaaagactttgctttccattgtgtaaagtagattttttttttacaaatttatttgagccaaactactaatatattacagttgttctctgttcaatgacagcagtagtattttaacatgagacaatgtgattaaaagaggttttgtctgtcccaaaattttggttttttgtgtttctcaaacgtctcatagcaaaagtagccaagcatgcatgcatattgtggcttgtgc

SEQ ID NO: 5323 - DNA, 31578 bp, Oryza sativa
tggtgacctttgatcactgacgatcgtccccaccctaatcgtcgtctctttgcctcttctcccacggctgcagtgggagtctatttgggggcatactattgcagagggacataaatacataactcttgactccgtggatgactacattagtgcccgagctgtgtcatttgcactctagacctttagttatacattaaaccaagattagggatctagatttgcatttttgaggttcatggaactacatgacacctcactccatgtttaaggaccaatagtgtattttatactttgagcaatgaagttttatgcaaaatcctttacaattagtatattgcatgaaattaactgccattggctgctcattaattgtcaagccacagccagaatttgaattttagaacttaattgtagattgattttcaatttttttttattttcaaccttggcttctgaacagctagattgaagtataaaagtctagccctaaaataacttttacttggttcatttgtcttggatgcatcttaacctttaccgtgaaaatctaatgtactaatttatttataattaaccagcaagatttttttttaccaaaatcaacaagcttttttggtacatagaaaatgatacacaaggtcaaaatcatgtttttcactcatctactaatggtatgttgacggaggaagggaaaataaaagataaaatttgagaatgaaggagagggagcagatttcatgagggcaaatgagagaactgatcaactttgaagggaaaataaaacgagtagacacaagcagttcataaaatccagaaaggacaataaaatggatcatagctcttgtatgcatgtatgtcatattgtccttggtagtgcataaaggtcttcagatataatttgtactatagtccacatcacaaagtacttaggttgattggtactgatttgccataaaacattacaagttgcactttctgttgaatggcatactattattggacggcatccatcacttgtacactgctaaacccttagtcatgttagataaacagtgcatgcttattattactgcaatgctgcgggtgacattgttgcatccaagatactaaatatcatcttctgaaccaacccatgatgaagaagataaagtttcttagcactgtatggaataccacactatctagctctatcttatttaacttgttttagaatttgggaaactaaggttccacttgatcaaacaaaccaactaggtattgccttgccacttaactgaatgagtacacacaaaaaaatataagtgattaaggctgttatttcgctattccttgttcccaaccggaatagtacgcacggaaaacggagcagtccattagcgcgtgattaattaagtattagctagttttttaacaaaatggattaatttgatttttttaagcaacttttgtgcaactccacttgataaaaaaaacgagaagatatttcgctgccaccaacttcaatgtgttcatacaaaaaatatataattacttatacaaataattgggtaaatagcattaaattgcaattattttgtcaatcatcacagtttgcaatgatatatgtcgttatatcagaaacttttgcagggcattaaaaaactgcaatactagtgcagaatttaataaataacttgcaactccatgaatagaagggttgccggacatatcaagcccatccatcataaccacatgctataccacattaaagtccaacctgagttggccctgtttgagaccaacttgctaaacgatctcatttccagttgagttgcagttttctaatagaactagctagatacccatcaattataatttatttcaaataaaaatgttataaattttaaacttcgaatttgttatataataccaagaagaaaatcatctgtaatttgaaacaaacatcaatgtgcaaataacattattaaaagctacatgcacaagcatccacttgtctgcagaagatccacaaactcaacaggtgtaagggtggcagagtcaccaccaccattagctccttttatgtagagaccatgtgctatccttgcggttttcagaaaaggaggtataccatcgcaatcttgggcaagtgaaccatcacaaactatagggtttggaaaataccaccaacaatcaaagaaatttggggaatatatctcttgactgttaaagggtgtgaaatgaccaattcaccctcacttttcatttagaagggagcaaactatggatcaattatatatccacactaaagcattgaggtggagcatggctgcatccacaattcattgttgatctcatctgcgacaagatagaaaattgcaagaacaggagaaggttgaactggatgttaacagtggtcatccatggaaaagctaagccatagtccaattttttttttggacttcatgatggtattgtgcaaatcttcacatttgtgatgataacttgcaacctgctactattattatgataccaaccaaatttactctttctgaaatgtcttgcggaagaagtaatgaattattgtcgtgatgccattaatttttgaaaaatagttgcagttctatgaaatttaatcaatataatattgttattaaatagaagcaaacactttaaatggttgaaaccaaacgactgttgggaaaaagaatgattaccttcttgaccgtccagcaaagcaatgaaccagaacattgccaccagagctgatagattcatcaatgaaactaaagcattcatcaaaatgctttgccaaatcaatgtctgggctgtcaagtactgtatattggtaaacaaataatgatttaggagtgcttgggaatttggacaagggcaacagaaaaaagagggtataatcacatcaataggtatttgaaacaccatgacacagtcaagaagtttaagtgctccatgcttatttcatttctcttgacattacagttttccagattgagtgataatctaacatgtctggtaaacttacaacacaacagatgaaaagtacataatttagaagtaaatgcagcacatttcttaaacttgcacacagagttcaaataggtatgtgaacttaagcgatgcgcattattactcctaaatatgcatacttcggttctaacttagttcttactggcaatagatgattgaatggctcattgcttcacttacatgacttcctccctccatccctcctcaccctctctactctctctgcatcctgccacaaccctaatttagttgttgcatccccaaacaacttcctcaaaacatagctggctagctggtaagattgaaccaccatgacaaagtgacctcaggcactgggatacgttagaattggggccctcaacactcaacaggcaaagtagaggatacgtgtgaagaagaaaaattaatccagaaacacacttatcagtcactgtggttcgccagagagaaaacaatcatggctttatattgtaggagaaaaaggaagtaaaatgagtgtggcagaagagatggaaaacaaggagtaaatagtgcttcaaaagtgtggggacagaaaaaagcatatgggagggctttctcacaggtgagctttgctgctggtgtagctggaggaggagaaaagggaagtgtggggatagaaactagcatgggagggctttctcacagatgagctttgctgcgggtgagactggagaaaaatggcacatcaaagccacatgagcgcctgctaggctgccattccatgatcaattgaatttaagctgacccacatatgcagctgtaggaatataaatatgcatctctcaagtacatagacctgtttgaaccaaacatacttttttttttcttgaaaacgcaggactgcacttcatttcattatgaagagaaactgtaatgtggttatggtgcaagcaacacattctaaatttatatggtgcaagcaacttaatctgataaaccaagctggcatgtggttaccttcaatcttcttgtagttaaattcagctgcaaaggctggatttaatgatctggcaacaatcaagatatgggttatgttcaagctctttaaagcatccttgttcattgctgccccaacagatcccaagtatagcccctacgaatatgtcaaagatattctatcaaatagatggaaaaagctttaccatagtaatgcattcttcaagcaaaaatacggtaaaagaagcaatatgttgctacttgattggcttttccttgcattcaattgaattggagagctcgtattagcacaatcgagtttcccaatttccaattaatcagtgtagtttctccattcgcgacacggacaatcaacggtgctaaagttaggataaacggtgaatcaatcatcctgtccttcatcgcgagaataaaaaaaaagaaaggcagtctgttttttttctttccatccagttccccagatttgcaccagttaacaagaaatccactcaaatagcgcccgaaagaactcaacctccttggattatccggtgtcagatcgatcagccgaaacctgacctccgacatcccgcggacgcatccatcaccgaatcggcagcacgagaacaaacggattgatcacatcaaggaggaagaagaacatgggcggggaaagaggaaggaacctggacgatggggcacgggatgttgtcggccttccggtagcgtgcggcgcagaagccctgcatcagtgccatgagcaccctggcctgctgctgctcgtagtcgtcgtcctgctcccgcccgtccctctccgagcgccccgcctccggcatcgacatcgtcgtccctccctcttcttcctcgatgattgttggggggtggggagatgtgcctgaccgaataggggaagtggcgaggagagaagcgaggacaccggctgatcactcgcggagcactgccaaggaatacatggtgggcagtggcccccgaaatattcaactatttgccactcacacgaaaagaatttttttcccaaaatccactctactttatttttatttctatttgtcatccggtctcactacaactcgcgcgtgtcattatttttccttttctcactggcgtagattttcaatttcatccagtccaatgtgaaggataagatgaaaagaccaaaatgcctttcggctcacttataagtctcttccctcctcattcgatccgatcgagttgagaagagcaaagcacatgcaaaaaagggagaaaaggccaccaagataaagcaagataaaggaagggagggagaaaagtagagagctattagggttggcattgtctaaagcttgtcgcctcaccctcgatacttgagcctgccgctgccctgctttttgctgccaccacaaccaaggcatattgttgttgttgttgttgatcttcggctttgtcacttgactgtggagtcgtgttccatgacgatgatgtagacaaaactagcggcatgcatatattgcctctgtctcgaaaaactcaacttaggtggagatttgacccatcctagtacacatgtccagatttattgtattagaatgggtcacatttccatctaggttgagtttttgggatggagggactatatgtttgtatgatgtaggggaggcggcgtcacgcccagaaatttagcctaaatttccggactattttgtgtattaaatccctatccaggacaagctagggtacacaaaatgacaaattaatacacatatccaaatgtaaataaagcgtaaatacttacagaagaggcacttattcctcacaccgaaaaaaagccgcagcggcggaaaaaaggcgatcctagcggggcttcagctccactccacaggcaaaactcaactggggtcaaagccttggtcctctaatttcatcttcagctcagaagcactacacaaaggggaaaatagcaaggctgagtacaaccaccgtactcagcaagccacaccaatgatgcagacgtgcaaagggatccaaggatggttcgtggctatttgcataaaggcagttgcaaaacatttatagttgaaaacggtaaaacagttgattaattaaggtaatattaaatctccactgatcaacgctataccacgttgaacaggcctaaccatcccacctgaactaaccagttcattaagccaatttattaagggtgagactaatcacggtgaatctagttgaccgcccataaccgtaggcataactattcgaatagttttactctaatcagatgtgtacaactgtacccacaagacacagccccacgacatgtttctgtgcgctgtcatgccaccatggcataccagaaagaggccatgacagggccattcgcataacctcctctaaccaagcgcaccacacctcaggtttcgcccccactcctcaacaggcagcgggcagccccctctcgtgcctaggtgaattcggaagcagcaaaggccgtcacaggtcccactctatcacgccactcttgcctggatgcgtcagctagaggaaagctacaatacaagtacagccgttgcctacgctggcttgtggtaactatgataggttcttacaggtcatcctgtgaaatggtccttaattgccatggcgcgacaagtaaaaccatgcacctgcagcaatagttattagaaccagaccggactggcggtctgaccaaaaaaaccggaaccagggcgtcggccagtccagtccagctaaaagattggcgagcaaacggaccggtgaaaaccaattgaaccagccgattttctgcagaaccggacaaaaaccgaagttggttcgaccggtcacgttgaggagcagaagctgcagcgttgggaaaatatgaaaaggttttctacagaaccggacaaaaattggagttggttcagccggtcacgtggagaaacagaagctgcatttttgggaaaatatgaaatggttttctgcagaaccggacaaaaaccagagttggttcgactggtcacgtggaggagcagaagctgcagcgttgggaaaatatgaaaaaggaaaatatgaaatggttttctgcagaaccggacaaaaaccgaagttggttcgaccggtcacgttgagttgaagaagctgcagcgttgggaaaatatgaaaaggttttctgcagaaccggacaaaaattagagttggttcagccggttacgtggaggagcagaagctgcattgttgggaaaatacgaaaaaggaaaatatgaaatggttttctgcagaaccggagttggttcatattttcccaacgggaaaatacgaaaaagctgctgttcatacatattttcccgttgggaaaatatgaaaaagctgctggattaagggatcaaacctacaccctcctcgttcccaaggagggtttcaaccaccaggctatgccacatgttgtgactagtgttataacacatatctatttgaaccgtattaaaccggcggtttgaccggttgaaccaataaaccagtgaaccgagtgccctaacggttcaatcacaggtccggtcttaataactatgcccacagcccaccattcagttgcactttagttggataattacgaccaatgaaacatggtcgggtgtctagagcacgcaactcgtcatgatactaaatgtctaattagcaagacatgcaattttatttgcaaataataaaacatttgtaaattaggctcaaaatgctcaaggggaatgcatgacttgccttgcttcttcaaaataatcttctgaactctttcctcgcgattgcgatcttccgaaacggcggaatcaacgcgctggaacgcaaaatgaggaaaaactctaacaaaaacctagtaaaaagtacataaaaagttaaaaaatgtgtagagcttaattttagatgaattttgcaagttgaatggcccaatttggagttcatatgaattagttatgaattttaaaagttttaagccatttaaatgaatttcttagaatttaaaccaaatttattgcgcaattaatattagttatggcgagagccgaggggaaggggtggcgccgacaagcggcccccacccgtcagtgactcaaggtggcgggcgcacggtggaccgggtccacgcgtggaataggcgcgggcgcaccacgtggcagccacgtggtggccagggcagcctagccgggaggaggtggcgcccacgtggcgccacgacggtaccgaccggggcagcactggcaagcaacgtggacggcccagattcatcgaggtgaatcgagcggccacgggtgagcaggagaggcgtcagccggccgaccgaccgggaggcggcgaccaccagcgtggcggcaggcgcgggaggcagtagagggaagcgaggagggaaagaggggggcagcggagctcaccgagcgcccgatggcagcgagcagcagcacagggaggtcccacagtggatatggcggcggcgcccgtgggacgacggtgtaaatgacgctcctgttggtggacggaggcgactgggtggcggccagggaagcgcgtgatgcggcgaggccagcgatgcgggcggcgcgtcgcagcggtggccgtggtgatggcaaacggcggctagaggcagtggaggcggcagtgtttcgggtttgctttagggtggtggtttcggcggcgggttgggggaaaagaggcaacagccgggcttgcccttgcggcggggcagccggtggtgctagcggcgtggcgcggcggtggctagggcgcaggtggttgtcgggcgggggcggcggatggcagtggcggctcggtttggcagtggaagcagcgtttcggtggtggtgggggaaaatagagcgaaggtcggggtgcgaagaagccggcgaagaagctggctagagagctccggcaagcggcggcgcacggactcgccgtgaagagagcgggagggggcgcgaggagcttggggaggaggggaaacatacgaggggagcgcggggagagattttatagcttcggatgcggagatcgtggccgatcggggcggaatcaaccggcaacggccggcaaagtgggggtgctgacgtggaggaggtgggctcgattccgtcgccgaaaattggggaaaatagggaaggaggtggaggacgtggggcagaccgcgtccacgccgtttggactcgggaatgggggcgagtggtggcggatttagcggcggaatggggcggcatggcggcggttgggaccggccggaggtaggggatgaccccgataggtgggccccacctgttgatggctcggggagaggagggaggagggagaaaaaatagacttgggagacaggggccaaggtagagaggtcggcccgaaaggaaggagggaaggaaggaggacgggatgagccacgagggaggaaaagcaggactttgggccggaagaggcccaaagtgaaaagtgaaggaggggatttttaattggttttccatttaatttaattgattaattgaactttgtgattttaaattacttcttgagctccgaaaattcacgagaaattccaaagagtacattagggcacagagaatattacaaaaatgtttccggccatgatttttaaaggaaattttaatttcctcaataattcacttgattaaattgctttaacttttaatataatttctggaatacattatttaatgatttttaatcccaatcgaaaattggggcgttacaggcggagtggtggtgcagcgtcgccgagaggacgcattagcgtcaattaagtggctgaggctcatgtcgttgtccgtctctctctctccctctccctcttgctgtttgctttgttaaatgtcagggagtggaagggagaacattttcaatggggccaaaccccaatgacatttaggtctttttgccacatcttccatatcaaatagtggtgaaaacaaaaaaagtaacatcatatggacaagaaaaatgaaaatagtggcacacgggagagttttagtggggaccagatggtaaatgaaaatgaaattttgaggaagtggtatatgggcatatgaaatttcgagggagtggcatttggatatatgacatttggaaggatggcaaatagtaaatgtcccgtgcctcctccagagtgctttcttttaaaaaacataagaacttgtgaggagacaataggggagactccattctaacccctccttttactcctctccttctcctcgttccttttttccacttcacttcttgatccaggttattagatttgagatctatgagggcaatttgttgtagaggggagagagatgcgaactcacgcacaggaggaggggaggaagggggcgccattggaggctggggagctagggttcggtttcctccaaccctccttcctccagggtttttacatatgggcaagggagtgggttgggctcgtgggcctagacccaagctgagttggctcacttacatggaaactgctcttttatttatttctattaacatctttattttaacaagcaacccaaactaaaaacctaaatatcttttaatatacaaggtattacaagtggtgacagccctcgagatctctatagttctccctgtccaggtatggagtagagcgtgatttggtaaaagcgagcaagccagtgcctaaattattacgataggattaaacttaagctttcttaagaccttgttcctcactagcaaatcctctctacccctttgcctatttatgccttgtgtccttggatgaacctggagaagagttaagcacacgcgttccctgtggaaattcaataccttggaatacttcagggtgaagtgctacagcggtatatccgtgtgcttgcagattttatctgtgactgtaagaaataccaacaagcatttctggcgccgttgccgaggaacggttgttgtttatctccgaaccttgttcattatcgtatctttttaattttctttcttctacctctacccggatacctttagagaagccttcctgtaaacacttctctaccatggagcacaaacctatctatcaattatcagctcctaggggtgaattttatgagccacctccttcaccgaagccaattcttacatctggctatgaaattcgtcctaaaattataaacatgattagggtgaaatccttctctggcttagatcaagagaatccctaccatcatctgcgagagtttgaggaattgtgttcatgcctcatgattcaagacatgacacaagaaatcatacggtagaaattgattcggttctctctttaagagggagcgaagcaatggtacacatacatcgttgggaatgtaaacggtaactagattatgttgtgagataggttatgcctcgccttcttccatgtaacccatattacatctcttcaggtacatatcctcagttttcggcagattgaaaaagaatcaatcaatagcttgggccagatttactttattagtacaatctacgcctaacttgtctatacccgattatgtgttgttacaacattttcatacaggcttagataaggagtctgcattccatcttaacatcactgctggagagtcgttttttcataacaccccatctgaaggcacggaaatcctagatcgaatcttggaaaatacttcctttgttgagaaatattctgaacccctccaaaaggcatctgtgtcaagtcgtgaggacccatctttagtcgaacctgagtctgacctttccatatctgtagattcaattaaagaatcctctcccaagccatcaacaccggagagcaaagaaattcgaactccaggatgtgctcctgacttcagggacgattttcatgaagattatggaaacaccctgaattatttcaacaaaaagaagccacatattcttactccacctcccgatccaatcgaagatgaatatcttggagtaaccgttggggagttaaccacaatcatgagcaacgaatggttgaaagagaaggagttctcttctaaagtaattcgggttaatacttctcctcataccattccttgccaaataggagggaatactgtaggcattttgtatagtccaacggtgatgtgaccatggctactatagatacaaccattgctcacatcatggatgaacaagatgatatcaagatcaagtcctccaagtgctggaatctgattcggccacctgctacaatgctgacttcaaacagccgccaaatttgcatacgaactccgttttgggcccgttaatacttgatggaaaggtctaggagtcctgtttccaacggatccagcctcattaccaaactcagtctcagttggccgcaatcaaagaaacaaggtgctacgtcacttgtcatgggcctatgggcatgtaacttcgttagggacctcggcccaagtggggcccatgtggggtgcgccccaactaggtggaacatgaccctagggttcctttggtcatccttccaccattataattagctacgtacccctttagagtttcttgggttttgtttagattaaagtttagctttgctactttgccgtgtaatcccgtgatcgattagatcgccggtttactcgttacggaaccccaacttatcatttgtgttcaattcctatctgcaattcagattgcttttatcttgttcttgcttgtttcttcgatttgcttgcaggaataaggttgatctgcaccggcaagatcaacaacccacagagaggtgtatcgatcgctaagacgcaacacaacaacatctcgtacggttgtagtcgggtcgtcaacgtttcttccaaatcatagttatcatcaactcaccgaaagattgggccaacaacagccttgagtgtctcgagtggagctcagggttcatcaggtggtatcagagctttcgttgctcggtgagtttttatctacccataaccagaaaatagccatacaatttttttttatcatttacctagccatattgtgccattgcattgttcttttcagtttttgctttgttgaattttgcgttgcatcgtcacgtcgtgttgctggtcttagcgtctagttcatttagagtttcgagttctggtcacgttttgttccactgttatcgccgccgccgtgttcttgttgtcttcgggacctacggaaacggaatcggctcgctgccacggtttcatttttctagctttagaagtttctgtcggtcggttttggagttgttgagttgtatctaggttttctgttgcgtggttgtatccgtgatgatgcgcctgtgatgtgcgggtgagaaagatggaaggagaagattatattagattggatatttggagaacggttgatttcttgttttagcgcacagtttccaaaccgtgtttccggtttccattgagtccaagtcccacacatgcccagtcgcacctctctgcccagacttattagtcggactccctcctccctctccaaatcacgttatctctcagttctgagtcgtgtcaaataatttggagaaattctgttttatgtcggttttgagatctgtttggaaaaacataaccgagataatttgtgaattccatttttgtataattttaaattttggtgtggacttttacaatcgagtccctgtaattttcatatttatgtttgagtccctgtaattttgcattgaggtccttaagccgttttgttaaaaaaaatttaaaaaaggagagaaaaggcagaaaggtgcataaaaaaaagaaaaaaaaagaaaagctgcaccaaaaatacagagaagaaagaaagaaaagagaaaaaaaagaaagaaagaaagaaagaaggaaaagaagaaaaaaatagttgtatctttgagctgaatttaatatatcagagtgtgcttgagttgtttctggtgttatcttgtggtattgtttgtgtctaggatcgcgtctctagcacgttctagcctaggaccagcacggtgcttgactttgaacaattattcaactttgcattctcttatttgagcatttgctattcctttgctacgtatttaagcctacccagagctccatagaatagattgcagccgtatagcaagtgtttggccaaggcatcgatacatccaacctctatcggggtgcttggttgagttggtgtatatcaccattccgcttgctttggtaagaacttgtaagagtttggttaaaagcttgagtatgtgtgatatcatgagctgccactacctagtagttgataggagcgtgcatattcttgtgtagtgtttcttgtttgctactaaccatggcaggattgagcaagggaataagagatcatcaagttcttcactttcgacgagatatgacgacttctccacgcaatgcatataaggtacatgataatgatcttgcaagggtagaatctaaattgccagtttttgatggtaagtatgattccgccgcttatgttaattgggagctaacagtagacaaacaatttgataagtatgatttctctaatgctcaaatgattaaggctgctagtaataagtgtaccggttctgcttctttttggtggtatactgttggcaataagcttgaaacttgggatgaatgcaaaacaatgatgaggaaaaattttgtgttttcatacttgcttgcagtgttgagagcaatattttaaagaacccaagggagaaacaggttatgcttgtgcctccgattactgatattttgtagggagttcagaacattcaccatgaggagaagagcaatatgctcgagatgtcatctccatcactcacgaaggaagaagagaagactgatgcacctatattatctaaagagggcataaaaggtaaattaaatggtgctgatattactcaaggtgagtgtgcttctgatgagtcacatttgtccactatccatgctaatatagagcaaatttgggtggaaactacttctgatttgcatttgtcacaagttgatttacttgctgttccttgtgataaagaagagttgtgtgataatgcttcacttatatccctaccacaactagtgaatgaacatgctatttctagtgtttcattgtgtgctgattttaagcatgttgttcacattgctaatgatgttgaggaatgtaaattgataacttctttaaatacttttggctatgtttagtttgatgatttttgtgagcttaataatttggaggagaaattatttgctaagtctgatttgccatacccaactaatgctatttttcatatctttggcgaatataatgatagaggaatatatttggtgcatagagttttcatttgttcggattcagagaaacatgttattgctaatcacacaccttcgagtttctctagttttgattggatgaaacaagttattttgaatggactatgtgacgagcaccatatggaaaagccgaggacggttttccatgaagaagggaaggatgatgtgaccatggctactacagatacaaccattgctcacatcatggatgaacaagatgatacaagatcaagtcctccaagtgttggaatccgattcggccacctactacactgctgacttcaaacggccgccaaatttgcatacgagcttcgttttgggcccatgagtacttgatggaaaggtctcggagtcctctttccaacggatctagccgcatcatcaaactttgtctcagttggccacaatcaaagaaacaaggtgctgcgtcacctgtcatgggcctatgggcatgtaacttcgtctggggccccggcccaagtggggccctgttgatgtaagaacacgaggcctgggagatctgcttaactccagtacaggtccaaaaacttgcctttaggttcgtgaacgtgccaattgatttgatcctgcaatcaacaagaaataaagacaagaaaccgtggttaaatccataaacgatagtcgatcggctagttgccgatgacatatcatttatctttgagccaatggcatatgtagatcgatcggcaatcatgaataagtaagaaagaactaaatctactcgatcggctgtagatattaacaatatataatccttatgtcgataggtacttaaatcaagtgattgggatagatcggtcgccatgccgagacagtataaatcatttagatcgaaatatatactaacaacaagactatatatgttcatagcatagccgatcagatagatctagtatgtatcggctaatactccgataccactctatattaagatatcaaagtatgtagaatataccaaacaaaagcctaatatacttaaatgcagcaagatcttaacataaagggcatatttaacatgtcaatcgagcatataagataaaagtggttaaatcaggtaagatcggctgaaaccccgatgctaccctaatcggcaaccaaaggcaggctaaagattaagatcaaactcaactgatgcacctataagtatgaaaagaaggacaatatctagacaataaagccgttggatgtttcatagagtggtagatatcctatataatctaagtcaacgtcagtatttaacttgatcggctgtcttctggcaatagacgttagccgattgaaggttagatagcgatattgccagagattatataagatatatgataactcgacaaattacataaacaagattagagtatcataaagatggaagcactaatcccgaggacgcaaaccgccataacaagttttacctctagttgaagatcgaaaccgatgcagctcaacccgaaagcaagaactcgtcgaaacaaaacgaaagtaaaagggtggcgatgcgccgagattgtattgaacgtgtgtgttagtttaattacatgaggctcagggtctatttatacgcgagattacaagatatgtccatgtcggcacgactcttatctctaacaaactctaagataccataagtctttgcggcagacttttgctcaaacatatctataaggaaattacatgaaatatcctaattaatagatacaattgccttctcagaactctatccatgcatggcaatcctcatgaagcacattaactcaacccgacaacgtatgccgtgtcatattgtcggattcggctcaatcggctaaccttgtctaactcggactctgccgatcctggtcacagctgattcggactttaaccgatcctttctctgtttccgaaacgatttccatcttggattctactccactcctatcttcatctccgatactcagattaccaaatttggttgttaacaggcccatgtgaggtgcgccccaaccaggtggatcatgaccctagggtccctttggtcgtcctcccaccattataattagctaggtagccctttagagtttcttgggttttgtttatattaaagtttagctttgctactttgccgtgtaatcccgtgatctgctagatcgccggtttactcgttacgaaaccccaacttatcatttgtgttcaattcctatctgcaattcagattgcttttatcttgttcttgcttgtttcttcgatttgcttgcaggaataaggttgatctgcaccggcaagatcaacaacccacggagaggtgtatcgatcgctaagacgcaacacaacaacgtctcgcacggttgtagtcgggtcatcaacatttctcccaaatcgtagttatcatcaactcaccgacagatcgggccaacaacagcctcgagtgtctcgagtggagctcagggttcatcaaacggccggtgctaatctgatctctaaatctctcgctttctcctatttgggcaatggagtgataatactgacctacaaattcttcaaacatcatgttgggcagttgattgaaggatttgcgattataaaagatgttcttgttcatcacaataacaaagaggttgtcatggatttccacgcttttgaaatccaagacattgacgtcctaatcgggcatccaattaagaaacttctcatcgacaccatgtaattaggaagcctcgaattctcattaggaggggatgagttttctgtttcattctcatggtcaagatatgccttgaccgatgcccttcctgaagatgaatttgcggaggaagtgacggttgttcttccatttgagccccctgaatctcttcttgaatatgatgtccccgatttcattcaagaggaagaatcgggcgaaacctttgaattgtcgtccttagaaccaccaccaccacggcctatgatcgaaataaaacatcttcctcagggccttcgctatgcttttctacatggcaacaaggaagctcctgtcatcataagtgacaagctttctgaggatgaaaccattcgtcttgtaactgtgttagagaaacatcactctatcatgagctgctctcttcaagatctcaagggcattagtcccgctctctgcacccattgcatacctattgagcttgagagctcactgtcaagggaaccccaaagatggctaaacaatgcgatgagagaagttatcaagaaagaggtcttgaaactcttgtgtgcctggattatttatcccatacaatgtagtgagtgggttagtccagtccagattattgaaccagattactataagttagattataataagccgacatagaataagttgttagctgtttgtttctctagattattagctgtttgttagctgttagccgaccttagtcatgtaaacacggtgcttagattattgaatatcatcaagtttgctttccaaaaccagatgagttttaacaaaatgatagagactcagctggcgcagctagctgctctagttcctgctaaggaagcgggacggattctagggcaacccaaaccgtccctagaaaatgttaaggcgatcaccacgaggggaggaaaatccactcgggatgtcacgcccggaaaaataccttttcccaaacgctagtgtattaatccccgtcctagaaaagccggggtacaccacacaaacatgatacaaaagacgcatctttattatatcgataatatttacattattacaaaggcacttcaggcctgacaatcaaaaataaacagcagcggactagcgggcctacggctccatcttcacaggcgctgaactggggtataagccaggactccacctaggacttcttctccaaagcttctcttactgaagagggaaagattgagcaagaatgagtacaaccacagtactcagaaagtcacaccgggagatgcataattaatgcgaggggatacaaggggataataataggggttaggttttgcagtaaacatcatttaaaagtcacttagttgtccaaagctattttgtaaacacgatcctagagctacacaatattattaatcaaggtcgtgaacccacacgaacctgcttaacccaaggcctacgatgattcagaccgaactagcaacctgacctggatcccaactcgtcccaagccaacccaggccaaccattccatatttttgttgttacgcaagttttaagaagtaaaccactaactttggtacattgctaggcttgcccatacccgagggtgcggctattcgaatagattatactctgatcagaggtgtacatctttacccacaagacacgcctttactctgcattccattgcaagtggtatccatcataaaaaacgtgacataactgttgacggtcgttatcgatcagttttgaccgtcaatattactaaaatagaggggaactagtgatgcttgcaatgcatatatatgttagaataataaatttccactagtattatgtatactaaccttttgcagagaatgacaataaagtggaggagaatcgacatcaacacagacgacaaatcaatcggacgatgtcgagaaccagacttatgtatgaatgggccaagaactcagaattgatacaaagaattgggccaaaattcacaagtcagcgaatagaagcaacagaggaggccgctagccgaaattgggctggattgggccggccccaggttcggccgaaccagggagttcagccgaaccctcctcagcgccatccgatccagggcttcgcctggacggtatggattagcccccaatgacggttagagggtatttccgaccattccaaccgtcacaaccgtcattgtgaggctatataaggagttgccattctcacttcactcacagatctcaagcaatagctttctcatttctgtcaagtttagtttagtagtatctagctggtggaataggaatagagtagaaatcaagagtccggaagtcttcggaagagttcaggtatggctctagtagccaaataaatatatagaacaacggaagcttgtctacccaatccagaagcataccgactaggggtttaccccattaagttcaagtcctagaagaagcagacgatacccgcatcactcaaggactaaatctaaaacctgcaagcaaaaggttaattcaagagcaagagtcagtacattaatagaaataatatactggcaagcaccaagacaagcctaacaccctacttgcaaggcatataatcaagaaaggcataatatggttctttttagcataaagcaagttttgtttgcataaaacatttctaagtcagatttgctttcaaataaatttcagcaagctagtacttagcatatgggcattaaagtaggcattaatcatgtataaatattcacctcattgccatccatggcagcaaggagatcattctcaaatctcaatataatttgaaggtaaatttcagcatttagaagaataaacacaagactatactcaatacatatccacatgccgctcgtaaccacgagcacggctaatcgattagtttttagactctgcagagtttgtacagatttacccacatgatgtgaatcgctctagtttatccggtacccgtcggtaccaccatactctacacacattgagtgcgtctagaggtcacaacgaggcttttacattaagtcttgtccaatccttgcatgagcacgatgagtgttgttccacactaagtctagaatcttaatgtcattatattggggggggggggggtctttaccaatataacgccataggcaagccggtacagtcgcttcctatgtggcactcaacgttgtacatgaggcggaacattgcagtcgtcccctcacgcggaacaatacagttgttccctaccaaaccataaataaaagtgaggcggaacgttacagttgtcccctcataaacatcatgcacataaaaagcggatcggtacagtcgtcccctttgcaattcacataaacacaaatagccctaaagttcactcgtaggcactatcgctactacaacggcctcccgaatgcaaggttagacaagcacttaacttaataggccaaggtcaccccataataacacatgtggatgtacagtaaacataatgaacaaacattgagtgaagtccttaggtcggtttgggcgcactctccccctatcggtacacaactaatcaccatatgtgtaccacttgaggcccaaacctaaactccatgttttccatcattttatttatcaaaatcacaagtattaaagttctgttcagattatttcaaaatcaattttcatatttgtaatgaatccataatgataaggaagatcattctaagcatggctaagcattatagtaacctaatgactccaaaactcatatataaagtggtatagtcatattgttcctaaggttaggaatctgggatatggatatatgtggggttagggtgataatgcaagtaataggagtttgtctaacaagtttaacaaaattttaatttattagtgtacaatcaacatgcaagatttgcaaacattttcaataacctccaaaacataggtttaaagtgatcaaagagagggaggtgggacttgccttgcaactgaaaaatgtcagcacctaaatcacttcttcaccgtttaagcattcatctatataaagtacacgttatgcaattaaacaccgaaatatgcgaaaaaaaatccaaaatgctctaaaatgcatgatttgtgcacagaggataggcactggtttaagatgaattttaggtgaaagaatttctattttatctctttttatttgggagttatgaattttagaagtttgctcagtataagatagtatcacctagggagtgttataaaatatttttataaagtgatgtttattaagtttgacttcacagaggtgtagaggagtgttttctaagactaacacatttggtttcataatttttggagttaatatgaattctttatgtattttacaagttataacgtgttctaggcatatagtctctatgaatatatggctttagaagttttatgtccaaaacatgttctatttactagagatgcataaaaatgaataatttagctaaccaatttaatcttagttcaaaattttagagtttatattactctactacatattttataagctagggagtgttctatgttagtgacttaacatattaacctagagcatagtgtgccaagttctagtggttagggacggaacttatgttttctctggtccaacaagttggtttattcatagctagagtgcattttaaatacctctacacatatattttgcttaaccattactatgttgaattccactatgttcactccatttggactaaagatgaattttctacaaattttagaaattaaggtatgctctatgttgcttattccttacacaaatgtttaggggtttttattatactgtaagtatgtctttttattttactagtgaacgtgcttgcacgttccctcacgtataaatacgagtttattatgttttcccactatgcatattaaacagaccacatatctctctgtttacagtttgtcatataaacggaaaacaaccaatgataccaaatatacaatttgtcatagtttgataaatgtttggcataatatgaagtgtacaattgccacatatacatacatacatacatacatattatatatatatgtatatatatatatatatacacacacacagagagagagagagagagtcctttatgtaagttatagcttccttggtcacctggttatgatgtgcatatatgcctgggaagaaaaccctgaaaaacacctaatagaatgggagaaagcaaaaagaattacttgcagaaactattggcaatccctatcactataataaaacagcattatatactttctataatgatgcatttagcataattagttactactcttttctaggtagcacacaaattaaactgaggggcaattttggtgcaccaaacctgtcagatgagtcatttttcataatctataccacaagatttcaacattatcttgctacattcgtttttaattttggtgctaaatctacgtctatgctaaagaaacataaaaaaaactgacttaaaggaaaccaacctacactaaggagccatgcaatgttgtgtaataaaaaaatataatatgaatatttgttgtatatttttttctcgaaagatagtgctctatagctctacctgcgctaaaagactccatttttttttctgaacctttatgttcatcaacaatgttttagctaacctttacaaggcaagttattatagcttcggcatagtttcagcagcatcgtcttggataggaaattgtgttgcatgttatggaataattcaggataaaaataggatgggatctacatattttataaatagattctcactatttatcatgggattagatggaatcatacaaatttttaattcagatgacagagttctcggttgtcaacgtaagcaaaatattattcttccctcacaataatatctccagaagcttctgaagcctgaaaaagatatattggtttacataaacaaccactgagaaatggaaatgctttgcagagctcgtaccaagaaaaataaaattaatagttgccattagtaacttaagaaacaagagctttatttgataaaaggcagatacattcagcaccagcaatctataaaagccaagatctgtagcagcatttagtaatgctgaaaattttacatatacacaaattgtggttccatgttgtttctataaaaagtattcagatcagcttaaacatatatgcctattgagctgcagttaacaacagaattcaaaattattttaagtagcaaggtaattgatatggaggattataggacactacgaggaaattaacaaagtacgtcgcaggaagaagttttgtacattgagcatatttgtatctcaagaagcttgctaataagaaaaattcaagggaactgaatggtgttcctaacctggaaactcaatcatgcgtcaaaatgataggaaaacaatgcaggtccaaactgaatgaaactttatatataaattgatctatttaggcaggggcaatactacttccaacactcttactactctagtgtatctagaaaggtggtggtttatacagagataacactttaatgatagctcaattgaccccaatgtcacgacgttgatggatgatcgacggcagggctactgatgggcaaagaggacatatcgatgtggggagggggggagggggtaggaggaggggatctgtaccttttggagatggcgtccgagggtgcgtagggggtggcggactggatggcgcgaccagcaatgggggcagcagactggacgacggtggaggagggctccgcaacaaacagacactgaggttcactccttgcaaactacagacttgaccccaaacacctgatagtaaccaatcaagtggaacagctgcaccatccacttttgaaactcaaattaggtacctcttgcaatatgcatgagctcaaggaccaaatccccaacatcgctgcaactcctttttatgtcaggattagcagaagctcattttcagcatatttatgcctttttttttttgaagagaataggcttcattgctatacaaacaaaacaattgatttcgaatagttggatgtcaaaatttgaggcctgattttagtctaacatgtatgacaagtgcaataacaacataaacaaataatcttttagaaagatgtcgtctgatgtaaacaaaggatgtcgtcagtttatttcagtttcaatgcaaaatgatcgtgaaaaacaacatgtattatttctatttccttcacagaacaaaaatataaaaattactaagcttcatttccacatctatccaaaataaaagaaaaaaaatagttatattagataacacaaactgtatctgtagagcatcagtcatacataaacaacattgatataagtaattaagtagccacgcttccaatcaaaagtagaccacttgacaaacctttcaccaatttttggcctagaaattgacaaagggatgccgacacgcaccatgtggggcttaggacgctataatcaggagttcgtcttgatcaaaggcaaaactcacaaagtgtattcacagcatttgatgctacatcatatcaatttggggatcaaatctactggaaagccacatggagcaccgcccaaacggaattgcgtcatggtggttagttgctcgcaggacttgtagttgtaccttagctagttggttgtggttgtgcatgggcgcagtcgcagctgtggttcatcctcgttgccacccaatcgaccgccagagccacatccacgtcttccgtcatgccatatctacccatgtaataccccacatggattagaactgattttataatacttagagtactgatagatccatatgtgaaaagaagctcataacaaaggcaagagggagcagcagtacattaagatcccattttatatgtcgattaaatcaaattgaataatcaaagtcatcatattttcctaaagttatcatatttcccttagatttcctttagaagactcaccaagatggtttgttggctcatcaagcaaaaggatggttggattcataaacaaagctcttgccaaagcaatcctcacacgcaccagaaaaatccagagttttctttgcctgcatttgtttattaaagcccaaaccaatcaatatgtcacagatatagcaataggaagcgtttgaagagctggtcacctgagcagacgaaaacaaaggaaagggcctgttcactttgatgccaaaacaaaattttggcatagttaccaaaatttgccaaaatttaccaaaattttggtagaatttcttatatagttactaaaatttggcagcaaaataaatgtagctacttttttttttgtaaactttaccaaaaattggtaaggttgaaaatggcattaaagtgaacagccctaaaaacaaacaaactccgaactcacggtggtggtgatccaacgggcggacacagagaccccaccccccaaattttggggaaaacccccggaaaaagggggtttggggccccggaaattttgggggttccgaaggaggaggtcggtgatggtgaagatgtcagcggcgggcgacgctgtcggtcagcaagggctgtgcctcaatcgagccagcgtcggtgaagatggcttcgacggcacgacgactgatagagaggggcggaggagatcgatgcgacggcgctcgcttcaacgacagctgcgcgtggcgacggggacccggcgactgttggcgctgcgagattggtggcggccgggcggagatcgatggggcggtggcgcggcgactgatggggaggggaggggcaacgataccctcgctctcagcgccgatgaggcggcgatgaatctggcgttgcggcggcgcgatggagcgggaggggatggaggagcggcggagcgtcgatgtgcgacggttcgggaaggaatgaggaggcggcggcgtggggattgcagaggttagatcgtgttcccgttctttttttttcccgttctttttttttcgtatgagtagtttcctttttttcgtgcgcgagatatggtgctgtttctttgggccagatgaccaggtgggtcccacgcgaaggattgcagaattatggatgaactcgtactttttatattaatatacataacattgaagtgcatagctctatgatgctatagaacttgtgtttactcaaaaaggatctgagatgaattttatataaacttctaaagttcagctaatctaaaactagtcattttaaaggtaatagttttagaggcatttgatgtaaagtgtgtatatgttttatttcactttgtttttagagaacatgttggtggatctttagaaactaagtttgctctaaaatgagttgaaatgtattttgtatgcattttataaatttgtatatgctttatgtatgatttatcttagatgaattttagaggctaaatttgtactgtgagtgcaagtttttatttcataactttaaagttcataatctagtgagttcaaagaaatttgaatcatctcaaaataagctttatttgattttatatggattttacaagttctaggtttctctcttgtatagtctcagattttatctccagggggtccactgtcagtgatttgcgaatatgcagaaagacccttacagtttttaagaatcaatccgcagtcctaggcccatatatatgtcattgagtggaaagattgtacaataaaccttatagttgtttaaattctcaaaatgaggtcctcgtcttctacagaggcagagcagccatggctgagctcgatctcaggttcaccggaggcgattggtggctcgtttggggttgaggtaaaaatataaaatgaagagaactctctcacgattccattcctctacttttctcgattagtggacatcggagtagcgccggcggcgggtccgagcgaaagatggtttcgggtggtggtgcatgtgactttaggggctggatctagatgaataaagtgcatgaatgcgacactaaagcctcaagaatgctcgccatgagtctagcgaaggttgccgtggtcttggcggcagcggtggcttgcagaacggcttggcgacggcaagaacctcccgggtgaacggcgacggctcaatcggcaccaagaactatcgtgcaaatgtgtccatgaggttagtgaggccagagagatggtgtgtgcgcgagtaatcgagcaatggctcaccggaggaggcggaaacgacaatggcgacggcaaccggaggtgaagaagacggtggccgatctccacactcgtagcaccattcttcgtggttcttgaggggaaatggagaggagtacgaggcgaagacgatggcgcgatggcatggcccggcttggtccagatcggtggcgacggcgacgatgccaccacagcgacgtttggagcgcgctctggagctcttgagggcacgtcggcgttcccgtcgatccgctgcacgagagaggatgaaatcaaaaggagaaattttccgtatggtgaggtgagtatggaacgtggaagagatagggttggcgaagactcgtaggcgaggacgagcgtcgtcttcatcacagccggcggtgagatcgaaggcgaggaaagcagctagagcttgttctctcggtttggtcggcactggagtgaggagtgaggatgggcgatgtggctgggaagagaaggaggctcggctcggcgttgccacgtctcggccacgcgtcgcgcacgcccagagccgatcactctctctcgttcattgtgggtctttagattggtggaaaagttatgcacagagttggagctagcttgtgacaccgtcaagtgggcccaggtcggagcaaattaggtgaggatgagaagtttgggtccagaagcaggtgggcacagccgacacaggtctcaggcaaattccaggaatttttcttgattttatttcttctcccttctttgttaatttatagattaatttttattgcatatgagttcacatggattttattggaggcagatgaatgtacctagtttccattttatttggttgtactaaaaaattatggatagattgttcaaaaaattaggagaagatagactcattggaaaccagtttgaatttttaagaggcttagaagagaagataaattctgcaaaaattatatttattcatgataattaacctaatatttgaataaattatttccctatacactttcatgcagtttaatgcacatttattgagggtaggtttttagccgattaaggattataattaacctactgtttgactggtttgaccgatttattttaggtatcaaatttagttattaaattataccaaaattacagtgagttgcatgtattaagtagagcctacatgaatttttccataattttatcttgcacgaattattttagataattagcaaggtcttttctttatatggacatttccaaatcttagatgcatctaaatagttgtaagaaatttatttagactactcttaatctatagtgatactatttaacctcattttcatgtctttataattattgctcaagtgtggttgtaggtttgattagtgaaactttatcttttatttatgctcatgagtcctagtatgcaatgccaaccaaaaatctaaatgcacaagaaagactcaagtcaaaacatgttttatgcaagtatccatgctttcacttgagttgcatctagtcctaggttgaagatgaaaaagttttaatttattctaaaattttattcacgcaagagttagatcaacttcacctagatttaaaatggaaatttttggttcacaaaattgaagaactttcctttcaactagttttgatggaaatttcttaatcctagaattcgggtatgttaaccggccgggagaggggactgtaccccatttcaacacattttcattccctctccaaagtttgctctcaagctcattcaagctttgatagtttccctcaaattcaaatcacttagttgcatttatacaagttgctttggtgaaactaactggcgggtgaaactcttgtcattcctaacccccgtcgagttagtccgttcttgcttcattgtacagaatgaggaggcgactgtctcgtctattcaagggatccggctcttcatcaagtcatcatgacgagtctagtactcgttcatcagctgatgtttcgatggaggatgccgaagttccgcgacgactcctgaacgacaccgacctcgaccttgtcagtgatcgggagagacaagtctactatatgctgagcgaccgggagtatgctgacacgcaccggagctgctgaaaaagataggtatggatgttgaatttcgttctatttggaaagcggttggttggcagagatttgctgtggtagatgagcctggttctcgtttgcttactttgcaatttctgtgcactttgaaagaaatagaatatggtatttcgttttgtttttccataaggagttcacacttacatggaaaggcttaagtacacttcttggttttcacgattcatgtaaaatcgatctccagaaaggaatttctaggttcgagacaaataggttttgggaagatatttctggtgctccaatttgcaagaaatctagaacaaatgatatccataatcctacaattagactcatgcacaaattgattgctatgactttgtttcttagaggtgatatgagacccattaggggagatgaattgattatcatcatggttagaaagatcaaaattgttcctgtgaaatgtatgataagacaatggttagaaagtataaagttctctgctcctgttgagtgcacttctctgattactcggatagcaaaagggctaggtgtcattagcgaccaaattatttttatctcagctgctcgtccgcgtattgatgaggcttatctagtgcaagggcatattctgaaacatggaatagatggatctttggtatactttttccccggttgtacaaatgaaatcccattgccaaatgcggggtatcatttgtacaactgccatgaactaaccattcccctgtagaccatagaaaaacctcgtgcaggtggaacatacagggagacgcgcaacatgacaatgatgaaacgagaaagttcatcatccttgacacccgtgcagatgtatgaggcaggttgggcaccaaccggggatgcacccggatggacccaagctccacgccatagcattggagtctcaacctgggcaagtgccagtgaggaccggtggcatgcgcctcatgacatccaatggggggacaatcaacctcccagatcaagtggtgtgcctccatctccaagtgaatggcgctcgagttcctcttgttgggacttaggtgaaatcactaggagaatggacacccttgatatgcagacaggggagatccagtacaacttcacggaacacatagctcaaacgtaagaatggcaacaatctgctgatgctcagttcgccaacatcaacaatatgatgcagcaacaacacgatgaccttcaggcgtactttcgttttcaggggttcaatccgcatcaaggaccctgagcgaaagccaagcttggggg

SEQ ID NO: 5324 - DNA, 57233 bp, Oryza sativa
atcactcatagtactttaagtgcgatttatatcttatacatttgcataaaatttttgaataagatgaatgattaaacatgtgaggaaaagtcaatggcgtcatctattaaaaaacggagggagtatgtatataattcagcatcaatccatgtatcagtattatatctcagtgctgacatgagtaaaaaaaattgaggtagcaaattcttatattaaaggagaaaaacaacactcaccttcctggttaatgggactttttagcccacagtgcacaaccttttctgtaagcttgcaattcatatctacagcaaagcatttgtagcttgcaattcatctgtaggacaggcatataataaaatctgtcagccatcggcaatggcagtgtgagcatttctattttctttacttaccaaacactgtgaggctctcaacagaactggatagggctctctcaatcatttcatggccaaggtacaacaatcctcatctaacttagatgcttcactttcctgattacaagtttacaacatctccttaaaagttttgaaccataagcaaaatttatgtatatgctatatggaaccaaaaccttcaagatcaaactaaaaggtagtctaaggaacaaaatctatgccaaaacggtaacgataactactatatttgaaaaaatacttgataattccaaaaaaaaatatccacgagattcatttgagtaaataatgagatggaaataaaatgtagccttgaaagctattgtaccaatcaacagcattctgtttactcatgttcaaatgaaaaggagcacataccatgcccagagatttggaagtataaaacaactgaagcatcactcaccatggcttccacaatgtccttgactgtttcaaggctgaaatatttttctatagcctccagcctatagtaacacagaacaaatgagatatacatgaacaaataatacatttttcctaatcagtgacatgaacaatgtggatgctatacatacattcacatgaaaattcatcattatttaagaatataaaaaagcatgcaaggtgaccccattctcagcacattcaaagtgcaaccaatgtatattactaccagtcaattatattaccaagcgaacctagctcccaaagaaatatataaaccacagctttacaggtaatgcaaagattcatgaaccacacaaaatagcactcggcttgattaaatgaattaagaactatatgccttataaatatagaactatctattccatatttccatgacagttttgtgtgtctttctgcagaataatgtaattacactgaaatagatgatggtctgagttctgaaatgcagtccaaaacatttttaccaagcaaaggaaagcatcttgattctactataattcccatgctatgtttaaaagaggacaagattatctagcattccagcaacttctgcatatgacatgttaaagcacttaataatacattctcagtttataaattagaaatatatttacttcttatatgtcttacctacaaataatgctattcttatccggatacacaatatcctcatgtatagaaataatgctgtcatcatgctgagagagagagagaggtcatttgtgaagaagagcaatactgattcagaactaatcatcagctgagaaaaataaatcatattatagtttcaggtttgtcactctatttagtaaataatgttgttccacttttttttgttaatgcgtaagttccaatcttagcatacctttgtcgagttaaaatgataactacacaagtttcttctgtctttgacaccttggtctccacagtttcatttcacttttcaaggatgaatacaaattaccaaaggggtccgtgattgagccctcaagagaatcaagacatgtgcttaaaataagtagtaagctctatcttcaccatttcttccctttctttgtcgtttttttattgacagctttgtagttgatttgagacagtgcagatagtatttactttgatggcatgaagaattttgagaatcaaactgaaatgttgttagaatgaatgggcatgtgtctgatacagtttcccgatacctgggactattttctcattctattcatgcatttggttagcattgagtgcatgaagagtagcaaataagtcaccacagataatgctgtagaaaatccatggccttttcataattaaaccaacttctatcctgttttcattttatcatgccaaaaggaaaagaaagaagaaagaaacatcataatcatgtaacactgtgaggtagcatttcaatgcaatgataaatccctgtcacgttttattgctgcttatttcatttcatattagttccaggtaaaatttaaacaggcacactccgctcttcattaataagcttatcttctgtgtttttgtgtagttgaaggagaagaattggggagcatacacaacatgcttttgtgcaagtctattttagatctctagaaaggagacgatccatttggcagaaaatcaaaagaaatccaagaagacatggcttctactcttaaaactgaaaggggcacttaaggtttaaatggcatatatcatgtttcgaagagcttgacgttttatttctgggagttcagacttatgacttatgagagcattcttagctctgatcaagtatattctttgcatcatttttatttgcttactaactttactcttctagccttgaactctctcaaaacagaatgagcggagtaaccttgaattttaatcttgcaagacatttcaatgtctggaaattgacctaagtaaacatgttcagaggggaaaaaaggaagaagagagaaacagctggctgctgggttatgcaaatgatctatagaatagttagcagaaactcgtctggggaagcaaattatgtgcatatttcacgcaggatcatttgcacaaggcccagcttgcgaagccaataatctaatgcggtaacccagtaataaattcgaggttcagagagcattgacattccaactcgatgtaatcgaagtaaccaaatcaccaaataccccccatgaaagcaaggacagcggtattgatttcagtattttacaccccaaaatcagaacacgaattcggccacagtaatccagatcttcagatgcatgaggcccgtcaaatacagcagaataaaaattatcatcagaattaatttagagcctcaactgacctgaatatattgatcaatacagcagggcctaatctggaagctcaggacgacattagcatgatgcatgtttgcatggctccaactcctggactcctgagaaaccaaacatggccttagatattttctcctttaaccacatcaaatcattgaagcaaattacattcaaataaaaagaaataacagaaccagccatagaatatatgcatcacatcattagtaattagaagtcatcagaacactgcaacttaaaatgccagagaaaacacatgtttactgctatcaaccaatagcacttggtttcactggatatattggcatgatttaatttccatatagataccaattaatagtgatgttatcgtgtaataaaaatatactgcatatatggaaagcgagtgattcctttaaaggagcagcttggaatatgttgctcatacaattgaagatgattctaaggaacaaaacctctggaccgatacaatgtaaacaagaccaaaaatcatctggctttgcatcacttgaaacaaaataaagtaaatacatagtctgaaatatacacttcctgataatcttgaaaaatctaaggcttgatgacatattttatatccacggatagtttaacctgccatatttatcttcgccctagcttatctgtattccacaaatttatgaagtagaagaagtatatctgcatatctgacctcatagtactgaatacacataggtaaaagagaaatgcattcttcagtcttggtgagacagaatcaacagttaagaagacactacagatggtcgacatataaaaccactcagacattgttgtggcttggattaagaatgtacgtaccctgaaattagtgtcaggttcaagaaaattaccagcataactggtgcccgtcgcaatctgtcaaattcttcacttacaaattttcctcacttccctttctcctctacacaagccatagaacaaataaatttacatacttttagtaaaagaactatagcagccacatcgaacagtacactgggggaggttcggtttggaattgtggcgcttatgacataggtttcactagactactctagaccttgcaacacatcacgagcttgcaaataagcattgtggtagctaaagcgacaacccataagaaagatcaatgttgcagtgctgatcaatttattttcaccccttgatgcaaatcatctaaaaacctggactaccatcatattacctgaagatgaattattgagagctgaagaacatggaaaattctggtatgcaatccaaaggtgtcaaacctgacatgaaaaaggaaaatgatcagatcaacagaggctcatcataccacaccatcctcaattttaagtcaaccaatctcatattatttgcaattgactgaaacctctgcatgaattaattatttttgtctctcttttccttatggctatcaagcaaccatcagtgaccaactgcagtcccattttaagtatttaacatttaagaaacattaagtacagtaaaatgggagattgagattaacatcttttgaataatagtgccaaatataagctcatcctcctaccagttgtactaaaaaaatttgactgccaataaccaatacgctaactactaaaaaaattcatccagtatgtgaagcttctaaatttttccacaaacacactccaaaatcctattctataactaagtcccaagaaaacctaaaataccaagaaaaatactaagaaagagaatagattaatgcatctagaaatgaatcataacagattgctagaagtgattcgctattgattgttcagagggcaacgagtatgaaatatagctaaccaacctggtcctctgtgttttcagatgtcatggcatggtcacagcaagcagaacaaccagctatggtggaggattgatcagagtcgtttatatgatcctcaagcacaacactggaatgaaaaggtgccacatgtatagaaatacaaatctgaaatattaagtaaccatggggaaaaaatggctcactcattggggaagcatgatatattgcagattccttcaaccaaaaaagccgaaaccaccaaatacaaaacaaattttgagacattacccaaatgcattggctctgaagtgaaatgataggcatgttactgcagatttattcgcggcaaaagagtttcaactttccaatcacccctccacaaacccactccaaaaccctattctataactaagccccaagaaaacctaaaataccaagtaaagtactaagaaagagaatagattaatgcatctggaaatgaatcataacagattgctagaagtgattctctattgattgttcagagggcaacgagtatgaaatatggctaaccaacctggtcctctgtgttttcggatgtcgtggcatggtcacagcaagcagagcaaccagctaaggtggaggattgatcagagtcatttatatgatcctcaggcacaacactggaatgaaaagcccagtcaaaaaaacactagaatgaaaaggtgccacatgtatagaaatacatatctgaaatagtaagttatcatggggaaaaaatggctcactcattgggtaattgcagatttttgatgggatgtctccatctctaaagcagcttctagtattagtgcaagactgcttcactatggaagacatataatcctttgaataagcattgtagtccctttctttacttggcactgcatgagacaccttgatgtgagtttatggaaattgttcacaatttttttataaaaaaagaaatctctaaatgctatacaaatgggagaacctatggcaatgagcatagtgttgatattaggttccaatgttgtgattgcaatgtcccatttttcgaactttcttctagagttcacctagaaaaaaagatctgatcagtacttcaatcccagctgatgagttcttttagatggaatggatgcaggttctgtagaacatcataaacatggcaagattagggtctctcaaaatttcatcaccaacagtggcattagagcacctggtaaattggtataatagttaggttgctccattgcattaataaaaaaatgaaaatcactgtcaatgttgatgtgcaacaattcatggtgtataggggaaaaaacgagattaactattcctcatggcaaccttaaaagaacaactcacacaaacctgcacatcctttgtaagctcctgtgccaagagtttagtagtcaccgtcgccaccgccgtctctggtgccatgagttgctcgctgctggtcattggccttgtacattgacggcaacgcggctgccgatgaagcgactacctgtgacccagagggcacagatgggagggaaggggaaggcattggtgcggcgtacggtggatgcccctgctgctgctggtggtgaagtggcttcttaacgcagtctgttggcgacggcgacagtgagggcgacgccgacgaccatggcgacgccgatgagtggtgggctggggtgtccttgtggagatgagaagcagatctggcgccgggaggacgaagaccgcgcccgcctcaacccccactccctccgccgtctccccctcgagttgatgcgtccggaacctcgcggcagtcccgccgccaggattgggccctcagcttttcgcgccgcctgtgatgcagccgtcggcgctccgacctcgtcgttgacggatgccggaggcggagacggctgcactcggtgacggcggtcggagacggcgacgcaatggcgccagcggcgcagggcgacggggacgatgatggcgacgacgcgagggggatgcggaagcagaggcgcttggagacggtgacgcgacgacagcggctgcgtaggcggaggcaatggcgcgaggggaaggcggaggcgagggtgggggaggagacggcggagggagagggaaagggagaaggagagagtgggggaagagagggcggaggggagacggacggcggcagctcggccggcgatggggacggcgggaggcggaggtggcagcgcgatggggaggcggcggcgggggtggaggcggcggcgcgaggcgacggggacggcgtgagggggaggcggaggcggcagtgcttggtagcggcgcgagagagggagagcaagcggctagggtttgaggggtctgcgctagtgggagtattttttcgaaaaagcccctcgtcttccacatatcacaacgaagcccctgtccgcgattttttctcttcaaacacaggacgcgaggggcctatacctgattacgaagaaccggagggctttttcgcaaaaatccaacctcgcactgtagctactgtagcaaaatccgacgtggacacgcccagcgtccgccccttccgccacacttaatagtttctaatgaaccatggcatatagaataatcaattcattatcagagacatggcaatccatttgtacataagcctaagagttagattatggatgtcattggttctgggtttcttataaatcggtgcaccagaaatatcttcacagaatatgtttttctcaaaaccggaagttgccttccaaaaatcgactctacaggattcggggaaaccgagaagtgtgctcaatccactacataaaagattaaactctttacggaaaagtcaaaaagtaacaccaccctctgcttctctaagtgtgcagagaaactgtatagttagtagacaagagcctaagtgtgcacagaaactgtatagttagtagacaagagccaagctcgtctaccgttgcaaaggcgtgccaacccatggttctccaaatgacactaaaatctacatccatacttgttttccggagtagctttggatcgtacgctcggttgtgagcgaatgatcggtccttcagcatctggtaggcttgtttctctcgtctgtcaacgatatcgaggtcgttgtcggtcaggagctgtggtacagcgtcagtgttctccattgacacgtcggcagatgcccgatcgctcgactggttggatcgggagccggatcccttgagcaagtgggagagccgtctcctcatgactgcacaaaggcaagaatacaaagcgaactcgagcaggggttagcacaagacaatatacccgccagttaactttgcaccaaaagcaacttgctaatgcgagaatggaggattttaactatgaggctgttggctgttgttaatgacagactttatgccaccaatacctgcataaatcaaggaaataaaacatccaacatagtgatagggttaaattctgacatattccacgagtgttggtgtatatttgtatgcaggtaataaaccaccaaagttggaccaaaaatagacttgagtgaagaataattcctatccataccaagagtgggccaaaaactaccagaaaacatcttcaaatgggctttccactcacagaaatggatagaggacgcagagaaggagcaacaggccgaagatgggctctgtcgagccagacctgggtttggtcgaacccatggttcggccaaccactaccacagccgttcgaactggggcttcgcgtggatggtctagatgagctcctaaatgacggttggagggcagaagtgtcttttcgcgttccataaccatcatacctgttggtgataagccctagaggcaatcatagagatgattgtatcacatactatatttacatatttatccgatattgttccttgaaatagataactcattattggttaatgaatatgtgattctttcatgagactctttatgttgtatgctactattttggatgaagcacaaagaacaactcgcactaaggtaataaagttgtttaaagtccaatggaatcaccatacagaggaccaagcaacctggaaacgggaagattatttacaattggaattcccgtatctttttgaagactcctaagcaaatctcgggatgagatttatttaaggtgggtaggtttgtaacatcctcaaattttaaactaaaatttgactgcatcatgctggcttttgactatattagcaaaattaaaatcattgttatttgaactctttttattcttaattttggttcaagtattatttctttagaactcttttaacctaccctaattatttcctttaccctaaaccttagtgaatgttggcggatgttaaatgcagattctataccgacaacatctgcataaagttcagataataaaacatccaatatagtgataggtgcttaatctcacatattccacaagtgttcgtgtatatgtatatgcaggtgtcggtgacatggggccgggggtatcgtgactagaggcttgggtagccgcggtcacccacgtggcctgaccccctcggggggggggggggggtcgggcccgagggtgacgtggccacccctccctctgtctccccaaggggtcgggccgctcccgtttcggccccgagggctggggcgcccccgtttcggccccgagggctgcgacgccccgaccccctgtggttttggcgccacgtgtgtgagttaggtgagcacagcggggctcacctaaccgcatttataacaggttggacgagcgcgccacgccgcatttaatgcggcgcagcgcacgcttatccggtctgtgaccagtcgcggtgtgtgaccggtcacagaccggtcagatcgcgggttaggtggcaacaggcggcctgtcacacgcctcgccccgtcccgtcggaatgatgagagcttcctggctctcgtccctagccggagccggcgtgctaactcctggagttggtatgtcagtcccggtcagaaccattccaggcttcagcgcaagtatggcaaggaagtcgctggccattaaatgaaggttgaaatgggcgtccaccggaaaagcgggcgagcggggcaggaggcgtgtgctctgcttgtcagaggtcacttccggctgtagactagccctcattgtaaaaagcatgtttcctttcttaggcagctggaggcccttgtggtgacccctgaccagataaaaaggaggcccaggcctaggaaagggggggactctggagagaaaagagaaaagaaaaaaagaaaggggactctggagggaggagaaaaaaggggaatgggtgctagaccctgaactctggctcgctctccagctctctgtattccttcacgcacagatccactagaacacaggagtagggtgttacacttcccagcggcccgaacctatctacgtcgcccgtgtcttgtgcacttcctctctcgcggacgttcctcagatcgagggcaaagaacctcacttagcgcccccggccgaaccggcaaaggggggcctgcgcggtctcccggtgaggagccccacgctccgtcatctggcgcgccaggtagggggcgcgcgtgtctttttaagccctcgtcctctttcgtgtgcaccaagcttctcccgctcagcctaatggccgaacgggcagtggcgcacagcctctctccgaacgctagcggtgacgacggggagcagaacccgcgccgtcgggctcgcaccccaccgtccccctctcactgaaatcttgggcggggggaggcgctcggggaggtcgaaggaaccgcgacttcaccgcccgcgggcgacgggggaggacggcgagacggggcgtgtcgccgcctcgtctacggcgatggcggcacgccccagggcgcgctccaggctgcgggcgcgctcctgcgtcacccgcccgtcgtccccgatccagagactccagcccgacgttggctggatgacgtggccgacttggtcatggcggcgcagcagcgcctaggcgccggcgggcggtcctccgccaccgagagcctctggcgctgccgccgccggctccatgtcgtcgaggcggagggcgcggcgagcggcggccgttacccgccgttcgtccgccattccctcgtcaacgcctccgacccaagaagatgtgcgtggggggccggatgcccgcctcgatatcgagcggcggcgcgacgcgcgccgcccacgcaacggagggcgcttcctcgtccggagcgccacttcggtccgggcacgggggccggccccccgtgtccccggttggcggtgccggctgtcgagcctttgtggcgagccttcggaacgtccgttggccccaaggttccggccccaccatcaccgaaaaatacgacggaagcgtcaaccccgccgagtttctccagatctacacgaccgggatcgaggccgccgggggtgacgacagggtcatggcgaatttcttccccatggccctgaagggtcaggcgtggggttggctaatgaacttgccacccgcgtcggtccactcttggaaggatttgtgccagcagttcaccatgaacttccagggcatatatccgcgcccaggcgaagaagcggacttgcatgcggtacagcgaagggacgatgagtctcttcactcgtacattcagcggttctgtcaagtccgcaacaccataccgtgcatccccgcacacggggtgatctacgcgttcagggggggcgtacggcgcaaccgcatgctcgagaagatcgcctccaaggagccccagaccaccgcgcagctttttgagctcgcggaccgtgtggctcaaaaggaggaggcctggacctggaactcctccgattctggtgtggcagcttcggccgcccccgggtccgccgctcggtcagggcggcgggacaggaggaggaagaaggggtcggcccgttccgacgacgagggtcacgtcctcgccgtcgagggcgcttcgcgggccccccgaaaggggaggcctgtgagcgacaaaaagaaggaggccggcgctcccagcagggagcgcccgaccggcaagtggtgtaccgtgcacaacacctccctccacgacctcgcggactgccgcgcggtcaaaagtttggctgagcggacgaggaagtgggaggaggagaagaagcaggagcgctgtgagggcaaaaccccggcggctcccaccggcaaccggcgaggtgaggccaagcagaaggccaccgccgaggacatcgacgatggcgacgatgacctggggttccaggagcctgaggccaccgtcgccaccgtcgatgggggagcgtgcgctcacgcttctcgccggagcctcaaggacatgaagcgagagcttctggccgcggcccctacccatgaggcgacgcggcgggcgcggtggtcggaggttgccctcaccttcgaccagaccgaccacccgccgtgcgttgcccggggaggacagatcgcgatggtggtttcccccaccgtttgcaatgtgaagttggggcgtgtcctcatagacgggggtgcagccctcaacatcctttcccccgcagcctttgacgccatcaaggccccggggatggtgctccggccgtcccagccgatcatcggtgtgacgccggggcacacctggccgctgggtcatatcgacctcccggtcaccttcggtggttccgccaacttccgcacggagcgggtggacttcgatgtggcggacctcagtctaccctacaacgcggtcctagggaggcccgcgttggtgaagttcatggcggcggtccactacgcctatctccagatgaagatgccgggccccggtggccccatcaccgtccatggcgacctcaaagtcgcgcttgcttgtatggagcagcgcgcggaccacctcgccgcggcgtccaagcccgcgggtggcgacgagaggctcagcacctccgtcccggccgccccaaggcagcggatggtcacgtgcgacgaggtcccggtcaaggaggttgccctgggcgacggctcgtccaagaccacacgaatcggtggtcttctggacgacaaataggaagacgcgctcgtctccttcctgcgggcaaacgccgacgtcttcgcctggagaccggcagacatgccaggggtccccagggaggtgattgagcaccgtctcgccgtgcggccgggcgcaaggccggtccggcagaaagtgcggcggcaggccccggaacgtcaagccttcatccgcgaggaggtggcgcgacttctggaggccggattcatccgtgaggtcatccatctggagtggctggcgaacccggtcgttgttcccaaggccaacggcaagcttcggatgtgcatcgactacaccgaccttaacaaggcatgtcctaaggacccttaccccctgccacgcatagatcagattgtcgactccaccgcggggtgcgaccttttgtgttttctagatgcatactctggttatcatcagattcgcatggctagggaggatgaggaaaaaactgcattcattacccccataggaacttattgttatacgacaatgcctttcgggttaaagaatgcaggtcctacttttcagcgtactactcgaatttctttgggtagccagataggaagcaatgttgaggcctatgttgatgacttggttgtgaagacgcgcaaccaagagaccttactctcggatctagcggaaactttcggaagtctccgctccacccgcataaagctgaaccccgataagtgcgtgttcggcgtgcctgcgggcaagcttctcgggttcttggtctctgcccgaggcatcgaggccaaccccgagaagatacgagctatagagcggatgcgcccccccagcaagcttagggatgtgcagtgcgtcaccggctgcatggccgccctaagtcggttcatatcgaggctgggagagaaggcgctacccctatttaagctcctcaaacgctccgggccgtttacctggacggaggaggctgagcaggccttcactcagttgaaggcgtacctcagttctcccccagtcctggtcgccccggagccagatgagccgttgctactctacctggcggcaaccccgcaggtggtcagcgcggcgttggtcgtggagcgcgacgaggacaaccctcactccgcgcatccccaccctgtgtcgactcgacccgggagagagcagggaggagaggcccccgagccgaacggcggcccaaggcccccgacggtcggagctggccctccgcctgcttgtccgacggtgccaggcgcccccgacccccaggatggccccggggccactgcgggaaggctgcgcctgtcgccctctgaccccgaggtcatcggcacagaagccgagtgcgccccgcgtggcctctcggacgaagagcgccctggagatgcggcccctggcgaagaggattggccccgccgaaaggtgcagcggcccgtatacttcgttagcgaggccctccgggacgccaagacccgataccctcaggcccagaagatgctttacgctattctgatggcttcgaggaagttgcgccattatttccaggcccatcgggtcacggtggttacgtcttacctcctcggccaaatcttgcataaccgagaaggtactggacgggtggtgagatgggcaatcgaactctctgaattcgatttgcgctttgaaccacgccacgcgatcaagagctaggccctcgccgactttgtggcggagtggaccccagctcccgagcccgtctccgcccccgaggccagctcgggcccctcgcagctgcctcacaccgcctactgggtgatacagttcgacggttccctgtctcttcagggcgccggtgcgggggtcacgttgacctcgccgagcggagacgtcctcagatacctggtccgcctcgattttcgggcgaccaacaatatggcagagtacgagggactccttgcggggctcagagtggcagctggactggggatccgccgcctcctggtgttaggcgactcccagttagtcgttaaccaggtctgtaaggagtaccagtgctctgacccgcagatggacgcttacgtgcgccaggtgcggcatatggagcgccatttcgacgggatagagcttcggcacgtgcccagacgggataacgcggtcgccgacgaactctcaaggctcgcttcctcgcgagcccagaccccaccgggcgcctttgaggaaaggcttgcccagccgtcggcgcgacccgaccccctaggggagacggacgcgcctgaacggcccccgaggcccgtcggagtccaggcctcggggcccgaggggagcgctcccagctcccctagattgattgcttggatcactgagatccaggcgtacctcgcagataagactctacccgaggaccgcgaagggagtgaacgcgtccggcgcatctccaagcgctacgtgctggtggaagggaccctctatcggcgcgcggctaacggagtcctcctgaagtgcattcctcgggaacaaggcgtcgagcttctcgccgatgtccatgaaggcgagtgtggagcccactccgcctcacgcaccttggttggcaaggcctttcgccagggtttctattggccgacggctctcaacgatgcggtcgacctgatccggcggtgcagggcgtgccagttccacgccaggcaaacccatcggccggcccaggccctgcagaccatacctctttcgtggccgtttgctgtctgggggctcgatatcctgggtccgttcaggcgggccccgggcgggttcgagtatttgtatgtcgctgtcgacaagttcactaagtggcccgaggcttatccggtcatcaagatcgataagcactccgcgcttaaattcatcaggggcatcactgttcggtttggggtgcccaaccgtatcattacggataatggcacccagttcactagtgagctcttcggtgactactgcgaagacatgggcatcaagctctgcttcgcctaccccgcccaccctagaagcaatggccaagtggagcgcgccaatgcggaaatcctcaagggcctcaaaaccaagaccttcaacatcctcaagaagcacggcgactcgtggatcgaggagctgccagcggtgctctgggcgaaccgaaccacgccaagccgagcaaccggggaaacgcctttcttcctcgtctacggcgcggaggtggtcctcccatctgagctcaccctgaggtcccctcgggtcaccatgtattgcgaggctgatcaagatcagcttcaccgagacgacctcgactatttggaagagcgaaggcggcgcgcggcgcgcgctaccagcagagcctgcggcgctaccatcagtgccacgtccgggcccgatcactctgcgtcgacgacctcgtcctacgccgcgtccaaacgcgtgccggactgagcaagctctcaccaatgtgggagggtccgtatcgagtgatcggcgtcccccggccgggctccattcggctggccacgggcgacggcacagagctgcctaacccgtgaaacatcgaacaccttcgtcgcttctacccctagtgggggtcgggtgtcatgtctcgggctcgggccaaccccgcacccccccgggcgtgcagggttggccgggggctaccacatgcatatacttatcttttttctcttccgtatttcaataaaagcattttcgatttcctgaggactgtgtctgtgccatcgtttccttttgaagaatcttggcttgaattagcacgctcgtgctcgaccctgccctcggtggcccgggccggctaaaatcgccaaatggggcccagaaccgagccgtttcccggggcgtggtgaactccgggggggaatcggcaaaggcccacaatcgggtcatccataaccctcggtcaccgctctcccggcctggccagtctcgacacgtggatctccccaggcactagccccgacccgcgccgtttgaggctgggacctgggcactagcccttgttcaagccaagacacagaaggaccgcggcacagaccatcctcgtcttatacacacaacaaacagaactgacgcagaaatttcctctttacttgattgcagattaaatcagtctatacaaaaagggggcccgaaggcctcggaagaagaaggaaaagttattaagattggcggggccttgggggctcactccgacgcgcccgggtcgccggcctcgtcgtcgctgtcgtccgcactgtcgtcaccgccctcctcgtcgaagtcgagggcgaacgcgagccgaggggccgtaccctcaaagctgtggacgatgtggtcggcggaatcccggacctgcgcgcgcgcgccgtcctcggttccgggagggaaatcttccagtgctgcccacggggagaagtcagggtccctggcctggtagcttgccagtacgagctccaccgccccccgggcgaggtccctcgaggatgacttgatcgtctcctcgagctcctcggggagccgctcgagggccccggccatctctgagaggcgctgggcgaggcccccctggttggcggtgtacttcgcgtaccgcccgccccagaggcccgcctgctgcccgaagcatgccgggccctacctcgctcgccaagcggagggcctcgacctccccggcggacgagtccagcgcgccctgcagctcggcgatggtgtgttcggcggctgcgaggcgggcggctaggtcgccgtggcccgcggccgccccgccgctgtgcgctctcgcgtccagctccttcgcccgcgcctcgagctcagcggcccgctgatccagtgcggccctctcggcgcgggcgccttccagattgcggcgcgcctgctcctcccgcgctgcctcgcggaggaacaggctgttcgccagtcgctgcgccgcgggctcggcctcttcgagagttcgcccccgctcggtgagcgcgtcctcgcggaggcggagtgcggactcctctttagcgcaggcggcctcgcggtccgccaggtttctctccttcgcgtccagggcgcgggcgcgctcctccagcgctgtggcgcgagcctcaagggcctcttcgcgctgccgggacgccgccttgttctccgccgcccgccgttcccgggcagcggcggcgtcaaggactccccgggcagcgtcgagcttctcctctagctccgccgcccggctcccgtattggaggcggaggtcgtcccgcgcctcgtcgagcacggcggtggcgatgagggcagtctcccgctcctcctccacctccctggcgatctccgccaggtccctacgacgggcctcgagctgtgaggcgtgccggcggtgtgccttgcggcccgcctccaccatggcctccaccgagcgccgcccctcctcgacgtgcgcccacgccgcgtcgagctccgcccgctccgcatgcagggcctccatctgggcacttaacccgtccagcaccgtgctgttcgcggcggccaaggcctgcaggaggggctccgcgctcagtggggcagcggaaggcagaggggagagccgcctcagtgtgggtgccgcgcggctcggcccgccgatcgacgtgccggactcgggggcgtcccccgaacctggctcgtcccaagcgtcgcccgaggggtcgggcccgagcggcgcgcccgcggcctcgtcgtgggtggcctcggaagtcggcgtcgcctcgggcggagtcgggtcgggggtttggcaggccgcctggcgtgcgcgcgccgcctctgcctcccggacggactccccggcccggcggagtctagcctcctcccgagcggcctcctcagcctggcgaacccggacggcctcctgggcagcctcctcggcttcccggaggcggtccgcggcttctcgccggtcagcttcccgcctccgggcctccgcggtcgccgtctcctcggcctcagaccggctggacttggaatggcggggagggcgcgacgggatctcgcttaggcagaagaaaaaccagaagacaaaaagaaacgggtgagtgaaaactcgccttgaaaactcgcggtgggcgcggggacgaacctgcggggatgtcggctaaacgaccacctcgggggcgagatgaggctctcccggcatggctcggtccccccatcttgcggagccgtttcttctttcgctccccctcgggctgcggcgtcgacacagcaccctccgggcgcctgctgctggcacgcaccgccccgccccctcggggaggagatgggggaggggtaccctcctgcttcctcttcccccgggcgtcggtagggcggatacccccgggcccccgtcgcggggcccagaagcacgaccccctcccggggtagattgttccctcctgcggctcccgcccgcgccatcgtggcctcggggggcccgctcccccgacgccccgaccacctacatgatggccaggatcttggcgcgctctggatcgcagcagatggggaggaccccttgggggatgagggatgcctccacggagctgagattcagcacccgttggaccaccatcctgaagtcctcagggtccaagtcccatttgcgcccctggtgggtcctcacgtagtcctcgggcccggtgtacacccaggcgccccgggcgcgccgctggagcagcgcgatccggcgatgaaggtagtcaccgaacaccatggcccccgtgagcccctgggatcgcagacccgccaggcggtcaagaacggcgtcgtagccgtctcccagatctaccgtcgcccgccagctggaggcctgcgccgggggctggctcggaagtcggaggcgcgcttcgtcggcgaggggggtgtagaaccaatcgctcttccagtcatcccactttttgcggaggacgcagagaatgtagcggttcagcacctgcccccgcggctggaagtagcagccaccgactaccgtcggcggcgacaccggctgtacggtgaagaaccaccggaacagccggagagatgggcgcaccccaataaacatctcgcacaggtgcgcgaagatggccaacgtcattatcgcgttgggggtgaggtgcgccatctggagatcataaaactccagaatatccatgaaaaaaatagagaatggcgggaccagccccgccattgcgaaagagaggaagaagacggaccgccccgggtagtgtggtgtcgggcgtccctcgcccagcgcgaccacctcccggccggtggcggattctggcatgaatcggcgcggcagcccggcctgcctctcgctcacgatgcgggaaggcggcagcacgctaccgtcgagcggtgcggagctccgtgccatgacgccggcggaggaggagcttgagagcgagcgagtgcggcaagggtagggcacaggaaacgaagagttagagcacaagtggcgaaggcaagggggagagtggcgagaggaaaggaacgaatcccttcctcgacgtctttacacccttgccaatgctatacccggcttctcgcgcccacgcctccactaacccactcgctcgtttgcggcgcacgcggcagatgtgcggccgtggcggttgagatggggcagatcgtgcgcgcattaactacgctcgccaaccgtgaaaagcgccatcatcatgtctccaggcgaaacgaaccggctcgtcccgattcgcgcgctgctcgagtaatgtagcagtcttaaagaagccgctcattattgtcggtcggttttcccttgctgatgcgcgcgatttgcgaccgctgggtttctgcccgcctgtagggaccggccccacctgtcaccgggcctaaggagtggcgtcacgcccgagcgcttccctcgaggggggcgatcgccctggcgtaacgccgggggctactgtcggtgacatggggccaggggtatcgtgactagaggcttgggtagccgcggtcacccacgtggcctgaccccctcggggggggggggggtcgggcccgagggtgacgtggccacccctccctctgtctccccgaggggtcgggccgctcccgtttcggccctgagggctggggcgcccccgtttcggccccgagggctgcgacgccccgaccccctgtggttttggcgccacgtgtgtgagttaggtgagcactgcggggctcacctaaccgcatttataacaggttggacgagcgcgccacgccgcatttaatgcgacgcagcgcacgcttatccggtccgtgaccagtcgcggtgtgtgaccggtcacagaccggtcagatcacgggttaggtggcaacaggcggcctgtcacacgcctcgccccgtcccgtcggaatgatgagagcttcctggctctcgtccctagccggagccggcgtgctaactcctggagttggtatgttagtcccggtcagaaccattccaggcttcagcgcaagtatggcaaggaagtcgctggccattaaatgaaggttgaaatgggcgtccaccggaaaagcgggcgagcgggcaggaggcgtgtgctctgcttgtcagaggtcacttccggctgtagactagccctcattgtaaaaagcatgtttcctttcttaggcagctggaggcccttgtggtgacccctgaccagataaaaagggtgcccaggcctaagagggggggactctggagagaaaagagaaaagaaaaaaagaaaggggactctggagggaggagaaaaaaggggaatgggtgctagaccctgaactctggctcgctctccagctctctgtattccttcacgcacagatccaccagaacacaggagtagggtgttacgcttcccagcggcccgaacctgtctacgtcgcccgtgtcttgtgcacttcctctctcgcggacgttcctcagatcgagggcgaagaacctcacttagcgcccccggccgaaccggcaaaggggggcctgcgcggtctcccggtgaggacccccatgctccgtcagcaggtgataaacctcgatgttgggaggaaatctagactaaagtgaggagaattatgtatccatacaaggatgggttatgaacttcatcaaaatacccgagagtcaacccaaaatcctgagaaataggtagagaaggtcaggggggaagatgcgcaaagagccaggccagatgggcctagctgtaacgccccgattttcgttgggattaaaaatcattaaataatgtattttccagaaattaaataaaagttaaagcaatttaatcaagtgaaatattgagggaattaaaaatttcctttaaaaatcattgggcgagaatattttgtaatattctttgtgccctaaatattctctgaaattttgccgtgaattttcggagctcaagaagtaattataataatacaaagttcatttaatcaatttaaataaaaagaaaataaaataatcttccccttcctcccttttgggctcggcccaaattctttcccccttcacctccggcccggccgccctcctccctcctttgggccgccggcccagctcctcccctccctctccctcaagtcctcttttcctcccctaaccggccccctcttgctttggccgacaggtgggacccacggcccctcctcctccttcctctggctagccggctgcaaccgccatggccgcccgagccgccccacgtcaccgctttccccgcccacctcctccaccctgcaccactcctgcccgaccgtgggacctcgtcacccacgaccccgctcccctcccccactccgtcccgcgaaaaaccgccgccaccacccccaagacgccgccccactccccctcgaaatccgccgctccccggccctctcctcgcccccttgagctgtaaaatcaatcctcgtggcctcctcttcctttttccccgttttcccgagtcccccacgccctctaccgagctctccacgtcgatccccatcgccgccgctcgccggcgatctccagccgcgcgccgccgctgctcccgccgtcgccgcgcctcatcgcgtgtgccatcagcttcgccatcccgcgccgcacgccggcctccactcggtttccttcaaccgccatcggaaccacctccccaccatgtaacctctctccgccgcttgccgccgaactccggccgcctctcctcgccacgctagccaccgccaagccgcaccaccgccagtgtcggcttcgccgctccaagcagagcaccggccactgcctcgttccaccaatccgtggccgagtcatcacctccaccacccacccaagccgttaccatcctccgccactccggtcgtcgcctccggccacacctcactgctctcagccaccccgcggccgccattagctttaccaccgcgagggcaagctcggccgcccatccatttttcccctccaccaccagaaccaccttcctgccataccaccctaccggccgcctttttccgcctccggtcgccgttcggcttcaccctggctgccgccgcaacgcatcgccggcttcgccgcgtcccgctcttccccgtccgccgcccgatcgccgccttccgccgccgggagccccttctcattgtcgacctgtggagcgccgccgcctccctccgccggctgctctcgccgtcgccgtgcccctcggtgagctccgccacctccctctccctcactgcctccgtttcctctcgccgcttcccgcgctgcgcgccgctgctccctgtgccgcccgccccccgccgttgctggtgactgcgcgccgccgccctctgtggtcggtcgggccagccccggctgtgcccgtgcccggccaccgctctcctcagccgcccgatcggcttgggccgatctgggccgtccatcccgtggacgggcggtggaccgcccttgtggtcccggtccatggtggaccgagcccccttgagccactgatgcctgggacccgcctgtcggcgccggccccctctcttgctaacgtcagcggcagtccttttcctttgtgaaaatatttaataattgcgcaataatttggtaataattatagatattaatttaatggctcaaaaccttctaaaattcatatctaattcattcgaactccgaattgagccattcaacttgcaaaattcatctaaaattgagctctacatgtttgtttactttttatataccgttttcttggtttttattagagtttttccttgttttgcgtgccagcgtgtagttctcgtcgtttcggaagtccgcggtcacgaggaaaagagttcggaagatcaaagtgaagaagcaaggcaagtcacacattcccctttagcatgttgatcccaatttacaaatgttttactatttgcaaataaatatgcgtgttttgctaattacatgggatcagggtttacctatctgctcgcttgtgccatatttacttgatatatgtcctttgtcaacattgggtaataaatcgactagctcatgttacttatgtgacctagctagaactatatgcttagccatgcttaattaccactagctcagttgatgggataattacaatattagaccttttagtatcagaatgagctgcgtgctcgagacatctggccatgcttcatggtcataattatccaactaaaatgcgactgaagggtgggctgtgggtgcatggttttgctagtcgcacccatggcaattaaggaccggttcacgggaaaccctggaagaatttctcgtacttaccacaagccagcgtgggcaacggctgggcttgtagtgtagctttcctctagccgacgcatccaggcaagggtgggtgtgatggagcggggcgggccctgcgacggcctctgtcgcttccggattcacctaggcacgagaggggattgcccgctgccttgcgaggagtgggggtgaaacctgaggtgtggtgtgcttggctagagagggttatgcgaaggatcctgtcacgacctctttccggtatgtcgtggtggcatgtcggcgcacggaaacgtgtcgtggggctgtgtcttgtgggtacagttgtacacctctgatcagagtaaaactattcgaatagccgtgcccgcggttatgggcggtcgaccagattcaccgtgattagtcccaccttaatgaatcgactcaatgcactgtagttcaggtgggttggttgggcctgttcatcgtggtgtagcgttgatcagtggagatttaatattaccttaattactcaacagttttagtattttgctcaataaaatgttttacaactgcctttatgcaaatagccacaaaccgtccttgtgtccccttgcacgtctgcatcgttggtgtggcttgctgagtacggtggttgtactcagtcttgctattattcccccttttcagaagtgtagtgcttctgagctgaagacgaggttagaagaccaaggctcagaccccagtcgagttttgcctgtggagtggagctgaagccccgctaggatcgcctttttccactgctgctgcttttgtttcggtgtgaggactaagtgcatcttctgtaagtattttacgctttatttacgtttggaactgtatattacttattgttttgtgtaccctggctggtcctggacagggatttaatacacaaaatagtctggaaatttgggctaaatttctgggcgtgacactagcccaggttcagccgaggttcggccgaaccacaatctcagccatccaggctggggtttggcgtggacggtcttgatcatctcctgatggcggttgcggggcatttccgacaattcgcattgtataaccgtcatacctacccctaaatagggtcgccaatgatcgccttggtcaattggaggctgctcaaattgacaccaactccaagttttcctcctcattggagaggtcccttgtggctgtgaacacttctcttgcaggtatcttgaatacattggagagaatgagcaaagatggtcatgatggatcggctaggcgcaaccacaatggccatgatgctaatagcagcatcgcagcaagggaagaactagagtacgctgctgacaccgagcatgatgaggaggtacttggtcgtcaacgaagacaacagtgccggtagcgccatggcatgggcgctccaccacggcgggaggcacgtgataatgatgattctttaggcaagatcaagtttaccattccttgctttgatggaaaatatgaccctgatgcatatcttacttgggagttagccattgatcagaaatttgcttgccatgattttcctgagaataaacgtgttagggttgctactagtgagttcactgattttgcatccatttagtggagtgaatttgtttgttccaatccaaataacactccccaaacctgggatgcaatgaaaagattcatgcgatctagatttgttccttcatatcatgcacgtgatttgttgcataaattgcaacaacttagacaagaaaacaaatctgtagaagagtattatcaagctttgcaaacaggaatgctttgctgtggattggtggaaaatgatgatgctggtatggatagattcatgggtgggctgaaccgagaaattcaggacattctagcctacaaagaatataattcaatatatcgtttgtttcatcttgcttgtaaagctgaaatggaagtgcagggacgaagagctggcttcaggactaacatttctgcaggtcgtgctagctcttggaccccttccaacgctgctgcaccgtcaactcgagcagcagcaccatcgtcctcaagcaacaagttgcgtccctctacaacaaactctacaccatgcccgagtgaacccacaagaggggttgctgctacatcttccaagagctcatcatcagtggcattatcaggaaggacaagagatattcagtgcctacgctgcaagggctttggtcacgtgcgcaaggactggccaagcactcgtgtaatgatcgtgagagctgatggtgggtactcctccgctagtgatttagatgaagaaacctatgctttgcttgcaactaacaatgcaggggaaggcgacgcgccccaccaagatgaggaacacattggggccgaggctgcagaggactatgagagcctcgtggtgcagcgagtgctaagcgcataaatggaaggggctgaacagaatcagcgccacaccttgtttcaaaccaagtgtgtgatcaaggaacgctcttgtcgcatgatcatagatggatgaagctgcaataatttagtgctgaaatggtgaagaaacttgcattgagcacacagccacatccgcagccctactatattcaatggcttaatagcagcggcaaggtaaaggtaacacgattggtaagagtacattttgccattggttcttatcatgattcaatcaactatgatgttgtgtctatgcaagcttgttctatgttattacgtaggccatggcagtttgataaagattccttacactttggcaaatccaatcaatactcctttgtgcataatggaaaaaaacttgtgttacatcctatgtctctttaagttattttaaagaatgaacttgctagagctagcaaacaaaaaaacaggagcatactagcatcatattgtggctaatgaacttgagaagcataagaagaaatccaccaactctattcaaaataataaaaatgagattaagctgaagggatcttgtttcattgaaacaaaatcagatttggatgaagttgacactgacactgttgtttgctatgctttggtttgcaaacaaactttatttccaattgaggatactcctatttctttgcctcctccggtcactaacatttcgcaggagtatgctgatgttttcgcaaaggaggttccattggggctgccaccaattcgagggattgagctccaaattgacctcattcctggggcctctttgccaaaccgtgtaccatacaggacccactcggaggaaacaaaggagattcaacgtcaagtgcaagagttactcgacaaggggtatgtgcgtgagtctcctagtccttgtgctatccccgtgcttttagttcctaagaaagatggctcatggcgcatgagtgtgaattgtagagcaattaacaacatcacaatcagatatcctcatcctatccctaggctagatgatatgcttgatgaattgagtggttcacttgtgttctctaaaattgatttgcgtagtggttaccactagattcgcatgaagttaggagataaatggaaaacagcttttaaaactaaattcggcctatatgagtggttagtcatgccctttggtatcactaatgcacccagtactttcatgagattaatgaatgaagttttacgtgctttcattggcagatttgtggtggtatattttaatgacattctcatatataacagatcaatagaggatcatcatggtcatttgcctgctatttttgatgctctacgagatgcacgtttatttggtaaccttgagaagtgcacattttgcacagatcgagtctcttttcttagctatgttatgactccgcagggaattgaagtagatcaagccaaggttgaagccatacatagctggccggttccaacaactatcacacaagtgagaagctttctaggacttgctgggttctatcgccgctttgtgaaggattttagcaccattgcagccccactacatgagcttaccaagagaaatgtgacattcacttggtctgcagcacaaaggaatgcattcgacactttgaaagataagttaacacacgctcctttactccaacttcctgatttcaacaaaacttttgagcttgaatgtgatgctagtgggattggattgggtggtgtgttgttacaagaagacaaacctgtagcatatttcagcgagaaattgagtgggcctagtttgaattattctacttatgataaggaattgtttgctctagtgcgaacattggaaacatgacatcattatttatggcccaaagaatttgttatacactctgatcatgaatctttgaaacacattcgaagtcaagcaaaacttaaccgtaggcatgctaaatgggttgaatttattgaattttttccatatgtcatcaaacataagaagggaaaagaaaatgtcattgctgatgctttgtctagacgttacacaatgctatcccaacttgacttcaaaatttttggcttgtaaacaataaaagagcaatatgcgcacgatgatgattttaaagatgtgttgttaaattgcaaggagggaaggacttggaacaaatttgttctcaccaatgggtttgtgtttagagctaataagttatgcattccagctagctccgtgcgtatgctattattgcaggaagcacatggtggagggctgatgggaaactttggtgtgaagaagacgaaggatatccttactgatcatttcttttggcccaagatgaggagagacgtggagaggttcgttgctcactgcacaacatgccaaaaagctaagtcacgccttaaccctcatagtttgtatatgcctttgcatgttcctagtgtgccttgggaggatatttctatggactttgttttagggctgcctagaacaaagaaggggagggacagtatctttgttgttgtagatagattttctaagatggcgcatttcataccttgtcataagagtgatgatgctacacatgttgctgatttgttctttcatgagactgttcgctggcatggagtgccaaacaccatagtttctgatcacgatacaaaattccttagtcatttttggagaaccttgtgggctaagttgggaactaaacttttattttctactacatgtcgcccccaaactgatagacaaaccgaggttgtgactagaacattatctacaatgcttagggctgttttgaaaaagaatattaaaatgtgggaagaatgtttgcctcatgttgagttttcttataatcgttcacaacattctactactaagaagtgcccttttgagattgtttatggccttctgccccatactccaattgatcttttgcccctcccaacttcagagagagtgaactttgatgcaaaacagcgcgctgaattgatgttaaaactgcatgagaccactaaggagaacatagagcgcatgaatattaagtataaacttgctgggagcaaaggaaagaaacatgttacttttgaacctggtgatttggtttggttgcatttgagaaaggataggtgccatgagctgtttccttatcatcttgttcttgcttgttcttcgattgcttacaggttcaaggttgttcttggcacggcaagaacagcaacaacgtggagtcggtgtaccggttgctaaggcgcagcacccctgtggtagttgtagtcggaccgccaacgtcgtgccctcccccaaatcgaagtttatcctcctctcatcaaaagatcgggaacccccgttgctgcatcacctctaccacccctgccatacccaatttccgagctcatcaatggcgttgatggcgcccgagctcatcgacatcttgtgaccctataagtaggaccccaatcccttccttgtccatcatcgatcatcaccaaccataaccccacaaccccaaagctctgctttaccaatccatctcatcaaccatcctcgcccgccggtcgaacaccttgtgcgcgagcgacttcacaccactccatccaccctctaccctaaccaacccatagaacacctatattcaaccatgttctagcatactaaagcctaaccgaagctctgcgtcgacacctcgtcacaccgagccgagcactgccgcccctgctctgctctgttcttcgctgccgagaggtttttccggtcgcaatccgtcgtttcaacctatctcggtgagttcttccattttaaccatcgacatactccttagattccattttcgtaattggttagcactaacatcaccctcttgactgccgacgtgagctcgaccaccgccaatggaggcgcaagtcagcaagtatcttccataccttgccgaacgtcggcaagctacttaaatccttctagacacctcatagatgctctaggaaccttccctgagccatgcctaactctcaccaccccgatcaccttctcagctcatccatgtcaccgccaccctagccgctaggttactcacacaccaaattaacccctccggcgccgctcgccgtcgccggggaaccctatctacctcccctcctcggccgcaacacctttccccctttattactgccataatccctaaccctagcgccgccggccgtaaatggggaacagttggaggttgaagaagagaagagagggagagactgatcggtgggacccacacacaataccatttaacatttaatttgattttcaaactttagaagcccatatattttaaaatatagattcatttccagtgaaacttgaaccaaaattcttctaaaatcattctctatcttttgagaccacttttgctatttttatattttattttatttttacctatttttggattttatttgaatcccttttgaatttgaattttacatgtttaacccttggtcttgaggaatcttatgacacattagataatatcagtcaatctcaggacatcgagcaaggcaagttactatacacattttgatcgtttaagcctatattttacaagttatttatttataacctttctactcaatactctactttcacatgcataattcaaccatagaaacccagataatttagtattgcttattttgcttacaatctggttaaaatgttttatacttagattgggacaggacatacgaattggatgatttccggatggctagtactgtctcgatcgatataagttgtcaccaggtacttatgtcaaacgaacgggtgcgaccgcagtttctagaatggggactgacctagtcattatgttaattagcaatgtggtacctctgtatagtggctcttattgttaagtccttgagcaggaggcaactgtcacaccctgaagttcttctcccaagccaaaattgaatttataattggtctcgagaaaataccggtgtaaaagcaagagtgaaaccctaaataaattaatgcaaataataatcggaattggcatgtggaatttttcttgagctctacatgtcgaaatgtgctaacaagatttttagtggaattttcatagctctagaaataattttaaccaatcaaaaatgagcacaagcaatatttaatcccaagaaaattcatttcctcctttttctttttctttttccccttattctttttcgaatgggccgccggcccattctcttcctcctccccctccccgctgggccgaccgaaggccacgacccagctgagccggccgcccgagcccctcctctctcccggggtcaccgacaggtggggcccacctgtcgggcccgtctcccacctccagccgcgccgccgcatcccgcaaccgccgccacccctcgctcccacgtctcctaggccacgtcgcccacgtcgccgctcatgcccgccttccccgcgcccactccctctctctcccgcccgcgcccgcgctcgagacggccgggattcaatttttgaatcccgcctctctctcctccccacctctccccactccgccggcaaaatcgcggtcaccccggccacgatcgacccccgcgggcctatataaaggttccccgttccctcctctctctttttcgttttgcaaccatccgttcacgtgccctccatcgccctagcgccgtcgtcctcttttccgccgccgccgacaccgctccggccgccgctaccgtcgcaagccgctgcgccgagccgcgccgtagacgtcgtcgcgttcgccgtcgtgcgggccacctcgtccacccctctcctgtcagattccgccgccggaactcactccgcgccgtgcgccggtgagcactgccatggccgccgccttcggccggcgtcctcgccctcttccattttcctctccatctctaaccccttgcaccgtgttcgctaggtggttccggagcttgtcctgtcgccgtcatcgccctccgtcgcttgccgtcgtcaatcgccgtcggtgagacacctcctcccctctccccttcctctctctctctcccgcgccacttagccgccgcgccaccacctagccgcttagccgccactatcgccgtccgcgccgtcgcaccgccgccgctcatcacgccgccatcggtcgccgccgtctgccgccgccgccccgcgttagcgccgccgtgcgccatggccgccgggccggcttgagccgcccgagcgcgccggccgcgtgctccccgccgccatccgatctaccctcgggtagatcggggccgtcggttcggccgcccgcgtggcgtgccacatggctgccacgtgtgcgccacgtcggcgccacgtggtgcgccgcctccttccccggtccgtggacccggtccaccgtggaccgccacccgagtcactgccatgtggggcccgcatgtcggcgccgtccctcccttgttgacgtcagccctgggatatattgcgcaataaatcaattaaggatttttctgtttaaagtaaaaacacagtgaatcttctaaaattcatatctaattcatccgagcttcgtttaagcctattcaagtcgcagtaaatcaagaaaaatgcataaaatccattaaaaatgcttttgttctctgtttcagtagtcttatagcctgtttgcattgtttgctttgtatgtcgcttagattccggctctcctgacgctccggtgtactttgaaatagtcgccgaggttcctccagcagcagagcaaggcaagtcatgcttgtcacttgaacatgttgatcctatattgcaaatgctctatcgttttcctttaaaaactgcatcgttttataatgttactatgggatctttacctactgttacagccatgctatttctgtaccatgctcctttgttagcttggggatataacatgactagatattggactagggattgcttagccatgcttagttcaactaacacacaatggggaaaatacattattgagttgatatcagattctagtaataatgttggttaatgccaccgctccggtgttggttaattaaaatatattaaatggtgggttgtgggtgcatggttttgatggtcgcgcccatggcaattaaggaccggttcatgggatgccctagaagaacttatcgtacttaccacaagccattgtgggcaacggctgggcttgtagtgtagctttcctctagttgacgcatacaggcaagggtgggcatgatggagcgggacgggccctgcgacggcctctgtcgcttccggattcacctaggcacgagaggggactgcccgttgcccgctggggatgggggtgaaacctgaggtgtggtgtgcttggctagagggggttatgtgaagggtcctgtcacggcctctttccggtatgtcgtggtggcatgtcagtgcacggtaacatgtcgtggggctgtgtcttgtgggtacagttgtacacctctgatcagagtaaaactattcgaatagccgtgcccgcggttacgggcggtcaaccagattcaccgtgattagtctcacccctagttagctaatgaactggtgtagttcaggtggttggttgggcctgttgcaacgtggtgtagcgttggacagtgattggttaatactgattaattactacaactgttttactgctttgaactaccgtctttaaatgcccgctttatgcaaatgaacctttctagccataccttgattataccctgcatcataccccctattttggtatgacttgctgagtacggtggttgtactcagccttactctattttccccaaaaccccggagtttgagtacgtgtcagatggtggcttctccgaggagtaggcttcgtccgtgccgtcgaggatgcctgtggagtggtgttcccgctgcagttcaagttaaggcttagctccatttatcttttaattttccgctgcatttatgtaagacttttataatgtttgtaagacgttgatctgtatgtcaactttatcgtttgtgtaccccggccggtcctagacgggggttttaatgcacattctgcttggaattctattcgggaatttctgggcgtgacaagttggtatcagagccaaccttgaccgtaggacaatccttttcattgcatgtgttctttgcaattggatttgttccgggaaaattgggatctgttcttgtggttcaagggaaaaatcttggtcgctcatttaatgtgagatttgtcaaattaggtcagtctagggttttagtaaaattatttgaaatttattcgacagtcagtcgggatttgatgggaggaatgcattaggtcctaactcaggaatatgggttgctaggtatttatgctcttattattattattagtatgtatctaatttctcattattttatcgctatgtaagtccgtcttatttattcgctctcatgcaaaaatgatctatttgagttttaattgacaaaattctgctctcatttgttcattttaattgagttttttttactgctttatttaaattggatttgagcatgcattgatcctacccctttgtcttctctagatggccgaccaccaacccaaccaccgcggagacggcatggatgattttgtggctgagttggctcgcatgaccttggtggtgggctaccccaacgcgccggagtactcgaccgttccgccgctcagtggcgagcttccccaccgtgttcgtctggaggttcattgctatttgggcaccagcctcgctaacatggtggttgaggcatctggaggcaccgcagatcacgcctatcaggaggcagcatacctaatgatggccaggcttcgtgatcaccacagctacatcttctgcaacacggcgtaccgtttccaccctcgccgagcaagtggcaacgatatcagcaccttccgcccgacagtcggcgagaacgacaccaccttcggccacatgtgcgccgtgatgaggggaatggacaggatgcactctgacctgcacaaggcatccaaagccttgaatgatgggaagcttgtgaggatcatagctctgaaggatgagatagcacgcctgaagaaggagaacgctcagttgaagggtctcccagcgccaggaggagtccggatccgcaccacgccccgcaagtcgacgactacacccgtacgcattcagcttgcacacagggacccacctcctcccgcagtgtcacgctatgaaaatcgcctattttaaaagcttacaagttaaacactaataacctaggaaaaatttcaacataaaattgagctagataaaatttcattaaatactttgcttgtttatctattttctagatttttctgggaattatttgagcaaggaaagtatttttaataaatgaaacatcatttcgcgaattattttaattggaaaagtttttaaaatcgtctcctaagccgttgggctgatttcagcccaacatctctctccctcgcgcgcgtgctgtgcagcccaagccggcccaagtcgagctgcccttttctttccctgttctgttctcagtccatccgaaagtctaatttgcttccctttgcactgttcattttcaacctcaggacagccgaactgagaccgagtgggctcggtttttcccctccaaatccgacctctcttgtgttttcctaaaattagttgaggggaaattatctcctccttatcctcttcctttcccctaaagtctcggagattaattttgcccggataaaccgaatcgaattcgttttcgagtttatctctccaaactaaccctcggattttccagctcaaatcctctcatttggagtccgatctctctagtccaagcctatataaagcatccccttgtcgtcctcttccgtttgcctcaagtcccaagccgagccgtcgcccgtagcgccgccgccgagtagctctagcgccgccgccgccgacgccgctccatccgcgtggcgccgccgctagcgtcgtcgccgtcgccgtccgtcgccgccaccgggttcgcacggtggaggagcaccccgtccgccccttcgcagctgccaaagaccaccggagcgccgtcgccgtcggggacccgagccgagccgtcgtcggacctcgtcgccggccgtcgttcgtcgtcgtccatcgttgttctttgcacggtgagttcgcgtcgtcgtcctcttcgtgttggtgtcctcggatagcccggccgagctcactatcaccggtggcagcgtcgtccagtgctaggccggcgatgacgtcatcgtgacgtcataaatcctttatttaattcgtaataattttctgtattagatgaaaatcgattaaacttcggaaattcataactaaatcatcgtaactcggattcgagtggttcaagttgctaaattcatctaaaatcgagatctacatgttaaaaatatccacatatactgtttatgcttatttttgtactgttttgttgattttgtttatttgctttagtttccgacgttccggaggagagcgtttacgttgaggaaggttcagaagcgtttgcggaagcttaaggcaagtcacacagatcccaaacaaccctttgagcatgttgaacccgtttaaagctaatgttttatttcaacttatgcattattttcgaatgtcatcgggtggtgagcctttcccaattaattaatggccgaaaatgactttatttttcctatgggttataatttgattagctagaaccttatatattggtttggttcagctaaatgctatatgtataattgcttagccatgcttagaaacattagctcattaatgggatgaatcatactacattattaattatggttatatctaatggtagctcacgatggttaatcttgttatgataattaattgataattaaaagctgattaaaggtgggttgtgagcatatggttttgatggttgtgctcatgacaattaaggaccgattcgcgagctactgttgtgaaacattaatcgtgccaaccacaagccaacgtgggcaacggctttaccttttgtatagcatggttcattacggggtgccagactgtgaagcggcgagaagtccgtaggggtcgctggggagtccattgcctctggttttgagggggagattatgatccaggaatggcgcactgtggtgagttgtgttgtgtgagaggtattgtcacggttcctttccaaggtatcgtggtggtatcgaggcgcatggtaacatattgtggagctgtatcttgtgggtatagtggtacatctctggccagagtaaaactattcgaatagccgtgcccgcgattatgggtgagtttaacaatgtttttcgtgattagtatcgcactactcattaatgataatactgtgataattaatttgactcttggtttggaatggtatattcctggtatggaggtttgatctgtacaaccggggttggttgttcagatgaggttgggcctatgcaacacgggtgtgttgtatagtgtttatttaatattgcttaattactcaactgttttactattctcaaatgtttattaattgttgttgatgcaaataagctatataatgtcatcctttgttatcctatgcacttgcatatttgctgtgtggctttttaagtatgtcatatgctcattcttgcaatattcattcatcagaggaggagtacttcaatgaaggtgatgatcaggaggattaggctttgttcgggtcaagttgcttgtggagtggagtcgccatagctgtttagtcttttgtttttatttccgctgcgtagaattttattctttcgagaggaattgtccacctctgtaataattatttaatttgcgaatattaattaattgtttaatagtactctattatcaatttgttattgtgtgcctcggctgattcctggacgaggatttaacacacatgtaagcgtttggaattttggatagaaattccaggcgtgacacgtagctcctccagcacctcccgcagttcccgcagcgctcgcagctccagctccggttccggctcccgttccagtgtcagctccggcgtccgctctctccttctctccagcgtcagccgccaggggtccagccagtggcaacggaggttggttgcctgctactcccagtggcagccgcgaccacagcagcagcagttccagtagctccgagccggacagcggcaagacgtatctgccagactccaggagccgctcagagggacccggcgacgagcaggaggacgccttctactccaccaaccgcaggagccgttccgagcattaggctcgttttcccttagtttatcgactgcttagtaattgcctgttagtttgtgtgtctaggtttgttcgcttgtgggtcagtcgacggtcgacatcatgtgcctatgatgtggctgtcttaataaggattttgcttgctgttttaagtgttttaattcagatcagaacaattgcagtttaaattcctctataataaagcttagttcctgagcatctgtttttcttcttttccaccccctccgtctgctcttccttcagatggtcaacatcaggaatggcagccgcgcagccggtgagggcagcaatggcgaagagcacaccgacagtggatatcccaacagcgcctctggcaatggtccgccaccgctcccagagaacccgacgcttgcacaagtgatggcccatcagactcagatgatggcggccatgatgcagcagatgctgcagcagcaccagcagatgcaccagaggatgtagcagcaagtcgaacagtagcagcagcagtttggtccccctccccctcagtccaagctgccgaagtttctacgcgtcaggccacccaccttctctagcaccaccaaccccatggaggcgaatgattggtccatgccatagagaagaagctcaatcttctgcagtgcaatgatcagaagaaggtcacctacgccacacaccagctccagggtccctcgtcagcttggtgggacaatcacatggctacccgtccgccaggtacggaggtcacttgggcggagttctgtcgcagcttcaggaaggcacaggtgccagacggggtcgtggcacaaaagaagagagaattctaggcactccaccagggcaacagggcagtaactgagtacctccatgagttcaatcgccaagcgcgatatgcaccggaggatgtccgcactgacgcggagaagcaggagaagttcctagcaggcctggatgacgagctgaccaaccagttgatctctagggattacgctgacttcgagaagctggtagacaaggcaatccgccaggaggatcagcgcaacaaaatggacaggaagagaaaggcagcgcagttccggtccaaccaaggaagtcaccagcgaccgcgcttcactcccggacagcagggtggacctaccaccatgattgtccaccagtatcgcccgttcaactcaagtagcttccaccaggtcgccagtggcagccagaaccacccgggaggtcagcccaaccgcagtgcagctccgcgcccaccaatggccacagcacaggcagctccatcagtccaagccaagaaggagactggagtaaagccagggtcctgcttcaactgtggcgagcatggccactttgctgacaagtgcccgaagctaaggcgtgctgggccaaggtttgcccaagctcgtgtcaaccacgcgtccgcggaagaggcgcaagcagcactagaggtcgtactgggtacgtttcctgtcaactcaatttatgcaacagtacttttcgattctggtgcaacgcattcattcatttcaaagaagtttattggggaacatgggctaataagagaagagcttagtacaccaatacgggttcatacccccgggaatagttccacctcggtttaattcagcccttctgtaacaatagaaatccaaatatcaccatttctagccaacctcgtccttctcgaatccaaagacctagatgtcattcttgggatggattggctgaccaagttcaagggtatcattgattgtgcgaatcgcacggtcaccttgaccaatgagagaggggaaacagtggtgtacaagtcaccagtcgcactgaagcagggaatctccttaaatcagattgaggtggagaattcggtggtcaccgcggagaaaagttcgaggaaattggaagatatccccatagtctgcgagtattcagaggtgttccctgaggacctcactaccatgccacccaagagagagattgaattccggattgatttggcaccggggactgctccaatttacaagagaccgtacagaatggcagccaatgagctggcagaggtcaagaagcaggttgatgagcaactgcagaaagggtacattcgaccaagtacttcaccttggggtgctccggtcatttttgtggagaagaaggacaagacgaagagaatgtgcgtcgattatcgcgcactcaatgaggtcacaatcaagaacaaataccctttgccacggattgatgatctgtttgatcagctgaaaggagccaaggtgttttccaaaatagacctacgatcaggttaccaccagttgaggattcgggaagaggatattcccaagacagctttcaccactcggtatgggttgtatgagtgcacggttatgtcttttggacttaccaatgcacctgcattcttcatgaatctgatgagcaaagtgtttatggagtttcttgacaagtttgtcatggtgttcattgacgacatacttatctattcaaagtccgaagaagaacatgagcaacatctccgtctggtactcgagaagttgaaggagcaccagttatatgccaagttcagtaagtgtgacttctggttgtcggaagtcaaatttctgggtcacgtcattactgctcaaggtgtggcagtggatccatcgaatgtggagtcagttaccaagtggaccccacctaagacagtgtcacagattcggagtttccttggacgtgcgggttattaccgtcggttcattgaaaatttttccaggattgccagacctatgactcagttgcttaagaaagacgagaaattcaagtggacagccgagtgtgacaagggttttgaggagctcaagaagaaattagtgtctgctctagttctgaatttgcccgaccagacgaaagacttccaagtctattgcgacgcgtctcgtcatgggcttggatgcattctaatgagggcagagtggtcgcttatgcctcacggcagttgcgtctgcatgaaggaaactatccaacacatgacctggaattggcagcggtggttcacgccttaaaaatctggaggcattacctgattggcgatcgctgtgaagtatatacggaacacaagagtttgaaatatatcttcacccaacctgacctgaatctccgacagcgaagatggttggagttaatcaaagattatgacatgagcattcactaccatccgggcaaagccaatgtggtggcagatgcattgagcaggaagagctactgcaatgctttgtgcactgagggcatgtgtaaggaattgcagcaggagcttaaacatctcaacttgggaatcgtagaacacgggtttgtggctgctctagaggcacggcctacgctcgtggatcaagtcagagcagctcatgtaaatatcctgagatagctgaactgaaaaagaatatgagggtcggaaaagcccgggatttccacgaagatgaacatggcacaatctggttgggagaaagattgtgcgtacctgatgacaaagagctgaaagatctgatactcaccgaggctcaccagactcagtactccattcatccaggtagtaccaagatgtaccaagatctcaaagagaaattttggtgggccagtatgagaagagaaatcgctgaattcgtcgcactctgcgatgtttgtcagcgagtcaaagcagaacataagaggcccgcaggactgcttcaacctcttcagatcccggaatggaaatgggaagagattgggatggatttcatcacaggtttgcccaggacatcatctagccacgattcaatttgggtagtcatggatcgactcaccaaagttgctcatttcataccagtgcacgctacttatacaggcaaaaggttggtagagctctatctctcaagaatcatgtgtttggatggagtacccaaaaagatagtatctgatcgagggaggtagttcacctcaaaattttggcagaagttgcaagaagaattgggtacccgtttgaatttcagcacagcttaccatccgttgacagatggccagaccgagagcgtcaatcagattttggaggatatgttgcgagcctgtgcgcttgattttggaggagcttgggataaaagtctgccttatgcggagttctcctacaacaacaattaccaggctagtctgcaaatggcaccgttcgaagcgttgtatggccggaagtgccgcacacctctcttctgggatcaaacaggcaaacgtcaactgtttggaacagaagtgctaacggaagcagaggagaaagtcagaaccatcagagagaggctgagaattgcacaatctcgacagaagagctacgcagacaaccgccgaagggagctcacttttgaagcaggggattatgtgtaccttcgtgttactccgctccggggagtacaccgtttctagatgaaaggcaagttggcaccacgcttcgtgggaccatacaaaatttttgaacgaagaggagaagttgcctatcagctagaacttccatccaacatggtcggtatccatgacgtattccacgtgtcccagttaaagaagtgtttgacggtacccgaagaacaagccgattcggaacacattgacattcaagaagatctgacatatgtggagaagccagttcacatccttgagaccagtgaaaggaggactaggaacaaggtcaccaggttctgcagggttcagtggagccaccactcagaagaagaagcaacctgggaaaaggaagatgagttgaaggccgcccatccgcacctcttcaccagctcttccgaatctcggggtcgagattccgtttaagggggtaggtttgtcacaccctgaagttcttctcccaagccaaaattgaatttacaattggtctcgagaaaataccggtgtaaaagcaagagtgaaaccctaaataaattaatgcaaataataatcggaattggcatgtggagtttttcttgagttctacatgtcgaaatgtgctaacaagatttttagtggaattttcagagctctagaaataattttaaccaattaaaaatgagcacaagcaatatttaatcccaggaaaattcatttcctcctttttctttttctttttcgaatgggccgccggcccattctcttcctcctccccatccctgctaggccggccgaaggccacggcccagctaagccggccgcccgagcccctcctctctcccggggtcgccgacaggtggggcccacctatcgggcccgtctcccacctccaatcagtgccgccgcccctcgctcctacgtctcccgggccacatcgcccacgtcgctgctcgcgcccgccttccccgcgcccactccctctctctccctcccgcgcccgcactcgagacggccgggattcaatttttgaatcccacctctctctcctccccacctctccccactccgctggcgaaatcgcggtcaccccggccacgatcgacccctgtgggcctatataaaggttccccattccctcctctctttttcgttttgcaaccatccgttcccgtgccctccatagccctagcaccgtcgccctcttttccgccgccgccgccaccgctctggccgccgctagccgtctctagccgctgcaccgagccacgccgtagacgccatcgcgttcgccgtcgtgcgggccaccctatccacccctctcctgtcggattccgccgctggaacccactccgcgccgtgcgccaccgccatggccgccgccttcggccggcgtcctcgcctcttccatcttcctctccctctctaacccctttcaccgtgttcgctaggtggttcaggagctcgtcccgtcgccggcatcgccatctgtcgctcgccgtcgtcaatcgccgtcggtgagacacctcctccccttcctctctctctctctctctctctctcccgcaccgcttagccgctgcgccgccgcctagccacttagccgccgctagcgccgcccgcgctgtcgcgccgccgccgctagccgtcggtcgccgtcgtctgccaccgccgccccgcggtagcgccgccgtgcgccatggccgccgggccggcttgagccgcccgtgcgcgccgaacgtgcgctcccctccgccatctgatctaccctcgggtagatcggggccgtcggttcggccacccgcgtggcgtgccacgtggccgccacgtgtgcgccacgtcggcgccacgtcagcgccacgtggtgcgctgcctccttccgcggtccgtggacccggtccaccgcggaccgccacccgagtcactgccatgtggggcccgcatgttggcgccgcccccctttgttgacgtcagccctgggatatattgcgcaataaatcaattaaggattttttctgtttgtagtaaaaacacagtgaatcttctaaaattcatatctaattcatccgagctccgtttaagcccattcaagtctcagtaaatcaagaaaaatgcatagaatccattaaaaatgattttgttctctgtttcagtagtcttatagcatgtttgtattgtttgctttgtatgtcgcttagattccggctctcctcacgctccggtgtactttgaaatagtcgccgaggttcctccagcagcagagcgaggcaagtcatgcttgtcacttgaacatgttgatcctatattgcaaatgctctatcgttttcctttaaaaactgcatcgttttataatgttactatgggatctttacctactgttacagccatgctatttctgtaccatgctcctttgttagcttggggatataacatgactagatattggactagggattacttagccatgcttagttcaactaacacacaatggggaaaatacattattgagttgatatcagattctagtaataatgttggttaatgccaccgctccggtgttggttaattaaaatatattaaatggtgggttgtgggtgcatggttttgatggtcgcgcccatagcaattaaggaccggttcgcgggatgccctggaagaacttatcgtacttaccacaagccattgtgggcaacggctgggcttgtagtgtagctttcctctagatgacgcatccaggcaagggtgggcgtgatggagcgggacgggccctgcgacggcctctgtccttccggattcacctaggcacgagaggggactgcccgttgcccgctggggacgggggtgaaacctgaggtgtggtgtgcttggctagagggggttatgcgaagggtcctgtcacggcctcttttcggtatgtcgtggtggcatgtcagcgcacggtaacatgtcgtggggctgtgtcttgtgggtacagttgtacacctctgatcagagtaaaactattcgaatagccgtgcccgcggttacgggcggtcaaccagattcaccgtgattagtctcacccctagttagctaatgaactggtgtagttcaggtggttggttgggcctgttgcaacgtggtgtagcgttggacagtgattggttaatactgattaattactacaactgttttactgctttgaactaccgtctttaaatgcccgctttatgcaaatgaacctttctagccataccttgattataccctgcatcataccccctattccggtatgacttgctgagtacggtggttgtactcagccttactctattttccccaaaaccccagagtttgagtacatgtcagatggtggcttctccgaggagtaggcttcgtccgtgccgtcgaggatgcctgtggagtggcgttcccgctgcagttcaagtcaaggcttagctccatttatcttttaattttccgctgcatttatgtaagacttttataatgtttgtaagacgtggatctgtatgtcaactttgtcgtttgtgtaccccggctggtcctggatgggggttttaatgcacattctgcttagaattctattcgggaatttctgggcatgacagcaactatagccacgaagggcaattttttccattaccatgtacaggtaaatggtctatgatactcgagtataattatgattataattctaaaccctgattgagatgacgtgtaatggataaggcttaactcggtgctcagtctagtcctgaataaaaggacacggatagagatggatgaagtcgttgcgacgatggatatctctgaggcaaatgaaagctacacgagctacggctcggcagtcgagatgtctaggcaaatgaaggctacacgggccggtgtccgttagtcgagatgccatggcactggactagtacgcgggtggtctcacccctatgtgtgtggcgcacccggtctaggtcctgttgctaggggctcaatcctaacctgcctgtctcgggataccggccgtaggcagggttgggtcggttcttttgttcatggctaggatgggtgaagggttattgtgggtatttcttaacgacattgctggaaatataattcccaacaatggcgcagaaatacttctggtatattatgtttacagagttcatccgcaagcgcacggatataccattatagcatttcacccaagagtattccaagggtatcgtatttattttatcctgtgggaagatcatgtagagagagcttgactaataatttatatattacttgtgataatcatattctaaacaggggttaagataatccaaggatagagtaacagacaagcatgaactactcattctcataataactcatctaagctaagtggaaagaaaagagaaaggaaatctattcctatacttctattatacatagtatacatatattctagttaactgatatactagctaataccctatatccgatgccctcttggtacttcgagaagccacccctgactgccgagttccttacgacagcccgtcatgaccattcaaccggggctaaatacggaggaataccctccccaggaaattaacttaggattatataccggcgcggaggaatacctgtactgagctgtcaccatcagcggcccacctctcatctgcaatatataacctcaaataatgatatcccgtaatctagacaccacgtctaaactaccagatactactctaatatcatcgtcatgagatagagtaattgcataagcaaacattatacccgcaccaaagcatctcccaaataagctagccgtatattcagtgtaacatgaacataatgtaaaattggcattcatatactcggaaagtgtttcaataccataaatgtataaagaagagtattctaataaaagtacaatgcttacaaaagaaaagagaagagctcttccgaaggcttccggacttgatttctactctattcctattccaccagctagatactactaaactaaacttgacagaaatgagaaagctattgcttgaggtctatgagtgaagtgagaatggcaactccttatatagcctcacaatgacggttgtgacggttggaatggtcggaaataccctccaaccgtcattgggggctaatccacaccgtccaggcgaagccttggatcggatggcgctgaggagggttcggccgaacctggggtcggcccaatccagcccaatttcggcaggcggcctcctctgttgcttctattcgctgacttgtcaattttggcccaattcttcgtatcaattctgagttcttggcctattcatacgtaagtctggttctcgacatcgtccgattgatttgtcatctatgttgatgtcgattctcctccactttattgtcattctctgcaaaaggttaatatacctaatactagtggaagtttattattctaacagatatatgcattgcaaacatcactagttctcctctattttagtaatattgacggttgaaactgatcgataacgaccgtcaacaaaaccccccaagcttgaacctttgctcgtcccgagtgaaggacgaaaggaaacaaagacttggttgttgatcatgagttgctactatgctgcatatctcaaagatataggtgcaaggtatatgtactctctctcggattaaataatctttggcacgatggcttacccttacccctgattcccacgagacactgcttctccttgtcttgggtggttgaaagacagaacagcaatttagagtaccaatcacccaatctttatttaactctcattccggaagttttcaatgattttgctaaagaaagccaagtttctcaaatgattcgctcagtctgtctaagtgtatcaatatgaattcctcaccaaatgttgcctttttgattcctactctaaggtttggtatgtggagctcggtagggatcaaacatggcatacttgcattcacatttattactaagtcaaaaacttagactaaagcagataactaaacatactcaagatcaagatcgtgcaaaatgtgtgtgtagtatatggtggaaatggtatatgaggaaagataaaagaaaaatgcttcccctttgtgcttactttcttctcccaaaatccttcttttattgattaggagagagcatagctacatatttttttttaacatcatgctcatgcttgatggagcataactttattttttttatattttttcatgaccatgcctttccctccttttctttctcttttttttttcaaaaggacttttctctttaggggaagaaagcacatgaaagcatggagaatttattttggtggtaatatggaaatggaatggaatattgcttagctcccagtgtaggagtttagcatgtgcatatatgtgggtgtatgatcttgatcatagagcatgagaagtaactacacaagtcacaagagtttgacaaagttcattggaatgacaagtaaccaaaatgtatatggtttaatcatgatagcatattttttggctctggtaggaatttatatcaaatgaggaactttcaattttatcattttgaaaaacaaaacatccggaattcaagtcaaactagtatcaggatcatagcaactcatattactatctcatatctcgcaacaacttagatttagatcagcaagtgcagcccatttacctcaggttcccggataattgttggctacttatatttaacctttgagagagcacttaccaagaacccatatatcagagatataaaacagagcaactattcatcatttcaacaaagagaactagcttgtcttacctagcatgactcaatcctatcctatctttttggtatttttctattttgcaaatttttatgttgttttcaagttttgtaagatgcaattagaaagcaaatatgcaatttggaaaaggaaatatgcaattggaaagggaaatatgcaatgtgatacaagttacctcagtggggggagagatatctccccccaagcttggctttcgctcagggtccttgatgcggattgaacccctgaaaacgaaagtacgcctgaaggtcatcgtgttgttgctgcatcatattgttgatgttggcgaactgagcatcagcagattgttgccattcttacgtttgagctatgtgttccgtgaagttgtactggatctcccctgtctgcatatcaagggtgtccattctcctagtgatttcacctaagtcccaacaagaggaactcgagcgccattcacttggagatggaggcacaccacttgatctgggaggttgattgtccccccattggatgtcatgaggcgcatgccaccggtcctcactggcacttgcccaggttgagactccaatgctatggcgtggagcttgggtccatccgggtgcatccccggttggtgcccaacctgcctcatacatctgcacgggtgtcaaggatgatgaactttctcgtttcatcattgtcatgttgcgcgtctccctgtatgttccacctgcacgaggtttttctatggtctacaggggaatggttagttcatggcagttgtacaaatgataccccgcatttggcaatgggatttcatttgtacaaccggggaaaaagtataccaaagatccatctattccatgtttcagaatatgcccttgcactagataagcctcatcaatacgcggacgagcagctgagataaaaataatttggtcgctaatgacacctagcccttttgctatccgagtaatcagagaagtgcactcaacaggagcagagaactttatactttctaaccattgtcttatcatacatttcacaggaacaattttgatctttctaaccatgatgataatcaattcatctcccctaatgggtctcatatcacctctaagaaacaaagtcatagcaatcaatttgtgcatgagtctaattgtaggattatggatatcatttgttctagatttcttgcaaattggagcaccagaaatatcttcccaaaacctatttgtctcgaacctagaaattcctttctggagatcgattttacatgaatcgtgaaaaccaagaagtgtacttaagcctttccatgtaagtgtgaactccttatggaaaaacaaaacgaaataccatattctatttctttcaaagtgcacagaaattgcaaagtaagcaaacgagaaccaggctcatctaccacagcaaatctctgccaaccaaccgctttccaaatagaacgaaattcaacatccatacctatctttttcagcagctccggtgcgtgtcagcatactcccggtcgctcagcatatagtagacttgtctctcccgatcactgacaaggtcgaggtcggtgtcgttcaggagtcgtcgcggaacttcggcatcctccatcgaaacatcagctgatgaacgagtactagactcgtcatgatgacttgatgaagagccggatcccttgaatagacgagacagtcgcctcctcattctgtacaatgaagcaagaacggactaactcgacgggggttaggaatgacaagagtttcacccgccagttagtttcaccaaagcaacttgtataaatgcaactaagtgatttgaatttgagggaaactatcaaagcttgaatgagcttgagagcaaactttggagagggaatgaaaatgtgttgaaatggggtacagtcccctctcccggccggttaacatacccgaattctaggattaagaaatttccatcaaaactagttgaaaggaaagttcttcaattttgtgaaccaaaaatttccattttaaatctaggtgaagttgatctaactcttgcgtgaataaaattttagaataaattaaaactttttcatcttcaacctaggactagatgcaactcaagtgaaagcatggatacttgcataaaacatgttttgacttgagtctttcttgtgcatttagatttttggttggcattgcatactaggactcatgagcataaataaaagataaagtttcactaatcaaacctacaaccacacttgagcaataattataaagacatgaaaatgaggttaaatagtatcactatagattaagagtagtctaaataaatttcttacaactatttagatgcatctaagatttggaaatgtccatataaagaaaagaccttgctaattatctaaaataattcgtgcaagataaaattatggaaaaattcatgtaggctctacttaatacatgcaactcactgtaattttggtataatttaataactaaatttgatacctaaaataaatcggtcaaaccagtcaaacagtaggttaattataatccttaatcggctaaaaacctaccctcaataaatgtgcattaaactgcatgaaagtgtatagggaaataatttattcaaatattaggttaattatcatgaataaatataatttttgcagaatttatcttctcttctaagcctcttaaaaattcaaactggtttccaatgagtctatcttctcctaattttttgaacaatctatccataattttttagtacaaccaaataaaatggaaactaggtacattcatctgcctccaataaaatccatgtgaactcatatgcaataaaaattaatctataaattaacaaagaagggagaagaaataaaatcaagaaaaattcctggaatttgcctgagacctgtgtcggctgtgcccacctgcttctggacccaaacttctcatcctcacctaatttgctccgacctgggcccacttgacggtgtcacaagctagctccaactctgtgcataacttttccaccaatctaaagacccacaatgaacgagagagagtgatcggctctgggcgtgcgcgacgcgtggccgagacgtggcaacgccgagccgagcctccttctcttcccagccacatcgcccatcctcactcctcactccagtgccgaccaaaccgagagaacaagctctagctgctttcctcgccttcgatctcaccgccggctgtgatgaagacgacgctcgtcctcgcctacgagtcttcgccaaccctatctcttccacgttccatactcacctcaccatacggaaaatttctccttttgatttcatcctctctcgtgcagcggatcgacgggaacgccgacgtgccctcaagagctccagagcgcgctccaaacgtcgctgtggtggcatcgtcgccgtcgccaccgatctggaccaagccgggccatgccatcgcgccatcgtcttcgcctcgtactcctctccatttcccctcaagaaccacgaagaatggtgctacgagtgtggagatcggccaccgtcttcttcacctccggttgccgtcgccattgtcgtttccgcctcctccggtgagccattgctcgattactcgcgcacacaccatctctctggcctcactaacctcatggacacatttgcacgatagttcttggtgccgattgagccgtcgccgttcacccgggaggttcttgccgtcgccaagccgttctgcaagccaccgctgccgccaagaccacggcaaccttcgctagactcatggcgagcattcttgaggctttagtgtcgcattcatgcactttattcatctagatccagcccctaaagtcacatgcaccaccacccgaaaccatctttcgctcggacccgccgccggcgctactccgatgtccactaatcgagaaaagtagaggaatggaatcgtgagagagttctcttcattttatatttttacctcaaccccaaacgagccaccaatcgcctccggtgaacctgagatcgagctcagccatggctgctctgcctctgtagaagacgaggacctcattttgagaatttaaacaactataaggtttattgtacaatctttccactcaatgacatatatatgggcctaggactgcggattgattcttaaaaactgtaagggtctttctgcatattcgcaaatcactgacagtggaccccctggagataaaatctgagactatacaagagagaaacctagaacttgtaaaatccatataaaatcaaataaagcttattttgagatgattcaaatttctttgaactcactagattatgaactttaaagttatgaaataaaaacttgcactcacagtacaaatttagcctctaaaattcatctaagataaatcatacataaagcatatacaaatttataaaatgcatacaaaatacatttcaactcattttagagcaaacttagtttctaaagatccaccaacatgttctctaaaaacaaagtgaaataaaacatatacacactttacatcaaatgcctctaaaactattacctttaaaatgactagttttagattagctgaactttagaagtttatataaaattcatctcagatcctttttgagtaaacacaagttctatagcatcatagagctatgcacttcaatgttatgtatattaatataaaaagtacgagttcatccataattctgcaatccttcgcgtgggacccacctggtcatctggcccaaagaaacagcaccatatctcgcgcacgaaaaaaaggaaactactcatacgaaaaaaaaagaacgggaaaaaaaaagaacgggaacacgatctaacctctgcaatccccacgccgccgcctcctcattccttcccgaaccgtcgcacatcgacgctccgccgctcctccatcccctcccgctccatcgcgccgccgcaacgccagattcatcgccgcctcatcggcgctgagagcgagggtatcgttgcccctcccctccccatcagtcgccgcgccaccgccccatcgatctccgcccggccgccaccaatctcgcagcgccaacagtcgccgggtccccgtcgccacgcgcagctgtcgttgaagcgagcgccgtcgcatcgatctcctccgcccctctctatcagtcgtcgtgccgtcgaagccatcttcaccgacgctggctcgattgaggcacagcccttgctgaccgacagcgtcgcccgccgctgacatcttcaccatcaccgacctcctcctcggaccatcgcacctcgtcatggttggggtcctctgtgtccgcccgttggatcaccaccaccgtgagttcggagtttgtttgtttttagggctgttcactttaatgccattttcaaccttaccaatttttggtaaagtttacaaaaaaaaaagtagctacatttattttgctgccaaattttagtaactatataagaaattctaccaaaattttggtaaattttggcaaattttggtaactatgccaaaattttgttttggcatcaaagtgaacaggccctttcctttgttttcgtctgctcaggtgaccagctcttcaaacgcttcctattgctatatctgtgacatattgattggtttgggctttaataaacaaatgcaggcaaagaaaactctggatttttctggtgcgtgtgaggattgctttggcaagagctttgtttatgaatccaaccatccttttgcttgatgagccaacaaaccatcttggtgagtcttctaaaggaaatctaagggaaatatgataactttaggaaaatatgatgactttgattattcaatttgatttaatcgacatataaaatgggatcttaatgtactgctgctccctcttgcctttgttatgagcttcttttcacatatggatctatcagtactctaagtattataaaatcagttctaatccatgtggggtattacatgggtagatatggcatgacggaagacgtggatgtggctctggcggtcgattgggtggcaacgaggatgaaccacagctgcgactgcgcccatgcacaaccacaaccaactagctaaggtacaactacaagtcctgcgagcaactaaccaccatgacgcaattccgtttgggcggtgctccatgtggctttccagtagatttgatccccaaattgatatgatgtagcatcaaatgctgtgaatacactttgtgagttttgcctttgatcaagacgaactcctgattatagcgtcctaagccccacatggtgcgtgtcggcatccctttgtcaatttctaggccaaaaattggtgaaaggtttgtcaagtggtctacttttgattggaagcgtggctacttaattacttatatcaatgttgtttatgtatgactgatgctctacagatacagtttgtgttatctaatataactattttttttcttttattttggatagatgtggaaatgaagcttagtaatttttatatttttgttctgtgaaggaaatagaaataatacatgttgtttttca

SEQ ID NO: 5325 - DNA, 1489 bp, Oryza sativa
agtagttctccttcatcagcatcaaaatcttctgcctttgatctctctgacctttctcttttcctggtagcgctggctataataacattttttatctcatccgaaacagctcttacttggttttcatcaaggagtcgaccagagagctgctcaattaaaaagaatagtgagcgataaaaaaacccaggcctttcaaaattgaggaacggccaagtatattatcgcagtgtagaaagttgaataaatagattataaaccatcagtgaatatcactcagctatactgcattgatttatcaattcagcaatctttttggtgtaatagtgtcaatgaaaaatgcattcaatgtgcaaaaggtgccagtgtcaacttccaagcaaaatcattctggctttggtataagtccactaacatagcccaatcaatgatgaaaattagtaatctttttgcacagtaatgactgcaataaactttcaacactaatagcaaataagtccaccatgacctttggaaagtgatttgttggatctaactctaatgtggtcttagtttcttccatgtcatatatgaaggtactgcgattatccaactgttcctcgacagaagctaactcttgaaaccactatctattgatggcaattttggaccaaacaatattccaaccaaacaaaattcatggtgaacaaactggtcatacatggttcatccaactgaagatatttcagcttcatccaatagataactaaaaactcaacaagaaaagacaccaggtatacgtttctacagctgaatgatctctctaagatgcataggcagacaacaaacataacccagttagctgtatacaccagtgcactgcctcaatatgctccagaagcattacaatttcatagaaaaataccatcccattcaaataaaaatatgaaaaggagaacaaacctgcatgcactcatttaatgaatcaagcatggatgaacacatctcagtttctggttcctgtatagtaattcaaaagaaaacagctgttagcgttgaatagaaaaaccatccacatgtatagagaagattttgcatagaccttgtgcagcgcttcaacaagagctggaattatgtagtcagataattgtttaacataagattcatcgcgtccttgagccagccccttctcaacagccaattttgcagaacgtagtagttcaggcatagctgcattgttgttggaactatacttttaaaatgcaaatccataaggcaaaagataaaatcatactaaaacatcaaatacctgcaacagcagctctcctcacttcctcatgaaagtaaaatttaaggagtggaaccaatgtaggagcaacctacgtggaatttgaccaccaacatatgacactgagtggcaattgagaaattagacatttaacatgctggtatgatatcaaacctgatcaatccatgggaagaacccctccttgagttcatcagcataacagca

SEQ ID NO: 5326 - DNA, 4216 bp, Oryza sativa
ccatctaccagtcaatacccagtaccaaaggtaccaggtaccagctggtactcaaagtactaggtgctagtggaacgcacctggaagctcacggaaagaaagtaaaatatcccgttctaacgggatcccgttctgtagtctccctctttttaaactatgtgctttacctaaaattaaagttatcttttttttaaggcgaagtgagtattccacaaacaaatattttttttccattctctcactgtaggttattatgggcttatggcagtttgtacccctactatagacagccaacaatccagccagccacgtcgccacgtccgtgttcgtgcctgtgcgtggtagcgcagcggatggattggtggatgatggggccgtggggtgatggaccagcggtcaataagtgcggtcggtggggtacgcttcggatgcgatgaagaaaaccacacatggcgatccacgacgacgacgacggtcggcacggaccaaacccgcccgactgattggtgatttggtggaccggggctccagcctccatcaccttggagtagctgtagctagcagcggctacagcagccaaacggccggcgtacgtttccagcgcaagaaaaaccgagagagcagcgtgggacgggacgggacgggagctgggggagaaacggaggacaccgagaggcggaggagaacgaaaacgagaggcgcgggcgcccccccgttttgtttttgtctagctcgctcgctcgcgcacgcagcacgtacgcagccaagccaacgactggtgccacacgggcgcgcgacacgcgctcacccccacccacttggcctgttggccatcgccattcgccgcactcgcgacacgacgaggggatccgtcctgaccgggagtgaaaaggagggctgaaagttttttttcgcttgcaatgtagcgagcccggcagtacataggacggtaggagtatatacacgtccgttttttttttgttttataatggaacgaatctcggctctttgctttaaaagaagttacattcatttattacattctctcaatgagtaaacattcagttaacttcataatgactgattgaaaaacatcaacactaaaaatggaaaaaaaattattgaaatcttttgtaaatcttcatccgaaattaatgaaaatctacttgtaacttgtaagcttcaacatgcagcatatattagctccatattctcttcatatttttgaagttgtgtctaaagtcggaacagtgcattgctcggaaatgagatgaaattcgatgatatgtatgaatcctcctcgcgcactgaaatgttggatggtaatacacaacttgaactagagaaatcgtgtacaacttgcttattttgtatgttaataattattcttttggagcatagccgatgtttttccggtgcttgaaaggtactagaggtccgagtgtcaatagttggaaaatacccctatggcaatgtttggctaatgggaaatggaaatgatttcccacccataaaaagacatctttaaatcttaactattcattctccctctttcatttaattctaacccttcattcatttcctaattccaatctcatcctccatttttcgttatccaaacacaccctatgtattgatacttttcgatgatgcacaattcctatctttttttttcgtttgcatagacatataatctcgtatgtattatgaattaatttattcggtgtattacgttattattattttttgaacatgctaaatgtttagacacgggcagataaacctgcaaaatggcataaatcttatggtgtacatcatgctatataccgcaatcatggaacaaagacaaaatgtctatattgtactccctccgtttcacaatgtaagtcattctagcacatttctcatatttatattgatgttgatgtatctagacatatatatctatttagattcatcaacatcaatatgaatgtggaaaatgataaaatgatttacattgtgaaacggatgaagtactggttgtcacactataccatcacaccaatcaagcgaagcttgcatcaacgatgatttaaattttacaaaaaaagagagagaataatttgtattcattagccatttcatctaaaagtttaagctgaccgagaaagtctggtaaatatccactcgtatttcaacaaattatttaaacaaagtctctatttgaaaaacatcaacattcaaaaaggggaaaaataattattgaagtctctacgcgctaggtcgctgtcttgttaatcgatcgaattgaataacgtatcaacaaatttcttcgactcaggcaagcaccaagcagatatcaacccaaatcgatcgcatgtcgtcacacacaatctcctttcaccatcttcacgtcattcaggacaggataccacaccgtgcgtatcacgcatttgatatgcgagtgcgctaatatacactcccagtccgatcgatttggcagaggaaatttcatactttcacatacgtgagtctgcctaattgctctccgaatgatctaattgaccaaacgacgagacgagtagtccccggagcgccgctcacgctacaggacgggaaggcggcagccggaagccgcaacgaagccggaaaccgttgagggccctttgaatcaaagatttatatagaaatttaataggatttaaatcctatagaaaattttcctatttgaccctttgattcaaaggattgaagctttctaaatcctacgaaattcctatggaatggcacattgcatatggattttggaagaaatataccaagagctctaacctcttgaaaaatttcctttgagtctatctctctcatccgatttctgtatttttcctgcgctccaataaaacgattatttccgtgtttttcctgtgttttgcaatcctctgttttacacttcaattcctattagaattctgtgtttttcctattccttcattttttcaaccctgcgattcaaatgggccctgaagctagcaacttccaagctccaaccgatagacaactctgtccatggtttcgctctcacgggcgactcttgctgcaccttgcatgcagaacttgtagaatcgcgctataggtttctccaatctccaatatacgaactcgcaaaatcatttcaaccttgtcgacttgtcttacgttgttcttgtgtacgtagagcaaagtacagagaagtacattgctcttcaagtcttcgtccagatggggggtgagagatagagagagcgcatcactttttagccttttgttgcgcggacaaggctaatgtttggaacgctgtctgtctttttcctggccatgccgggctcgtgagattcctggggaactgcccaatgtttcagacgaagaccgtggtgcacagcactggtgccgctggaagtaaaactgtactacgctcgggactctgaaagtctgaactctgaaacctgaccgtgaccggctagagacgaacgcgagtatacgcgacaagtatgcagactttgattcacgattcacgtgcccgggctcagcgggtgtccgcaaccatgcaaacggcggcgtttccggtgcggcaaagctttggcttcttggcgcgcggaacggcggcgtctcacgcgcgcggcacgcccgtgtgagtgggatgggccggtgggcgagcggtagaggggaggggagcacgcggcgggttgggtttcgctggcagcagcgcctcgccttcttgggctctcagcctctcaaccaaaatgggctcctgcgctagctgcagcctaccgcagcacagtgcgctcggttgggtggtgcctgccgccgacgacccccgcggttgcggcgtgcgccgtgcgcggatgcgcccatgccacgagctgtgaactcttaattttagctcaaagaattgggtctagattctatagtgaaattgtgaagcaaaacccagctccatctctcattttaaattatgctgaaactgtttgactgagcttcggctttaagagaggtgaaactaaagctgtgctaaacatgttcttaataaaacatataaaaaaacaggtccctttcgcatcgccctaacaccaccatagtgtctgtcaggcacgttgctaggccaacaaagttgcgagctatgaatctatgaagctgtctcacagtataacagagtatgaacactgagcagcgcaaaaccaactctttctattgccta

SEQ ID NO: 5327 - DNA, 3881 bp, Oryza sativa
cactgcgataatatacttggccgttcctcaatttgtgaaaggcctgggtttttttatcgctcactattttttttaattgagcagctctctggtcgactccttgatgaaaaccaagtaagagctgtttcggatgagataaaaaatgttattatagccagcgctaccaggaaaagagaaaggtcagagagatcaaaggcagaagattttgatgctgatgaaggagaactactcaaagaagagaatgagcaggaggaggaagtgtttgatcaggttcgtgtatctcgtgactcccagcggctgggagtcatgtaacattaaaagacttaacttttgttagatgaatatttatattggacaaaaggggactgtatgaataacttcttttttactggatggaatattagtcttctaaaagttgattctgttaacactagtttttaaaataatttacaggttggagagtgccttggtactttaattaagaccttcaaagcttcttttctgccattctttgatgaactgtctgtatacatcacacctatgttggtaagtcagtggaatcctgcatttaattgtgtgtttggatttgatttatttttacacatacaagttccttgttagatctcactctagtatttttttttagttctaccactacattagttaccactactttaatttcttgatttgtgcctgttagcatgatatttcatccaactcttttcttctatcctgaaagttcctgattgttttagtggtttacattatatcacaacgcttcattttgaaagattttccatatgcccgacagcctctcaatattcattttgactgtttatcatcagtttattgtgaaacaaccaaggaagacaatgacatgcatatcttgatttgaactgttttattcatgaaaactcaaaatggatatgccaaataaaatagtatgtaagaattgtttccttggatatggctatcaaattatcagtgactgcgtggacatttttcttctcacgtgttaacgaaaagattaatggttattatcacttgtgtttaccagtattatcacttgcatgttttctagtcttagttctattgagctgtgttgattatttcttgttttgttgtttactgctcattcatttcttgtgtcattttaatttggcagggaaaagataagactgctgaagagagaaggatagctatctgtatatttgatgatattgcagagcaatgtcgtgaatctgctctcaagtatgttcctcaaagctatttggttggatgcagggcttgtatttgtaactgaattatgtattttcctatctgattaggtattatgatacatacctaccttttctgctggaggcatccaatgatgagaactcagatgttcggcaggtataaatatttatgttttcctgtcccttcatccatgtcctattgttatatttggccactaatgttgtgttgaactgccaacttattctttttaggctgctgtctatggtgtgggtgtatgtgctgaatttggcggtcatgttttccgcccacttgttggaggtagtcgggtcatgcttacatcactttgtagtttgtagtactttaccatgcattttcaaaaccaacccactaatttggtgctttcaaaatcagaggcgctgtcaaagttgaacaatgttatcacacatcctgaagcaaagcatgcagacaatataatggcatatgacaatgctgtttcagcgcttggtaaaatatgccaattccatcgtgatggtatcgatgcagctcaggtaagcatatctcacatagtcacattcagtcagttaaaacaactgtcattgttttgttatatatattctgtcttctgttttctatccaaccatattaacatgtgggctaccaagtgaatggaaagggggaaaactactttcctttattgagggaggatgaaatcctgctagaaaatctgtgcaaacttagtaggaaaaatgaattgaaatattcttgacagatattttctgtttgtggagcaaactttacaaacttaaatgattacggagtaggtcctaaaatttgtatatgcttttcaagattcaaaaaaggtccaaatcttgtttgcttgtatggatgaactgacaccttaatagatctaaactgttctttcatgccgttcatcaagtgaaatcaagcctttggatatagaaggaagatttatgtctttcgtcagaatgtactacccttcaatatttcctagcaaacacacagtcaagcttttagttatatgcaatcaatattccttggtccttgccatcaattactaatagctaagttggttttggatctgattttgcattcatacaacttggcatccttaaaactgcaaaacaaatccaaagttctactgaaaatatgctttgcgtaaactgttgaagaacttggcactttattgtgtctgaatgtttttcaaaatgaaactgctctgttcctgctagtgttgtgtgtcctaatggagttatggttgtttagtaaaaaaagtagtagtgattttccaaaggaatagttgagaaacctgctgcagagtatggagttcaagctgaaactgaaccaattaaataaccagtgtaaaaccagtagttgtgcttgtccctagatttagtctgaaccttgttttcagctcccgtaagaccatatattgctaaaaagatacatgttgtattatcctcatccaatgtattcatgctctttaggtcattcctgcctggcttggttgcttgcctataaaagatgacaagattgaagcaaaagttgtacacgatcagctctcctcaatggttgaaaggtatctgctctctatggatgacatgccaacaatcataactttttgttgcagtttataatgaccttgtctgtgtgcagatcggatgcagatattcttggtcctcatagccaatatcttccaaaaattgtttcaatttttgcggaggtaatttctgacttgtttcctatattatggtgtggggcccttttcccaaaggaaaacagagacatcaagacggattcctgtgttcctggtttagtttggttctctgtgataatttgtcttggaccttttgtgtactattagcatggcaatttcaggctgttactgctatagcagcaacatagctgatcctaggatcaaaactactatttattactatgtgcattttgtttttcatttctttgactcagatgctgtaaaattcataaatgaatgctgtcttgggatttctactgcaggttttatgcaacggaacagagcttgctacagatgaaacaaccaagcggatggcaatctcttgaggcgtttccagcagacattgccaccagattttcttgcctcaacattttccagcttgcaaccacagcagcagcttctgctgcagtccattttgtcgacataggttttttttttttgttgctgcaagttcaaatcttgctccttttttgatatatttcatcattgttaccgtcaaccaattctttgtgttgaatcatttgtgggtgagttcatttgtgaatgcgcattgctggcttcaaggaattggaggttgccatttcatatggttttgatgtagagtgtgtatattatcttgtactcagatatggttttgggatgtgctgcatcagaggttgtaagtgaaatggtgatattgttgtcagtttgagctgaacagatgctgcgccagttttggtaatgaagttatcatatttttgtggatgcttccctgcagtttttaataattattgctctctatttgtgctgagcatgtttcttcgctgatgaataccgtgccaaatattttacaccacagggtggcatttttttcgctttgtcttcatac

SEQ ID NO: 5328 - DNA, 4304 bp, Oryza sativa
cgtcatctattaaaaaacagaggtagtagcatatttgttttctcactatattattcaaatatattaaaataacaatataattttaaattttgcaataactttataaaactaataatgtgtaatattcatattgtattttatatacgtgttagttattaattatttttaataccaaattttagttatttgtaaattataaatattactatatggactctatactcgtcttttaatatttctttttttttaattctgaattttttgtaaattatatttctatatagactctatactcttcttccaatattatttatttttatttctgaatttttattatttctaattgtatttctatgtggactctaaactcatctttcaatattctattacttcctaattgtatttctaacctggactctatactatacttctaatattccttatttttaattctgaatttcagttattttctaattatatttctatatgcactatatactcctcttctaatatttcttatttttaattctgaatttcagttatttcctagttatatttctatatgcactatatactcctcttctaatattccttatttttaattccgaatttcagttatttcctaattgtatttctatatggattctagtctcctcttctaatattccttattttttaattccgaatttcagctatttctaaattatatttctatatggtttctgccttttctttttctccgattaatgtgagaatttctatgccatgagagcgaatgtggaggctcctttttctattcctttaataatataactagctgggtggcccgcgcaattgcgcggctagcacccaaacaaaattatatatattttttatgattttactaaaaatttattaaatagctatctcattgtcttaagagtttgaaagaccaaaccttatcatccccatgtttctaattatatagttttctaaaagtcacaccagatactaccccttatgttatctccttctttatttgcttgctcgatctaccactatttctattcattctccttagaaacttcaaacattggatcttataggttttagagtttattttcacattgagtttcatttttataatttctagacgtcccgtcaaacgttgccattatactcctctatgacccgtctactgtctcttctctttattgtcattgagattttaaaattcgaacataattatcgtttgggttcattttttactttctagaagtcccgccaaaccgtcagtgactttgccattgttcttctctacggctcgcccgctgcctcccttctttattgtcattgagattttaaaatcgaatatgactatcattgttttttttactttttagaagttccgaaacttcaaaaattgaaccttgtagtttatagagtttattgtcttgttgggttttatttttttataatttttagaagtcttgtcaaactatgccactatgctcctctacggcccgtccgccgcctactctttattgtcattgggattctaaaaattgaacataactatcgttggaattcattttttattttctagaagtcccgtcaaccgtcggcagctctgcaactatactcctatacaccccgtccgctgctgctcctttttattatcattgagattttaaaaatcgaatatgattatcaatggggtttattttttttactttctagaagtcccagcaatcgccttgatcgtttgctttacggcctccctgtcgcccctccttttagtcgtcattaggattctatttggtgtttcattaacaatttttttatgtcatatcaaccgccaccactctactcctttatatgcatgttacttaatttatctcgtcatgtattttagatggtcttttatttcaatagtctttatttttatcacaaattttagttatttataaattgtattcctaattggaatcttatttttcttttttctaatttcagatttttttaaaaaaaattaattaatatcgtattatgttcttttaatatttttattttttattttcaatttcagttgtttcaatattgttttcctacttgaaatctcatttactttatctaattttggatattattttattttttattctgaattttaattaatttcgtatcgggttcttatatggattcttctttcaatattgcttatttttaattctgaatttcagctaattttaaattgtatttcaacttgagctcttcttttgttttttttttgctaatttcggattttatttttatttttattcccaattttatttaatctcgtattaggtttttatacggactcttcttttaatattccttatttttaattctgaattttaactattttaaaattgtattcctacttggactatcattttcttttctaattttggattttattttatttttatttcgaattttgattaatctcatattgggttcttatatgaaaacttttttcaatattccttatttttaattccgaatttcagctatttttaaattttatttctacttggactctcttttttttttctaattttagattttattttatttttatttcgaattttaattaatctcgtattgggttcttatatggaaacttccttcaatattgcttatttttaattccgaatttcagctatttttaaattgtttttctacctggactcttcttttcttcttttctttttttccgattaatgtggcaatttctagccccacagcgaacgtgatgcctcttttcaaagctgttttaataatataatagatagataatagatagatagatagatagatagatagatagatagatagatagatagatagatagatagatagatagatagatagatagatattatttcgatgtaagcatagaaacaaaggagtataatgatatataaatggtgcaaaaccgaaacagcaatagaacattgcaaaccagataaccaccgacccttacctaatccaggaaataattgtattacactcggcaataaaagtaactagccccaggcccccagcccataaaaaagtgacagcatgtcccatagaaccaaacgacgaaccctccagcttgagattatccgaccagattagctaaaacgtggatggtatccccaaccctcccgcttgagattatccgaccagatgagctaaaacgtcgatcgtatcaccatccttcagctcgagatcatccggagtttccgagccttgaacacaggccgttgtaaaggaaaatacaaccattttggtacatgcttgcaggctccctgcttaagcataaatccatcagaccctgcagctcgtctgtccttcgcagggtgtatgcgcgcttgactcccaccatggtcaccagattgatcgtcacgaacctgctccgttcggtcgccggagcaaggcggagctggtcgccgtcctccatcccgtaatccgccggcgtcttctcgatgtcgaccttcctgccacagtacgtgacgtcgaattcgccgcgctcatcgtcagtgggcaccatggcgaagtagagatcgatcaagtcctgcagtcgttcttgggtcctgagcatggtgcgggtgacgacgacgctgcgccgcattgttgttgttgcccctgatcgtaagggtgacgaaggcactcggcttgctgaacggagagaaggcgatctcgtcgccgtccttcatgttgcattcctccggcgtctgcttagggctgagctccctgcaatggtagatgaaagcaccctccctgggcgcggtcgacggcagcatggcgaagtagagatcgaacaggatgtccaggatgtgcaacctacgcatggtatgcgtgacccggcggccattgttgtccgtcacggtgagggtgacgggcgtggtccaggttccgtcggggaagaagctgacctcgtcgccgtcctccatgtcgtagtccgccggcgtacggtcgccggtcacacgacggccgtagtgcatgaagacaccctcggcggcgtccatgtcggccggcaccatgccgaggtagaagtccatcaggtcgtccagcgcgtccgtcgtgcgcatcgtgcgggtgatcctgacgccttcgctgtccttcaccctgagggtgatgagcgagctcgcctcgacctccggcgacgagctgtcgtccgcgtcgtcctctccggtggccttcgacgacatggctgatcgagatctcttcgacatggtgatggcggatcgggaagctgacatggagtattgggtggaagggttgagtttttg

SEQ ID NO: 5329 - DNA, 6512 bp, Oryza sativa
attttttagaaccctgtgatgtaatttttttaagagtttgtgatgtatttggagatgatttgtttgaggatttggagatgttatgtaatatgtgatgatttggatatggaaggggacggtgtgaaatcaatattcaatattaaaagcagaaaaaaaaagaaaaaatatctttagtcccggttggtgttatcaaccgggactaaagatgctcccatcccatctttagtcccggttggttacaccaaccgggactaaagattgatttttagtcccggttatttgaaccgggactaaagatagcgatctttagtcccggattcgtagtcccggttagaaaaccaggactacaggcggttacgaaccgggactaaaaagcatttctccaccagtggtaatggtgtagcttctttgggcataatgtacaagaacttttaactcaactgatttaagcgaaggatatatttcttttactccattcaatgtatgttggcacgtacacgctaactagtctagagaagatagagcagcgcatgcagcaaactgttgcacgcggcacatgcatgttccgccatgcacgcgcgcactaatctctgtagaaacaaaaacaccgtaccggatattgattctatgcataatcccattcggccattcccatgcccatatatctccaatccagccaaatactcgatgtcgatcggtttctgtatcgtcgtagttagaattaattgtttatcctttgcgacttgctatatttagagcaaggataataatatagctaactttctactattagctcatcttaaaagccaacatatataataaattagttataaggttggctacaattttcttctcctctctctatctctcacttatacatttaatgtatttgtcttgaaccttgtgataagttagctcttgcatgagagccaacatccttaatttttcactacctctctcctccacctaagcttatagtatgcttatagctcactattatacttgctcttatgctactagtacgtactactgtagtttgcaatttgcagtgttttctttcttctttttctttgaacgaacaatgtgcagtgttttcctttctttcatcgtatgcaccagcaatcgatattagcattgtatcggttgttctgggatgatgaattgtggcaaccgtccagatctggccggaagatccgcgctattccgaccatatctggcggggcttagtgattgcggcggcgacagcggcgtggatcgccggatatgacaggatggtggctagtgacgacggttgtctgtggaggggttcaatggtggtggcggcggtggagcccccgccatacgtgacggggcgtgaggccagctggaacaacgtcggcgtcgagactggcacacgggaggaggtggagcagacgtggtgggccggtgcgtcaacgacggcggcagctggagatggaggcaaggaagaaggagaccggcggcgagtaaggaggagcccggcgaggggatgcgggcgacagtgatggtgctaggaggcacaagcggttgcgacaggaaacatgggtggctggttagcatgaggcgtgggcgacgactgcggttggccggcgcggtcgggggaggagccggtgtgagtatgtgacgcggatgaggaggcatggccgtaggccgacacggccagcggcgacggaggctgacgcggcgcgaggaggagcagttggcgggtggcggaggccggcatgacacgagagatgcaactgaaagtgcattaatccccctagtgggttttggtgattaattacaaatgtggttaagagactaatgagttcattgagtgactttcaggtgcattagtccaaggtgtggaagatagatgcttggagaccccaaaaagtataaaaacaaagcggaccggaactcgagaagtgcataggatagtttatcttttgaaatcgagtttttaggaaaaatcgtactattaagaggggttccaggtgatgctctgagatatatcaagtgctcttagtgtgaaccaagtgtcaagtttctctaggagtcatttttgcaaatactccatctgtccaaaaatgcaagtccggaacttcctgtcttctaggtccggaagttccggtcttgtgaaaaagattttcctaagtgtagtccggaagttccggtcttccaggtccagaacttcctgtctagtttccagttcaaatttgtgagtaacggctagatgacgtcacctagccgttatacatatacagctcgtttccagctcgttccttggccattccactttcacttttcaaacctagagctattgctagcctctcccaagtgtttcttaccttctccactcaatctagagcctaattcttgtgagaaagagagattgagagggagagaagaagatttggagatgtgtgaagactaggatcttgggtgagcacttggaatatctcgtggctgtcatctcggtgcttattactcttggagatgatctcctagacggttaggtgtcactcgcgagaatccgttgcatattgtggatgtcccgggtaagtttgtgaatgatttcctctcctccgaaagggaacgaggtaagttaatgaagttcttgtgctgagattctagaggctttccaagtagagcaacccacacttgtggtggatttctagaagtaggttgagttggatcttggtggtcactcaattctagaaatttgcctaggggtgtttggtgttgaaggctgtggattttctctggggtttttgcacaagtgaggcaaggggttaatcgagacccagctctttggagctcctcaacggagagtaggatcgcaagattcgaacttcgggaaaaaatcgctcttgtctctttctgtggatgattctgtgatatatcctctgcttagaatacctgtgcaccatcttgtgaagattggcttagtctcttgtttcgaaatttgattttcatctctgttctgttactcggaagttcctgtcttagaacatcggaagttccgggcctgggaggccggaagttccggagtttcttaccaggaatttccgggtctgtttgaattttaccgcttcgatttgtttttaagttttcagggacagcctattcaccccccctctaggcttcatcagcgcattcagcaactagtagcaatctaggccgccgtggcgcgagaaggtgcgaccggtggtgacggaggccatcgtggcacgaggaggcgcggtcagcaggtggcggagggcgatgcagcgctggaggcatgctgagactaaccgacgaggggctttgacagcattggagcatcgtgcatcaactgtggactagcaagcggtgggcggcaggtgaaaacctagcttagccttgaccgggcccggcaacaatggcgtttgagtgtctcttccgatcccttcttgagagtgttgtcgtgtcatcccatctcctctcgtggggctgccaagtgaaaacccagtctcgattctctttgagaccttgacggatggtggcggcgacgtcttcaccgctcttctccctggagatgtcgtctagtcagccccttgccgaatccctctagacaactagtgcaagctcgctctctagatgcatgtatgtcggtgacacggggccgggggtatcgtgactagaggattgggtagccgcggtcacccacgtggcctgaccccctcgggggggggggggtcgggcccgagggtgacatggccacccctccctctgtctccccgaggggtcgggccgctcccgtttcagccccgagggctggggcgccccgaccccttgtggttttggcgccacgtgtgtgggttaggtgagcacagcggggctcacctaaccgcatttatagcgggttggacgagcgcgccacgccgcatttaatgcggcgcagcgcacgcttatccggtccgtgaccggtcgtggtgtgtgaccggtcacagaccggtcagatcgcgggttaggtggcaacaggcggcctgtcacacgcctcgccccgtcccgtcggaatgatgagagcttcctggctctcgtccctagccggagccggcgtgctaactcctggagttggtatgtcagtcccggtcagatccattccaggcttcagcgcgagcatggcaaggaagtcgctggccattgaatgaaggttgaaatgggcgtccaccgggaaagctggcgagcggggcaggaggcgtgtgctctgcttgtcagaggtcacttcctgctgtagactagccctcattgtaaaaagcatgtttcctttcttaggcagctgaaggcccatgtggtgacccctgaccagataaaaaggaggcccaggcctaggagaggaggaaaaggggagaaaaggaggaaggggttctagagcctgaactttctctcgctctccgcctctctgtattccttcacacacagatccaccagaacacaggagtagggtgttacgcttctcagcggcccgaacctgtctacgtagcccgtgtctcgtgcacttcctctctcgctgacgttcctcggatcgagggcgaagaacctcacttagcgcccccggccgaaccggcaaaggggggcctgcgcggtctcccggtgaggagccccacgctccatcaatgtatttttgtgtcggggccctaacttatgcaagttggccacgtctgagggcctagggggagagcggttccattctactctctcaccctcaattctaaagaggtcgctagagtggggcttggtgtcgggtttttaggattaagttttgggtgatcttggctgtagttcctttgttggcctagcggtggccggttcggtgttggccttctcccgagtatgtatattggtgttgtcagtgcgtgggtggtgttttcttcattttcctatttaagtcctcctaggattgtgattttgtaattttttttactgctctatcaatattaacttcgcatgtttggtgcgagtcatttcaaaaaaaatggatgagctagcgtggtgtgcggatatcgtcattacaaattcttttaggactatctatacatttgtcaataaatgttctcctaaaaagttgtcaaattaaatatgaatatatgataaattagtagtgtaattacattacaacttacatgtaatttgtatgtaactttcaaattcaatcgaagtaatacaccacacaaacttcttcacataaacaagatatgctcacgcatagtactcgattaaatttaaactgcacaaaaaacaatacacaaatgtaatcaaaatgcaacacacatctttttccaagaagtatttattggtgctctttgttagggaaaaaaaagagcttaatttaaatttatttaaacatgactactcgattgccatgcaccatgcgtaaaaccatttaaaaccccttcgatcaccgtgcaattactgcgtcaaccgaaaggttcagcactgagattacacagatcgatggctaattaaaccatgctcacactggcatcatatataagcacacgcagggtgcaatctatggcaacagcaacacaactacgcaagtacacctaaccgcagattagagctagctcaccggagacgagatgttcggccggtctggcatcacggcggcggtgaaggtggaggaggaggacgacgggaagacgccggcggccaagcgtgccggagagtacgtcacgctgaaggtgcaggacaccgacggccgcgccgtctaccgcaccatgcggtggacggagcagctgcagggcctgatggacttctactacgaccgcgcgcatggccgggtgcagcgcggcacgggtcggttcctctacgacggccgccggctgagcggctggcagacgccggcggagctcgacatggaggacggtgatgaggtcgacttcttcgaggagctgatcggtggcgccgcttgatccggatgggctcctgctccatcgtcgatgatcgcgtcgtagcttgttcctggcagttgtggacttgtaattgtgtactggttgtggagaaccagagtacactaggtttggatgataagtgttttttcattttggtgttaagcagatgcgacgcttgtaatttttccagtacttctgtctcatccaagtaatctcgaactaataagtttgtattttcaaattcaaacccgaaaaattctgaatgtacaactccgatttcactggtgcaccgtgcacataccgtcgcgtgttgtgtgataaccgaaaccggagacaatctaggagaagatagagcacgggaaagcatgcagcagcaaacggcacaagctcgttccgccttgcacgcgcgcactaatatatagaagtaataccatatcggatagtgattctacataatcccatctcatttccaagatttttctcaaaaactcaacccttccacccaatactccatgtcagcttcccgatccgccatcaccatgtcgaagagatctcgatcagccatgtcgtcgaaggccaccggagaggacgacgcgg

SEQ ID NO: 5330 - DNA, 11105 bp, Oryza sativa
tgcctgtcattgaacacaaccaaggatgcaggagacttgtctcactctcggcagcatcagtagacagatatatgactggggcgttagctttctcaacgattcgaagaatgcattctgctgcctgagggatagggaagaagcagctctctttcttcacattactgcaggaagatgagaacatatcagtaaatgcctcattattcaaaaaaaaacatagccaacttgttgcatacatcactcaaaataaccacaagcacatagtattgcaaggaaagacttgagcagttgcgctagcattagtaacatttaaactactcttagtgcatggcacaactgcacaagtcatatatcatgctcaatcaactcctatacatgtatcaatcagattcctttgtagtattgaagtaacacctagtagttttttttacagttacaagcttaaaaacaagttatcttctgtaaccctttttgttgatggaacacaaaatacttgttatttatttgttatactccctccgggctgataatattagtcattttggacaagggtaaagttaaactttaaaatctttgactacaaataatttctaaaatatttatcttaaaaatatgaaaaccatatgcgtagattagtcttaaaaagtacttcagtaaaaccatatatttgttgatattcctatatatattataatagaaaatagttatcaaagttactttttggagaccttgcctttgtccaaaacgacaagtattatcaacccggaggaagtacttgttatgacatagttctgacccaacttattatgcttaattaaaactagtcaccttcaacgaattttgttcctcagtaacctgtaaggcgctgagtgctaattagtgaataccaagtgctctagtagaaagtgtattaggctcaaatagtgagaaaacttaccatgacacttaaggacactgcctcacaatgtgagaaccaagtgcagcaaccagctccaaaatgggcaacaaagatgaatgaatttcccttctatacaagtatgcagctaattattttcaaaccatgacttgggagttaaagtgttctgctggtcacatgttaacagcaactgatgtataacttaactgaatgtccatgaattctcaaatactgttattaagtcattgaagataacattatttatagcttggtatgaattagttgaaaatcttgaaccaccaatcattttagtcttgtaagcaccaaaattctaagaaggtatttagatacaaacattccaggtaaaattctcaaaactattgccgtaagatataaaattaatacgggggactgatttacatcagctgaacaaagaaattaatacagtactatgtagtacttactcccttcgtcccaaaatataagaacctcgtactggattagacattatctaggaccacgaatctggacaggtccagtactaggttcttatacttgggatggaggaagtacaagatagcatttaatcgatttgaagtagcaagaacaacattatttcagtatgctagtcaatgttagcaaatagccaaacattgtagctcaatattatggacaatggctacattgcgtcctagaagatactagtaaatttgttgttaaccaggctcttcattggctgcatcagaacttttacgaaggcccaagtcaatctgatcaaggccagaacatacaagttgacttctataacattttatatgcttagatctaagtgaagcatctaggaccagctccaagcgctccctatgaaatcaagcgcctggtttctaactttcaatgcaaggagctcaacatgaaatcaagtgcacatctctatgtgagttatttaatggaataaaacctatgcttaattgaatgtccatgagaactgagcactaaaaagatgataggattttctctaagccaacacccagcaactattagaggctaattggcacgatcttcttgtaaaatgtactgcagccctctcaataattaaacatatctgtattgctaaaacatggaggtgactaaaaacgaaaaaggtatcttaccagaacttcaggaagccatgtcgccgaaaatgcaaagcaatgtagttgccccccaagaaggtctgaacaaagcgttgcgcagtgagcataataagcctacttggctggatcaaagtattgcacttgtgagccaatgggccaccaggctgcatcacccactcttcctcaacatcagcatagaacatgtcaccgatcgcgagcacctcagcatccgtggtaaactttggcatgatatcctccacaaatctcttctttggctccttcagcttcgcatcctctggccaagctgcctggatctttcccagtgaaatccccaatcccttcaacttcttaacatgatcctcatcaatgaaacaagggggtgatgccgcgtaacatatgaactgatcaatgctcactttcttcctcttctctgtgaattcctcataggtaattacaaccttccttccaatgcaatcattaatgtggttgatatcaagcacccggtcgtactgataatccagcttctggctaggcaccaccaagatccggccaagcagcgccgcgaagaacatgtgcttctccaagcaaatcaagtggttggacatttgcccggagacgcagatggcgaacaggaatcgatctttcttggggttccactctatggtccgccggttggacggcaattccctcctcctgcacccgtcagccggcagatcaagatccaacccatcctccgtcgcattgcccgcagcgccagtgcggtgcgcggagaggagcgccgcctggatctcgcggttgatcttgatctggccgaggagcgcgtcgtggagatcggcgtacgagacagcgttcgagcccgagctgctgccgttggtgggtgctgccgtacggttgaagagggcgaggaggcccgagcgctgcgagcggaggaggtagagcgcgcggagctcggcgtcgcgcatccgggacgccgcggggtcggcggcgggagcggcggcggaggggaggcggatggaggcgggcaggcgaagggaggacgcgccgccaagggatacgaagagcacgaggaagaggacggggagggcgacgaagaggaggaggtagcggcgggaccagaggacgcggccgagcgaggcggcggagggagggaccgcggcgcggaggccggcgacgtggaaggaggaggagggcggcttgacgtggttctgcgggacgagggtctcgaggtcgtcgtcctcgtcggagacggaggggtcgcgatccatggcggaggagagtgtcggtgcggcggggtggacggagtggggaggcgggaggggagggggagagtgcggagtgtggttagagggaagaagcgatggagattggagggtggacgatggcgactgtcgaacggtggtctgctgctgcagaaaatgtagaaaaatgttttcctgaatgctaatactactatatctgtcttatttattactagttcttttaattaattgtactagtattgtgcatcaataaagtagagagcatgaagtcatgaccatcatagtgatttttgcagtgaacacaaactatgccaaaaaaaaatgtggaagtgtttcaataaaatatttgaagaaagactttaacacatagcttgcaacaaatgttctaaataataaagtagaaatactgaactcaatacttctgaatggctgctaaaaggctaaaaaagcatggccaaattagttagattgttagagcatctccaacagactccaaatcagactctccaaatacctatataagcatatctttaattggtttggcaagctaaactcgttgctaacttcaataatctctccatctatcatttctactctaagtctatactactggtatccatatgttatcatctactacctcttcttcttccttctctttattcccctttccctcttctcctactgggggcatccctaagctcctccttggccctctccatctctgtggtggtgacgtccgtgcaaaggcgaacagcgacggtgacagcggacaacgatggaagatccatgagtgcgtggagcgaggtaaccaacgcgggagaaagggaggttgttggcgggcacggtgaacagggcgaggtggctctagagactgcacattgtggcggtgcccatgctacaacggagctcgagctcgccatccactcccaaccccattgtcgctgtaggcatccccacaccgtctccagtaaagtagatggaggagacggcgacgaatcctgagtcgaatccatacgggggaggaggcggtggaggtcgtgcgaggtcagaggcgacggcgagcgggaggccacggtagcgaggaggcgcgttgaggcggagtcgagggagaggcgctcccgtcaacgccaaccgctcccaaatgaaggaagaaagagaatagaatgtagtgggacacgaatagcaagttgagtaggctagttaagtttggcaagtgagagaaggagtttgttagcggatgacttggagagtgggatggatggactgttggtgtgcgatttttatccataattactaaattttgatttaaacagtgggatgaaaaggttgctagagatgcttagcatgctgcaaagtactacataaaactctgaaaccacttctgatttctaaatagctgctacggttgctttgtgcttgccataagaatatttgggaaaggaataacataggaaatccatagaatttgtatcttatagaaaataattatacgaagtcctttaaaacaaagtatttcctccgtttcagaatgtaagtctttctagcattgttcacattcatataaatattaatgaatctaaatatatatgtgtgtctagattcattaatatctatataaatgtgagcaatgctagaaagtcttatattatgaaacggtgggagtatttgcttttaccaattcctttgaaattcttatgggatgagctattgtagtgcaattttgagggtaaataagcatgaggtcttacctcatattttcttcttctgatgtctttgcgttcctacgttttttatgtattcccgctagttttatgaaactttcatgtgttttgaaattttataggaatccattgagcattacgttttattcatgcttttttctacctctgtgtttttatagtcccgtgtccgtagctaatcaatggctaatccacacggtcggtgaacgttcaagctgtccataatctatcctgcaggggcgagccacaaaattccatctgtttcaaatgccaggatttgaaggatcgagggtctcaagggaatagagatgtcgtgatcaagtggtcagctcaggactcaaccaagttgcttgccgttgctcttgatgcaccaggagaggcagtccacgagagtagacggcttaaaccacgacgcatgcttgatcaactgggaatgttcgatgcttccatccccaacatggtacccgctgattttcgttctttcgccgcagtcgaaacccaggtagaccgtatcaccggtgacggagggaaatgtgctcggagaaatcgacaccgaccgagacaatccgatgaacacggcgcggccgctcaggctcctcgccggaatcagcagccgggagtccaaatccatccggtacaccgcgtactccctcctgaattcgtcgtggcttacggttcggtacaccaggatcagctcccgcccgccattgtccaccaggtgaaggctgtcgctcatcgagcagaaggagaatggcgggtcgatcgtcgtgtcgaccgccgtcagcatgcgcggtggctgatctgagctggtggtggtctccggtgtcatgataccaatggcggtggcatggtagatgcggccggcgaagggcaccgtcgagtagagcatgagcctgtggtcgaagtctatcttggtacaacgcttgtcgccgggcttggcgacggcgagtgtcgtgggggatttgagatacgctaccacggtggaggtggaggtggaggaggagtcggcaatggcgacgcctctgacccggaaatcctccccgcgcagtccctggtgggggtcgttgcgctgctccggcgtcaggaccgtggcgaacggcgggagctcggtgaggtggcgggtgagcgggttcagcaggcggacgccgtggggggcgtccttgcggaacagcaggaggaggccctcgggggtcaccatgagcaggtcgtgctccgcgagctccggcaggtccgtgtggatgcactcgccggtggcgacgttgaggaagcggtggcggcggcgggcgacgccttgtcgatcatgatccaccgccgggggaggaagcggccatcaaccgggccgccgccgccgcgcgggctggcgcagcagcggcgccacgggccgcacacggcgcggaagcggacgtagtcggccacgtcggcggcgagcaagcgctccgcgatcaacccggctggcccttccgccagtctctcctgcaaaacccgaccgggtcagattcaattcaaataacacaacacgatttgaacagaaatctaatctcaaagtaaagaagaaacacgatttgaacagagcaaatgaagcaggcggaagtgttttggggaggagggggggggggggggttaccaggaaggatcgggaacgggggaggagccgtgcggcggcgggcggcagcttggagcggccgagcgcgctcgctttgacccccaagacggcggcggccgcttggagcagcaatccagcaggtgatcgccccttcgtttcgcgaagggggagcggatctgggcctggccgacggcgccggcgccggaacaggagcggagctgagcgtcgaggctcctaggccgcttcgcccgcctaggggcgtccgctgtctgcgctcgggtggccgtttttcgcttccccatcaaactgagccgccgccggcggcagaggggatcggccggagcccggaaagggaatgggttaatttggtgtgttgtttcgggcgacagcgacgcaacacggcgcagcgtgacgaatcagtacccgtacgcaaccaatttatgcccacaccttttagcctagtactccgattcgtcgtatagtactccgattcgggccttgatccagcgggctggctatctcggggagaggaagtcggacttagcgcctagcggggctatgaccaggccagcacgggccggtccgatgtaagccgtaccatcctgacacttgggccaaaatcaagattcgtttggttgggccggtatttcgacccatttcgctcagcccctgcgacgccgcgcgccccgtcctactgcaaaacgcgtccgctcctagctgcgatgcaagccaaccagcgagcgtagtacgcccgtatgcgaggagaggacggcgaaggttgcggcgaccaacaaggtccagtttagttcttaattttttcttcaaacttttaactttgtcatcacatcaaaacttttttacacacataaatttctaacatttttctttaaacttttaattttagttaaactttcaattttaacgtggaactaaacacagcccaactccccaaacctaaaaacccaaacccaacccaagtacccaaccaccccgaggttgacaaacaaaccattgcacgcgaccccgcccggaccgatggaaaaccacccgccacccgatcgaaccacggcatatcctcgcgcccgcggctcacgcacgcacgcacccacacacgtgtggccgatggtcaaccaaaccatccctggctgctctcgcacgcgaaccacacgagtcatccatccaacactgatgatcactactctagcttagcttactaccccaacactgatgatacattgatactgcttctacaatatgcacaactttactttttctcgtcgtcttcttttcttttcctttttttcttgatatgttcttgctttttgtatgtacaaagccactggcacgcgtggcccattgaccccggcgatcaccaaccgagcgttacatgtgccgttcctttttcgaaaagtaaaggagagtgacaaccaaaggaaaaaaaaaaaaactcgcttcctagctcgcagtgtcggtgagacacatccgagctaagcgagagagaggaggagctcatcggcttatgcacgccatttccgtggctcaaaacgttggcgaaaatgcgaaagaaactgaaatgaaaacgactctctcgctctgttccctaccacggcgaagctgctaacaccgctcgtcgtcttcttatgtacaccgacacctctttgctgctcgccgcgccgccgtcggttacgtctcggagcgccgtgctcgtcgctcggacgccggcccggaagagttcgtcatcgtcgtcgtcgccgtcgccgccgtcgttgtcactgcttcagccgcagcggctgcgggtggtggtggtgatggccgccgccgtgggaggactcgacgaggatggaccagagtatctgcacgtcctcgcacgggcacgacttcacgtcctcgtacaggatgtagatccctctctctgcatgccaccacacaaaccaaaacacaacaatcacaaacaagaagaagaagaagaagaagaagaagaagaagcgagaggatataggagagatcgatcttgacgtactcttcctctgggcggaatgcatgcggatccagagcttcttgagaggcgcgaggagagactggagccagcccatggtcccagctactaccactcgcctacctctgcaccctgaattcaccttaccatgcattcattcacctcagctgctgctgctgctgttgctgcagctataaccaagctgaaaaacaggcagaggcaaagcacaccaatatatgccttagctagccatctacctagccatcttggaggagtggtcagagaagagagaaagagaggaagagaggaggagagttgcagtgttgcttcgaggctgggtgaagctaagcctttctgcctcttaatcctctgctttactattcctttctcgcaatcacgttgccctcctccctcccttgcatcttaatcacaggctttaacattcttggtaccgcgtcactgtccatccatatcttcccatgaataaacaacgggaagagagaggccaatgtaaatgctgctggatcgatcgcaaaaaagaaaaaagtttcttgcaatcgaagagagacgagagggagaacactggctctgttaggtcttatttaagctttctggtcgatcgatcgccatggcctaccaccgtgtcaacaatgcgagccacgagcgtattcgccgatggctttcttttatatattgagaattgtactggcaaaggggaggttgaggaactattatcaagccatttccgtcggcacgcgatgtaggaaaatctgccccgatccgaccgttcgaatacgatcgaacggccgagatttcagctgttttcagagtagttccagagtcttggctgaaatgtaaacatcaattccgtcggtgaacggtatgtagcactggtgagaaatgaactttgtgcctacatggtctggtgctgcagcaggtcacatccaaaatgctgagatttaacagggcgtctgttagagcatcaccattgtaccacgcgagccaaatggacagaaaacaaaacaaagaaatataaaataaagatgatgaaacgatgtgcgccctgaataggatggtttaagtatcttaagagattatgagaaggaaatcgagaagagaaactgacctgttgttccagtagttgcctcttcactttctcccgtggagagaagcttttgctccatcagcaattctggagatctcatggaccccatggaaatggaagggaatcagtggaatgccaagtcaaagtttttattctggccccacctctggtctcataatgtggcaatatatatgggatattctttgcttgtgcaaatgagctcctcaatgctagccaacactgcttctagaaattgagtggtatcttatgtgggatagcactgaagcaagtgtttcttgtaatcatgtttgttttcttgcacctatcatctgttaggtttaaaatttgtactatgacacactcaagaaagtcatgtaaactgcagcagcatttattgttaatgtggacatactttagtgtgacagttactgacaaaattgtcacaaatactgtattagctgaatcaaacatggtagatatgaagaacgttgactgttgtactgactggaactattgtagttcaggataaaaaaattaacattatccttgtagtagtaggtgtatgatgcaactttgcttttgccttttttcccccagtgcacatccagttaaagaaaccaccaatatgaaaatttactaaattaaggagttcatggaccaatatcacaaagtggtggagctcagcgggccatcaacaaaagggaaacaaaattgactacgaaagtcagtacttggataagttcttgttatccattctctgtaaattatagtagtagagaaaaaatatggagattaacaaatacagggtaaatttaataattttaccagcaactgaatttcccatcagtaatctatattattggtttggataattttaacttatgccttcaatctttaccaatcctctagtcatcaaggatcgtcaaaatgcagctcacagcatgttcagagttgcacttgtgaaattagtgtaggatcataaaagatcaaacaaacctatcataggggaggtgaatgatagggaaaaccaaaaatccaaaaatcttttgcggaattaaagattaccctcaaaatgaagtagacgtcgaaaataacattatcaaaccaccaatattttcatcacaaaatctaaatcaactccttgattttacaattagttgattattacaattacctttgctaagacaattaacttgggagttggcacagaacacagcaccagattttcttgattcagtaatatatttctactaagcctcacactgaacatgtagagcacaagaatggaaaagttttcagaaaagcatcatttttttgctttgcttcttggatttgtgatcagaatgtatatgtcaaa

SEQ ID NO: 5331 - DNA, 6871 bp, Oryza sativa
caaaatatctccgcccaggcgcctcgccagtttgtttcttgtgtactgtagtaattaacaacccgttccaccaccaccaccaaagacccggtgcacacacggaagcacgaagcgaagcgggggtccatggtgtgtgtcagtcacactgtgcagggcacgtgggggcagccgctcaagtgagctgtccctctcatctcatgtggcctctcgcgttcccatgccactgccagcctgcaaaaccacagcacaagtagtagtagtagctgcctccctcccccgcgatcttacggtgaattgctggtaaaacccgtgagccgtgacggttgtgtcgggtgctaggacgagaccgtgctgtatcgcgattttgtactgtagcccggttccactccgacacaggagccgctgatgcgagttgcgaggatacataaccgcgaggttatttcctttttagagcttttaaatcatgacgtatcccacgataatcacacgattttcacagtaatcgtactgttaccatgataaccaccaaacgtgaggcgataattttatctaaacgatttggtgaatactgtgatgccgagagaagccggggacttttttttttacgaccggtacggatggcgaggcaacaccaaccacggcggcggcggggtccctgcccccgcggagcttacctgttaccggacaccacaccaccatcaatcatcgtcatcgtcacgccaatgaaaattaatcatggccgccggtagacggtcgccagcacgtccagctgcgatccagccgagctcgatcgatcggtcgatcaaacggcaaacctcatcgttgcaccacaagcatcagccgcctgaccgatcaatgatccagcagaaacagtggagtagaaggatgatcaggaccggtctacatcgatcgtacgcacacgtacacaaactaggacgaatttgaatgaacacgtcgttgattgcatcctgtcgttgagtacattttgtgcgctagcaacataatactgatattacctcgactactatatactactagtaatcatactgatggttaagctttcgcctatctctatctaggtagccatctatctacagggtctgaagctttcgcgatggcagtaggagtattgaattgggatggctactactcctactttgaattaaggacacgttttaaactagatttgagctgaactaatatctcatttatcgtgaatatgtttatcaaattgttaaacagtatgttttattataaaactagtatgtttatcaaattatatttattctgaattttagttagtattaaattcctatatggactctatactctacttctaatattccttattttttaattctgattttctattttttttcttaattgtatttaatattccttattttttaattctgattttcttttttttcttaattgtatttctatatggactttatactctacttctaatattccttatttttaattccgaatttctattatttcctaattgtatttctatatagactctatactctacttctaatattccttatttttaattctgaatttcatttattcctaattgtatttcaatatggactctactctcctcttctaatattccttattttttaattccgaatttcaactatttctaaattgtatttctatatggactctagtctactcttctaatatttcttattttttaatttcgaatttcagctatttctaaattgtatttctatatggactctgttttttctttttcttcgattaatatgagaatttctaggccatgagagcgaacgtggagactcttttttctattactttaataatataatagatttatatatatatgtattttcaaaaaaaacaaataaatttatttataaaatttacaatggataatagttcattaattatatgctaacgatttatatctttttcgtgcatctaattagctagtcgtctttaagtgcttatacagaacacgccctgagccagcatagtgtggccgatctgctcacgcatgcagtacagctgacagtgaggctgccacgagtgactggcagacagacagctccagaggcttcatctccaagcctgctctgcaatgaaacctcgattattcttctcctccttccctgaccccgtccaactccaacctaccgctttcttattttttccccaaaggttctccaaccaaatggatcgattattgcagcatcagaccagagtctagtagagtacttaacgctgcgaattgccagggatgcagtagctacaaacaaacaatctggttatcgtctggtggccatgattagcatcgctaatcaaaacaaagcatctgagaggggcctaattgatcaggaggagatgagatgagatgagattccttgcccttgtttaagcaggggagagggagcagtgtaggggccacgccgtcgtcgtctccactgtccagtgtccactcgcatcgcatctggctctctggctggcaggttgtgatctggtcgagtactggatttttagccggttttgctttgctcctgtagcttgctcgctgctgcgctgctttcatgtgcgcaccgttgatcgatcggtggagttactgagagagacgagccgtcttggcatcttgcaggcttgcagctatgggcaaatcgtggagaccatgccggtgtaccgcaggagatggctacttgttgccttgtgcccttgttggcaatggcaatacctggctctgtactgggtctgggactcatcagtctatgattagttctcttccaaaagttaaaatcagcaacttgctcgtttttcatttgcacgtatttcgaacagttaaataacgtgttttgtgtaaaagttttgtatacaattttttaaaagatcgatttaaaccatttttaaatataataattaatacttaattaattatacattaatgatttatttcttttcgaattgctctaccaaaaatctaaaatgctatacatggaatctgcgttggacttcattctactgggcattttttttggtaaggcctatttaccggactattaaaaatattttcgccggactgtaaggcctatttatgaatgagttcagttttgggttcggtttgggcttaccgtgtgcactgggcctcaaagttgtctagtccaataatcaagcccttaattatctggccggggttgtacggttcgtgcggcctaattatcctccctgtgcgtgtgccggtgtgccctcacgtccctcacgtgacacgagtacacgacgacggcccgcgcacgagtaacctatatactctctccatactctctccatactcgtaacgtaaaggaagtcgtttagaacagtgacacggtctccaaaatacaactttgacttcttatatctataaaaatatttattgaaaagtgatatatatttttataaaaatattttttaagacaaatctatacatatattttttacactttcaaactcaacaatttaaaagttatttatgatttatattttaaggtttgacttaaacattgttcttgcaccgaaagaaagctttggcgtcagattcgtcatctgttcatctctacgcaacggcgatgacgatggcggagacagacgccgccgacaaattcgtgctcgtcaccgccgccgccgccgccgacgacgacgaaatcacccacgagccgcgggtgcgcgttcttgccggtggctacagcgagaagtccctcaacgcgaactacttcgccgccgccgccgccgtcgcaagtcggcgcgacgcttttgacaacgacgacgaggtggacgatgctgtcgcgaacgccagcgagggatcgggtgatgcagataacgacgaggaggtggagatggtgcttgtggaggatgagcaagggggaggaggtgatcacaggtggcagcagcatgtcgtcggcgtgctctgctccgttgggctcacggcggccaccgccgccggcctagccctgctgctcggctgcgccgcgcggcggcggtgccgccagaaaccggcggttgctgtcaacttccgggcatccgccgattacaaggtgcagatgagatcatcataccatgaatcgtcaatgaccgtaacaaaactgcgtgcatttgacaatgtcattcgctagcttttcacgtatttttcccccttttttaccgcaggcggcgaaggttgcggcgaggagagacttgcaagctccggcgccggcggtcatctcatttgggggttgcaagacttgcaacgagggctgccatgccttttcgcaatgagagaaaattcgtcgacttgatgcaatcagagtaaagtcgtattgtaggaagcagagactctttcgagcaagtgtaaccaatcaagtttttgaaattcagttcagaacacagagtactccctccgtgctaaaaaaagacaaagcttggtttccgtatccaacgtttgaccgtccgtctttttcgaaaaaattataaaaaaaattaaaaatataagtcatgcataaagtattaatcatattttatcatctaacaacaatgaaaatattaattataaaaaaatttcatataagacggatagtcaaacgttggcacggaaactcagggtttgtctttttttttttaaggacgaagggagtagctcgcaggcagattatcaatgagctcaaaattagtgacaagactaaatcaaacattgtagccggaggttcttcattaacgattcacttgcaaagtcgctcaagtagcctgcattaaggacaacgaattctttttttttttcgatattggaagttgaaagacgcatcatcacatctccggcctttgcacaaatgcacccggggcacatctgcggcaccaataccccaattaaacaacgatataggagtgctactactttaacaacagttttagcaggtagttcttgattttctttttcgaaagatccatttgatgaaagcacaaacatagtgagatgcagtaacaattgctggaaactgaagcagagaaaaaacttcagctgtcaaacaacaaacatgcaaccaccaactaataacatgttagatcgatcatatccacatcctcctgcgcgagatcatccggagtttgtgagccaagaacaaaacggccgtcgaacaagaagcgacatccatgcttgtacctacttggcatcatactcgagcataaatccatcaagccctgcagcttgtcagtccttcgtagggtgtgtgcgtgctcgatgttcttccccaagcttacgaacccgacggtgacggtcacgaacatgctcgacatccgtttgatctgatcgccgtcctccatctcgcaatccgccggcgtcttctcgccttcgaccgtcttcccgccgtacacgacctgacactcgccgtcgcaatacttatcggcgggaaccatggcgtcgtagaaatcgatcaggtcttgcagcttgtccgtcctgtgcatggtgcgggtgacgctagctgcggccaaccctgcccttcatcttgagggtgacgagcatgcttggcttgctgatcgggacgaacgtgatctcgtcgccgtcctccatgtcgtagctcgtcggcatcagctcgccatcgaccttgcggccacggtacacgaaacatggggtggtacagatcgaacaagacgttcagcttctcgatccgacgcatggtacgcgtgaccgtgcgccctttgctgtccttgacggtgagggtgacaggcaagctcatgactctatcggggaagaagctaacctcgtcgccgtcgtccatgtcgtagtccgccggcgtctcatagccggtcaccctcctgccatagtgcatgaaaacaccaacggggcggcagacatggccttgcgcgacggcggccggcaccaccatggcgaggtagaaatcggtcaggtcgcgcagcttgtccgtcctgcgcatcgtgcgggtgatcctgacgccttcgctgtccttcacccggagggtgacgaggacgctcggctcgacctccggcgacgggctgtccgcctcccccctggtcgccgacgacgacatgcccgatcagtgatctcttcctcgtcggaaatggatggatggggcgctgaggctgggattatatatagaatcatcgatcacctagtgcatggtggatttgtatcgtcgcggcggcgcactgggcgtttcgattgctgttccaccgccactacactacgtgagcagaagcatgtggcgcttgagagcaaggtcaatagaagagctaactgctagctccaaaaaagtttcatgtaattaggagttcacttagagctaactcatacaacgaatggctacaagttaagctgcaagctatccttaattaaatcattgaagtatttaatatttgcatgatcacagtaactagtatgatcaatacaaaccatcatctctgtggccattttggtgtgctgcactgattgaccaagacttcgttgccgcagctgtgtggcgtatgaaacagactcacgggatcggctgggaaagcgtgggccccacaaaacgtgttttctatcgtcaagaacggctgcacgcaggcggtaacgcatagaaagagctgctaacgcccggcgctagaacaagcgctcgctcgcttgtttctctctctcttccattctctgccctaaatctaagattaggatggtgtgagaaattttggagcctacttactcatcctattgtaccctgctctgatatgcatcgtagtgatggcacggcgcgtgattgcgtggaatcgatcgaggagggtggttggccggatcaacaagtttcgtgcgtacgtgacacgcagcagtcgatatgatctctcttgatcacgtttgtttgaacat

SEQ ID NO: 5332 - DNA, 25221 bp, Oryza sativa
  unsure (1)..(25221): unsure at all n locations
agtaagaacatagcaatctctaaagatatgaaaattcaatcctgctttggcttgttggatcatggtgtacaggaatatatctctttggcagatgccatggtgagtaaactaggccgcatcagggaagcaaatgtgtagcagattgcacctgatcatcctaacaagagaccctcttttatcatccaaaaaatgtaatcttttctttccaagacaaaaggcaaccctctaaattctcaagctaggaagttacacacagctctggcatatccacagatgacccagatgcatttcagtttcttgcctacatagctatacttcatattattgcatacaaaaagaaccaaagcaatgtacactctatactctatggaatttacacggcaagaaagcatttcaggcatcaacagcatttagggttacagattttgttcttgggagatttgttggcagctgagctcctgtgtagtaactcctagctgtaaacatgagatctggactgctctgtgcatcaacctcacaatgccgggccctttgggctcctggatcggggtgccggctatggtacgctagattaaaaatgtcagggtcctcctcagcgtctctagcgcctgggcttcgctcgcaggtcggtatgcggaaattgtgattcttaccaatatgaaaagactgtaacttgttcagtgaagacttcatcctcctttctccattcaagttgtcaaagtccagagatggatgaatagctctccttagatgtgccattttccgtgctttgtatttggccatctttacttcatgcttcatgtcgaacccttttgcttggaggctagtgtcatactcatagtgccgaggtgagcaagactgttcctggaatgaactaaaacaaaactggtcacgaggacctcttctacccatttgtacaaacccattactgtgtacggcttcctgatctttgacatgttgtgtttggccacctccatcatcagagctgcctccggagtcctgcaaatcggtctgctctccattggcttggaatgttatctcctcaaaccgcccatgtagctctgcacactggcaacctcgagcagcagatgacatgtaggcataaagtgaaccacatgacgatacatttgatccgcagttatggcagtatgtagtgtcttgagattcctctatgcctgggccaggcctccaatctggcaccagtgcactaacctcgccatcaatcatctcagcaattcgagtaacctcatggtcagttatatctagctcggctaccatctcagttgcaacactcaatgcggtatcggcctctatgtcaaaaggaaaatagatgttccgtacatgccctgcaaagtgagaaattagatatcaagaataatacaatttggcatttttttggtgcactgaatttaacccaagaatttaaggaattgaacatttgtgcataccatcattatctgcaatccgtaatctgaggaatatgcttccatcctcactttttctccctttgattgtgatatccacattgccaagaggctcatcttcatgcccattgaacaagtcaataccatcagctttaatgtcatcatcttcacaatcccatctatcttccgttggtgtatcctcgtcaatgctttcagataatccattactcatcatggagacattactataagcgtgttctaaataaggctgccgcagatagttcatcaggctgtaatctccatcacccggacaaaagaccaaatcgtcaacctgcaggaatgggtccttgagcagctctctcgctgagagcctccgggatgcagtggccaggcatttctcgacgaactgcctcaccatcggatctttgaccttgtacaacgcttccggcttagtaccctatcagccaaaccactagctaaaatcagcaaaaaccgtttcgaactagccacacaccagaatcacaaagtgctgcaaacattacaaggatccaggaggcaattcttacagagatcactttcttgtagatctgcaccgggtgcgtgcactcgctatacgggtactcgaaggtgaccatctcaagcacgcacatcccgaacgagtatatgtccaccagctcgttgtactcctcctcgtacacctctggcgccatgaactccggcgtgcctaaccaaacaatcccacacctccaccccaatcaaattcccgtaaaactactgcaaattgggatcacgagcacaatccagtagcactatctagccaatcagagacgccttacctacgcagtggacggcgtgggacttgcggaggatggcggcaaggccaaggtcaccgatcttgacctccccctggttcccattcacgaagatgttgtcacacttcaggtcccggtggatgatgggtggatcatggctatgcaagtacagcaatccactcagaatctgcctgcaccagtgcttcaccgcccatatgttcaccctcatgtgcttctgcctatacctaatcagtaatcaccaccacaccacagcaaatcagatcaatccaagaaccaatcacacacacgcaaaaaaaaaaagaaaaaaaaagattccgtcttttacagttgggcagggttgggcaggaaaaaggaacatccttttgggagattgggctttgaggcgtgcgttagcgttattacagcgtgtggatgaaccgggagagagatttgatttgcttactggcggagggtgccggaggtgaacatctcggtgatgaagttgatgttgcggcgggagacgtcgacccaggaggtgtagaacttcatgatgttgcggtgcttgagcgtcttgaggaggtggatctcgcagtagagccgctccaggtcctctgggctctgcaggaagtcgtgcagcttcacctggttccacgccacctccatcccctggtactcgtcgaacgccctgtacctgcacaccaccacccctcgcgtcaggcgagaagccgccgagcaaaacgaacaagatgaagaacaagaacaagaagaattatcttacacggtcttggacgcgcccttgccaagaacgtcgttgtactgcacagcaaaaagaacggatcagcaatctggtaaaaactcaaaagcaagatagaatcaagaaacggaggctgaaggagatggtgccgtacccgtccgtaccggccggtgggatcgacctcggcgtactccgggaggtcgccggcggcggcggcgttggccttggggcccatcattctagctcctctcaccctgaagctccctgtttcttgccgcgctgtgtgctgctgctgctgctgctaggaaggagagtggatagggactgaggagggagaagaagaggagaggattgatgtagtaggagagagaggcctggtcgaggagatgtgggcacacatggtggtgtggtgtgggcagagagagagatggagatggagagatttgatcgatgtgcacgagatggatcatggaaaaagtcgagataaattttttgggtttttactggtgtttttacctgagattttacatgcctgggatttctcctttttttgtgattattataacgctgacaggagcttgggattcttgatatggtcgttggttagttggtgattattcaattggaggggagggctgggctggctgatcaccctcatgtggtagcaatgacaatcaaattattttcaggctgggattgtcggcgtagcaaaacaagatgcatatatttttgtacgaacgcaagatatgtatggtttgtgttgcaataaacaatttactgttatagcaaggctccttggaataaagtggttttaaggatttttggaagacttcaatcctattaaaaaaaatccccaatgtggtactttggatcaaaggaatagccatccaaaaatcctacaaaatttctttggattggcccaaaacatagaaattttgaaggaattttaacataaggtctaacctcttgaaaaaaaaaatcatttgtgcttattcttctctctttttgattccaacgcttttcccgtgctccatctaaacagtcattcttgtagtttttttttgaactttttcaattcatatggtttgaagtgttaggaccttccaatcttgtatttttcatttacgtattttgaaaatcatatattccaaacgagcccttagaatgctaataactttcacctatgcgaccacacgtatatgcattacaatttttactcgattatatggatttgttttttttccttcaactctgtcccctttagaacaaaggaatttgagaaaaaatttgatagattggatcctatgtaaccatttggaacaaaggaataattgctcaaattcctttaaattcttttagattgtgtcaagtcataggaattatgaaggattatcaacatgaggtgccacctcttgggaaaaaaaatttctgtgtctgtcagtctcgtttgattcctatgtttttttttctactcaatccaaatgatcatttctactgtttctttgtgtttttttctatctgtaggatttaagataacaagacacttgaatttaaaggagccattaagctgatgcgttccaaaggagccattaagctgatgttaaaaggatatttttcatgcattcgtattattttgtgtgtacatgtttttatataattggtcaaaaacacttggaaaaaagtagccagcaaaaattatgatatagttttttaagcaggatgtgcaatttatggcaatttttgtttaaccagaagataaagacaagtgcacccttaaaagtaataatagttttaaagatggaagcaactatgtcatcaatgttgcatttttatcttcttttgtatgaaaggacacctattaataacaaagaaaatctagttgcgaaatcggtcatgaaaacccatagagtataaattattgtgggtcctttcttgttgtccctcttgtcctgtacgtaccaacaaagaaaaaacctgccttgtgctgagttggagagctcacttcatttgtctgcctcttgatttcgaaaccgttctaaatgctatgcttcccccagcaagcacacttgggacatgagggtacatggtggtccattcataaccatacaaatcgatgcaatgtatatgcatctgtaaaggtagttatggcccatgttcaacaattttgatttgtgcttgcctcatttttggtttatacctccttgacggagcgtggggctcctcaccgggagaccgcgcaggcccccctttgccggttcggccgggggcgctaagtgaggttcttcgccctcgatctgaggaacgtcagcgagagaggaaatgcacaagacacgggcgacgtagacaggttcgggccgctgagaagcgtaacaccctactcctgtgttctggtggatctgtgcgtgaaggaatacagagagccggagagcgagagagagttcaggctctagaacccattcgccagagtccccactcccctcctttctcctcctctcctttctttttctaggcctgggcctcctttttatctggtctggggtcaccacatgggcctcctgctgcctaagaagggaaacatgctttttacaatcagggctagtctacagccggaagtgacctctgacaagcagagcacacgcctcctgccccgctcgcccgcttttccggtggacgcccatttcaaccttcatttaatggccagcgacttccttgccatactttcgctgaagcctggaatggatctgaccgggactgacataccaactccaggagttagcatgccggctccggctagggacgagagccaggaagctctcatcattccgacgggacggggcgaggcgtgtgacaggccgcctgttgccacctaacccgcgatctgaccggtctgtgaccggtcacacaccgcgaccggtcacggaccggataagcgtgcgctgcgctgcattaaatgcggcgtggcgcgctcgtccaacctgctataaatgcggttaggtgagccccgtgtgctcacctaacccacacacgtggcgccaaaaccacagggggtcggggcgccccagccctcggggccgaaacgggagcggcccgacccctcggggagacagagggaggggtggccacgtcaccctcgggcccgaccccttccccccccgaggggggcaggccacgtgggtgaccgcggctacccaagcctctatagtcacgatacccccggccccatgtcaccgacagtagcccccggcgttacgccagggcgatcgcccccctcgagggaagcgctcggacgtgacgccactccttaggcccggtgacaggtggggccggtccctacaggcgggcagaaacccagcggtcgcaaatcgcgcgcatcggcaagggaaaaccgaccgacaataatgagcggcctctttaagaccgctacattactcgagcagcgtgcgaatcgggacgagccggttcgtttcgcctggagacatgatgatggcgcatttcacggttggcgggcgtagttaatgcgcgcacgatctgcccatctcaaccgccacggccgcacatctgccgcatgcgccgcaaacgggcgagtggggttagtggaggcgtgggcgcgagaaacgagggggcgaggtagtgggcgcgggaagcgaggagccgggcatagcgttggcaagggtgtaaagacgccgaggaagggattcgtttctttcctctcgccactcttccccttgccttcgccacttgtgctctaactcttcgtttcctgtgccctacccttgccgcactcgctcgctctcaagctcctcctccgccggcgtcatggcacggggctccgcaccgctcgatggtagcgtgctgccgccttcccgcatcgtgagcgagaggcaggccgggctgccgcgccgattcatgccggaatctgccaccggccgggaggtggtcgcgctgggcgagggacgcccggcgccacactacccggggcggtccgtcttcttcctctctttcgcaatggaggggctggtcccgccattctctatttttttcatggatattctggagttttatgatctctagatggcgcacctcacccccaacgcgataatgacgttggccatcttcgtgcacctgtgcgagatgtttatcggggtgcgcccatttctccggctgttccggtggttcttcaccgtacagccggtgtcgccgccgacggcagtcggtggctgctacttccagccgcgggggcaggtgctgaaccgctacattccctgcgtcctccgcaaaaagtgggacgactggaagagcgattggttctacacccccctcgccgacgaagcgcgcctccgacttctgagccagcccccggcgcaggacttcagctggcgggcggcggtagatctgggagacggctacgacgccgttcttgaccgcctggcgggtctgcgatcccaggggctcacgggggccatggtgttcggcgattaccttcgtcgccggatcgcgccactccagcggcgcgcctggggcgcctgggagtacaccgggcccgaggactacatgaggacccaccaggggcgcaaatgggactgggaccctgaggacttcaggatggtggtccaacgggtgctaaatctcagctccgtggaggcatccctcatcccccaaggggtcctccccctctgctgcgatccagagcgcgccaagatcctggccatcatgcaggtggtcggggcgtcgagggagcgggccccccgaggccacgatggcgcgggcgggagccgcaggggggaacaatctaccccgggagggggtcgtgcttctgggccctgcgacgggggccgggggggcagccgccctgccgacgcccgggggaagaggaagcaggagggtacccctcccccatctcctccccgagggggcggggcggtgcatgccagcagcaggcgcccggagggtgccgtgccgacgccgcagccccagggggagcgaaagaagaaacggctccgcaagatggaggggatcgtgccatgccgggggaacctcatctcgcccccgaggtggtcgtttagccgacctccccgcaggttcgtccgcgcgcccaccgcggccgtattcattctcccatctcccaaggcgagttttcactcacccgtttctttttgtcttctggtttttcttctgcctcagcgagatcccgtcgcgcccccccccccgccattccaagtccggccggtctgaggccgaggagacggcgaccgcggaggcccggaggcgggaagctgaccggcgagaagccgcggaccgcctccgggaagccgaggaggctgcccaggaggccgtccgggttcgccaggctgaggaggccgctcgggaggaggccagactccgccgggccggggagtccgtccgggaggcagaggcggcgcgcgcacgctaggcggcctgccaaacccccgacccgactccgcccgaggcgacgatgacttccaaggccacccacgacgaggccgcgggcgcgccgctcgggcccgacccctcgggcgacgcttgggacgagccagcttcgggggacgcccccgagtccggcacgtcgatcggcgggccgagccgcgcggcacccacaccgagggggctctcccctctgccttccgctgccccactgagcgcggagcccctcctgcaggccttggccgccgcgaacagcacggtgctggacgggttaagtgcccagatggaggccctgcaggcggagcgggcggagctcgacgcggcgtgggcgcgcgtcgaggaggggcggcgctcggtggaggccatggtggaggcgggccgcaaggcacactgccggcacgtctcacagctcgaggcccgtcgtagggacctggcggagatcgccagggaggtggaggaggagcgggagactgccctcatcgccaccgccgtgctcgacgaggcgcgggacgacctccgcctccaatacgggagccgggcggcggagctagaggagaagctcgacgccgccgctgcccgggaacggcgggcggcggagaacgaggcggcgtcccggcagcgcgaagaggcccttgaggctcgcgccacggcgctggaggagcgcgcccgcgccctggacgcgaaggagagagacctggcggaccgcgaggtcgccgtcgccacccgggaggcaacactggcggcgcacgaggccgcctgcgccgaagaggagtccgcactccgcctccgcgaggacgcgctcaccgagcgggggcgagctctcgaggaggccgaggccgcggcgcagcggctggcggacagcctgttcctccgcgaggcagcgcgggaggagcaggcgcgccgcaatatggaaagcgcccgcgccgagagggccgcactggatcagcgggccgctgagctcgaggcgcgggcgaaggagctggacgcgagagcgcacagcggcggggcggtcgcgggccacggcgacctagccgcccgcctcgcagccgccgaacacaccatcgccgagctgcagggcgcgctggactcgtccgccggggaggtcgaggccctccgcttggcgagcgaggtagggcccggcatgcttcgggacgccgtctcccgtctagaccgcgccgggcggcaggcgggcctctggggcgggcggtacgcgaagtacgccgccaaccaggggggcctcgcccagcgcctctcagagatggccggggccctcgagcggctccccgaggagctcgaggagacgatgcggacgacagcgacgacgaggccgacgacccgggcgcgtcggagtgagcccccaggcccccgccaatcttaataacttttccttcttcttccgaggccttcgggcccccttcttgtatagactgatttaatctgcaatcaagtaaagaggaaatttctacgtcagttctgtttgttgtgtgtatgagacgaggatggtctgtgccgcggtccttctgtgtcttggcttgaacaagggctcgtgcccaggtcccagcctcaaacggcgcgggtcggggctagtgcctggggagatcctcgtgtcgagactggccaggccgggagcgcggtgaccgagggttatggatgacccgattgtgggcctttgccgattcccccccggagttcaccacgccccggggcacggctcggttctgggccccgtttggcgattttagccggcccgggccaccgagggcagggtcgagcacgagcgtgctaattcaagccaagattcttcaaaagaaaacgatggcacagacacagtcctcaagaaatcgaaaatgcttttattgaaatacggaagagaaaaaaggtaagtatatgcatgtggtagcccccggccaaccctgcacgcccagggggggtgcggggttggcccgagcccgagacatgacacccgacccccactaggggtagaagcgacgaaggtgttcgatgttccacgggttaggcagctctgtgccgtcgcccgtggccagccgaacggagcccggccgggggacgccgatcactcgatacggaccctcccacattggtgagagcttgctcagtccagcacgcgtttggacgcggcgtaggacgaggtcgtcgacgcagagtgatcgggcccggatgtggcgctgatggtagcgccgcaggctctgttggtagcgcgtggctcggagggccgcgcgccgccttcgctcttccaaatagtcgaggtcgtctcggcgaagctgatcttgatcagcctcgcaatacatggtgacccgaggggacctcagggtgagctcagatgggaggaccgcctccgcgccatagacgaggaagaaaggcgtttccccggttgctcggcttggcgtggttaggttcgcccagagcaccgctggcagctcctcgatccacgagtcgccgtgcttcttgaggatgttgaaggtcttggttttgaggcccttgaggatttccgcgttggcgcgctccacttggccattgcttctggggtgggcgggggaggcgaagcagagcttgatgcccatgtcttcgcagtagtcaccgaagagctcactagtgaactgggtgccgttatccgtaatgatacggttaggcaccccaaaccaagcagtgatgcccctgatgaatttaagcgcggagtgcttatcgatcttgatgaccggataagcctcgggccacttagtgaacttgtcgacagcgacatacagatactcgaacccgcccggggcccgcctgaacggacccaggatatcgagcccccagacagcaaacggccacgaaagaggtatggtctgcagggcctgggccggctgatgggtttgcctggcgtggaactggcacgccctgcaccgccggaccaggtcgaccgcatcgttgagagccgtcggccaatagaaaccctggcgaaaggccttgccaaccaaggtgcgtgaggcggagtgggctccgcactcgccttcatggacatcgacgagaagcttgacgccttgttcccgaggaatgcacttcaggaggactctgttagccgcgcgccgatagagggtcccttccaccagcacgtagcgcttggagatgcgccggacgcgttcactcccttcgcggtcctcgggtagagtcttatctgcgaggtacgcctggatctcagtgatccaagcaatcaatctaggggagctgggagcgctcccctcgggtcccgaggcctggactccgacgggcctcgggggccgttcaggcgcgtccgtctcccctagggggtcgggtcgcgccgacggctgggctagcctttcttcaaaggcgtccggtggggtctgggctcgcgaggaagcgagccttgagagttcatcggcgaccgcgttatcccgtctgggcacgtgccgaagctttatcccgtcgaaatggcgctccatacgccgcacctggcgcacgtaagcgtccatctgcgggccagagcactggtactccttacagacctagttaacgactaactgggagtcgcctaacaccaggaggcggcggatccccagtccagctgccactctgagtcccgcaaggagtccctcgtactccgccatattgttggtcgcccgaaagtcgaggcggaccaggtatctgaggacgtctccgcttggcgaggtcaacgtgacccccacaccggcgccctgaagagacagggagccgtcgaactgcatcacccagtacgcggtgtgaggcagctgcgaggggcccgagctggcctcgggggcggagacgggctcgggagctggggtccactccgccacaaagtcggcgagggcctggctcttgatcgcgtggcgtggttcaaagcgcaaatcgaattcagagagttcgattgcccatctcaccacccgtccagtaccctctcggttatgcaagatttggccgagggggtaagacgtaactaccgtgacccgatgcgcctggaaataatggcgcaacttcctcgaagccatcagaatagcgtaaagcatcttctgggcctgagggtatcgggtcttggcgtcccggagggcctcgctaatgaagtagacgggccgctgcacctttcggcggggccgatcctcttcgccaggggccgcatctccagggcgctcttcgtccgagaggccacgcggggcgcactcggcttctgtgccgacgacctcggggtcagagggcgacaggcgcggtcttcccgcagtggccccggagccatcctgggggtcgggggcgcctggcaccgtcggacaagcaggcggagggccagctccggccgtcgggggccttgggccgccgttcggctcgggggcctctcctccctgctctctcccgggtcgagtcgacacagggtgaggacgcgcggagtgagggttgtcctcgtcgcgctccacgaccaacgccgcgctgaccacctgcggggttgccgccaggtagagtagcaacggctcatctggctccggggcgaccaggactgggggagaactgaggtacgccttcaactgagtgaaggcccgctcagcctcctccgtccaggtaaacggcccggagcgtttgaggagcttaaataggggtagtgccttctctcccagcctcgatatgaaccgacttagggcggccatgcagccggtgacgcactgcacatccctaagcttgctgggggggcgcatctgctctatagctcgtatcttctcggggttggcctcgatgcctcgggcagagaccaagaacccgagaagcttgcccgcaggcacgtcgaacacacacttatcggggttcagctttatgcgggccgagcggagactttcgaaagtttccgctagatccgagagtaaggtctcttggttgcgcgtcttcacaaccaagtcatcaacataggcctcaacattgcgtcctatctggctacccaaagaaattcgagtagtacgttgaaaagtaggacctgcattctttaacccgaaaggcattgtcgtataacaataagttcctatgggggtaatgaatgcagttttttcctcatcctccctagccacgcgaatctgatgataaccagagtatgcatccagaaaacacaaaaggtcgcaccccgcggtggagacgacaatctgatctatgcgtggcagggggtaagggtccttaggacatgccttgttaaggtcggtgtagtcgatgcacatccgaagcttgccgttcgccttgggaacgacgaccgggttcgccagccactccggatggatgacctcacgtatgaatccggcctccagaagtcgcgccacctcctcgcggatgaaggcttgacgttccggggcctgccgccgcactttctgccggaccggccttgcgcccggccgcacggcgagacggtgctcaatcacctccctggggaccccgggcatgtccgccggtctccaggcaaagacgtcggcgtttgcccgcaggaaggagacgagcgcgtcttcctatttgtcgtccagaagaccaccgattcgtgtggtcttggacgggccgtcgcccagggcaacctccttgaccgggacctcgtcgcacgtgaccatccgctgccttggggcggccgggacggaggtgctgagcctctcgtcgccacccgcgggcttggacgccgcggcaaggtggtccgcgcgctgctccatacaagcaagcgcgactttgaggtcgccatggacgatgatggggccaccggggcccggcatcttcatctggagataggcgtagtggaccgccgccatgaacttcaccaacgcgggcctccccaggaccgcgttgtagggcagactgaggtccgccacatcgaagtccacccgctccgtgcggaagttggcggaaccaccgaaggtgaccgggaggtcgatatgacccagcggccaggtgtgccccggcgtcacaccgatgatcggctgggatggccggaacaccatccccggggccttgatggcgtcaaaggctgcgggggggggggggaaggatgttgagggctgcacccccgtctatgaggacacgccccaacttcacattgcaaacggtgggggaaaccaccatcgcgatctgtcctccccgggcaacgcacggcgggtggtcggtctggtcgaaggtgagggcaacctccgaccaccgcgcccgccgcgtcgcctcatgggtaggggccgcggccagaagctctcgcttcatggccttgaggctccggcgagaagcgtgagcgcacgctcccccatcgacggtggcgacggtggcctcaggctcctggaaccccaggtcatcgtcgccatcgtcgatgtcctcggcggtggccttctgcttggcctcacctcgccggttgccggcgggagccgccggggtcttgccttcacggcgctcctgcctcttctcctcctcccacttcctcgtccgctcagccaaacttttgaccgcgcggcagtccgcgaggtcgtggagggaggtgttgtgcacggtacaccacttgccggtcgggcgctccctgctgggagcgccggcctccttctttttgtcgctcgcaggcctcccctttcggggggcccgcgaagcgccctcgacggcgaggacatgaccctcgtcatcggaacgggccgaccccttcttcctcctcctgtcccgccgccctgaccgagcggcggacccgggggcggccggagctgccacaccagaaccggaggagttccaggtccaggcctcctccttgcgagccacacggtccgcgagctcaaaaagctgcgcggtggtctggggctccttggaggcgatcttctcgagcatgcggttgtgccgcacgccccccctgaacgcgtagatcaccgcgtgtgcggggatgcacggtatggtgttgcggacttgacagaaccgctgaatgtacgagcgaagagactcatcgtccctttgctgtaccgcatgcaagtccgcttcttcgcctgggcgcggatatatgccctggaagttcgtggtgaactgctggcacaaatcctcccaagagtggaccgacgcgggtggcaagttcattagccaaccccgcgcctgacccttcagggccatggggaagaaattcgccatgaccctgtcgtcacccccggcggcctcgatcccagtcgtgtagatctggagaaactcggcggggttgacgcttccgtcgtatttttcggtgatggtgggccggaaccttgggggccaacggacgttccgaaggctcgccacaaaggctcgacagccggcaccgccaaccggggacacggggggccggcccccgtgcccggaccgaagtggcgctccggacgaggaagcgccctccgttgcgtgggtggcgcgacgagcgtcgcgccggcgctcgatatcgaggcgggcatccggccccccacgcacatcttcttgggttggaggcgttgacgagggaatggcggacgaacggcaggtaaaccgtgcgcgncgcgtcgtgcgncgcgncngnncncttctactcgnctctgncgnactgaacgnntggtagtactcggcggactggcaagcgcctagaaggcctcggctggcggaggaaccgcccgccggcagtctcttaaaggcgctgctgcgccatcatgaccaagtcggccacgtcatccagccaacgtcgggctggagtctctggatcggggacgacgggcgggtgacgcaggagcgcgcccgcagcctggagcgcgccctggggagtgccgccatcgccgtagacgaggcggcgacgcgccccgtctcgccgtcctcccccgtcgcccgcgggcggcgaagtcgcggatccttcgacctccccgagcgcctccccccgcccaagatttcggcgagagggggacggtggggtgcgagcccgacggcgcgggttctgctccccgtcgtcaccgctagcgttcggagagaggctgtgcgccactgccagataggccattgggctgagcgggagaagcttggcgcacacgaaagaggacgagggcttagaaagacacgcgcgccccctacctggcgcgccagatgacggagcgtggggctcctcaccgggagaccgcgcaggcccccctttgctggttcggccgggggcgctaagtgaggttcttcgccctcgatctgaggaacgtcagcgagagaggaaatgcacaagacacgggcgacgtagacaggttcgggccgctgagaagcgtaacaccctactcctgtgttctggtggatctgtgcgtgaaggaatacagagagccggagagcgagacagagttcaggctctagaacccattcgccagagtccccactcccctcctttctcctcctctcctttctttttctaggcctgggcctcctttttatctggtccggggtcaccacatgggcctcctgctgcctaagaagggaaacatgctttttacaatcagggctagtctacagccggaagtgacctctgacaagcagagcacacgcctcctgccccgctcgcccgcttttccggtggacgcccatttcaaccttcatttaatggccagcgacttccttgccatacttgcgctgaagcctggaatggatctgaccgggactgacataccaactccaggagttagcacgccggctccggctagggacgagagccaggaagctctcatcattccgacgggacggggcgaggcgtgtgacaggccgcctgttgccacctaacccgcgatctgaccggtctgtgaccggtcacacaccgcgaccggtcacggaccggataagcgtgcgctgcgctgcattaaatgcggcgtggcgcgctcgtccaacctgctataaatgcggttaggtgagcccgctgggctcacctaacccacacacgtggcgccaaaaccacagggggtcggggtgccccagccctcggggccgaaacaggagcggcccgacccctcggggagacagagggaggggtggccacgtcaccctcgggcccgacccccccccccccccgaggggggcaggccacgtgggtgaccgcggctacccaagcctctagtcacgatacccccggccccatgtcaccgacactcctatacaagctaaacaattcaaatgcaaaatcctttttcttttgagaggaaaaaaaacaatccaaacatactccttttcgttccaaaataaattaatataatacgaaatgtgacatattctaatattgcgaatctggatcggactacgatatgccacatcacgtactagattaacttatttgggacggatagagtatctagttgcgatcacaattaacatttcacatttttttccgccttcccagaggtacctactgactgaacagagtgaaaaatatcacctccatgtatatgatcagaaatctattatgaacctcgataaactaattgtaatgttttccacttggtaaattctgtaagttttttggagtagtaaagacttgctagttatgtttaaattaaaaaataaaatgggaggtccagaccttacaaaggttcagactttagttaacatgaaatggagctaaacaaatcttgtttgcctttccttttgggcagaaaattttatcccttgcgcatgcatgagactatgagaggggcagagagaataactcaaattaaaaaaaatgcagtttataatatttttcctgatcacttgtgagccaagttgccatgttgttccttatccttatgtcctcatgtggcatgcttcagttcctgttcattgcgttttttccagctaaaaaaacgggaaacgcatatgaagccactacatcaataatatatcatgccgtgtaaggattactctcaaaagtttgccttgcattcttcagtccctagtcccttgttaaaataacttcagttccagagtccgttgtcaacacacaacgaaaattgtgcgtcactgttaccatcttttggcgattttttcttttgctgcttatttgatatagagtactccatcgatccctaaaaaccaacctaatatatatgtgatatattataatactacgattagaaatataattttatattcgtaatagtattaaaatatgccacatttaatatagattgattttttatgaggcggagtacgacttctttttttttttcaccgtggaaggttctggacgggggtgatttcttttgtcaatgtgggcggtatactggaagttggaacctagcgctggtaaatgttttgacgcgactcggtgacaacgaggttcagacgtttagtcggtgagaaagttcggaggagaaggaaggctccagccacccggccagaatctcctctactctggtccacaagtccatctcttctctcaactgttcggtgaaaacttgataattgaggtattactattaaattactataacgaaaactaatttgtgaagatatattatactattacaatgatatttctttagcaaataaccatattttgttgcaacgatttacgatcgttgttttattcaatatttttgttgcaataggaaatgagttatcgtcaaaaaaccattagtgttgcaaaaaaaaaacatgttctatcgccaccgttttaatttttgtggtaatttgcataacacatggttgtggtaagttactttttttactattttttgttgccacgatcaataaatttgttccaacaaaaaaatttgttatctcataatttaacttactttttttcatatggacactgattgagacaaattttatataaaaattatagctatcgataaaatctacaattttatatgtgacaattttttcatttgaaatctttagatactcaaatccataattctaatctcagttaggtaggcacaaatggaaatatatgtattttctaacagaattggtacacaggtgaattagtgacaataattatttattgcaacgatgtgaagtgttgcaatacgattttttttgccacatcattttgtgccaatatccaaatttgttaccactaaatataaatcgttacaacaacctattagcactatatttattatcacggataacagcgatttaaaaatggtggtaatatgtatctattgtcatgattttagtattgatgccatatatttttttgtgataaatcaattttctagtgtgtaaggctgtgtttatatagattacaattttccaactttaccttatcgttttttacgtgcatatgctaccaaactgttaagcggtgtattttgtatgaacaaatatataagtttcttaaaaattaaataaatattttagtaatcaacactcgattaactatatgttaatagcttatcttgattcacgtgttgtcgaaaagctcaacgaacgaagccttaagctcgtgaaataatatgggtcattagaacataattaattaagtacttcactattacggagtacaaacttgagagatacatttatttatttacggaactcacaaatataaattcattacataatgtacattgaaaaacatgatgaaatagctcaactaataagctgaatcaaatatagccttaaccatcagcaaagatggaatcagtacagatatacgacaccacgcgaatggcatacgctgattatcgcacgacgtataccagaaggacttgtcgtcaaatggctaggtttattgtgatataatacgtacaccggcccgagtttaaatattagaattggtacgaatgctcatatttacggctaattatttcttcggtaatatgcgatatacgtattgatatcgagatatttgtgatgattttgttaatctcaaaatataatgatccgttttttaaatatgtttataaggataaatgtacgtgtgttttgagcatttacgtttgtaataaggactcccaacctttcaatcaccaacagctcaagaaaacagatcgtggtggcaaattaaaactggcaaggctttagcttttgctgatgcagaactccgctacttccgaacaccatacgccggtgtttaacatcatctgctacagtacccccttatcacttgtagctccagataaccaacccatctttcaccaagcaaaggcaccacaccaccgcaccttttcccccgtcatcaaccgagaaatcctgcaacgcgccgcgcgtgcgcgtgccgtgcgtacgctgcgttggctcgttggctcggcgaaaggctcccggtgggtgccgggccggggcccgatgcgggaggttgccgcgtcaaacgccgggagggcaccggacacgtcgcgtcgcggggccgcctttttttttattttttgcgttgctttttctccccacgcgcacacgatcgagacgtcgcagtcgcggctgttttatttttttttcttcgtcttctcggggtgggtgggtgggcgtgccgcggccgtacgagctttccggatctccgtacggggggcgtgtaccgccacgcgacccgggggtggggggcttggctgtggggtggggcagcgtggccacgaggcccgcatgtgcgctgccccgtcgcgcacgcacccttccccgccccgaaacaccgcgcgcgctgctgcgcccgcgagccgcgctcgtcgtgtcatcgctgcgctgcctcgcgctgtgggggtatcaacatcggcatgcctgaacgacggcctcgtggtaggaccccagccaccggattcgccacgccgggcggacaccagtagccacgcagcagctagtagccgcctagctagctactagctacttggtagcaggactgggccgtcaaatttgaaggctatgtacaaaggtctaagtgaggcttaaattaagtaccaaatataaataaaataatgtatatactgtagaccaaatgcgatatattaaaaatagtacattttttaactcttgttttgtaatcagaaaccatctaactgaaaacggagaatgttcgttgctgttgctggcttgctgcatagtgccttgcttgttggttgctcgctaagttgctatttgccggttgaatgaaaatatgaaattggatgagccggctagcggcctggtgctcggagaagatgagacgtccagactcgagacgaattgagcaagtcaaagatacgaaaagatgagacgtccagactcggggctcggagtcgagaatatgaagcaccacgcacccgaagtcaccgcgcggagacacgcgctgactcaaacgggcttctgacactctagccccacgcgaatacacgagccttctttggttgggatgatttttttaggccctgaaaatttggaggtcctgcacggtcgcacgggccgcacgccgttgtgcacggctctgcatggtagtagtaactagtaagggcttgtttagataaaaaaaattagctaaaaacgttacatcaaatgtttggacacatgcatagagcattaaatatgggaaaagaaaaaaaaacaattacacagtttgcatgtaaattacgagacgaatcttttaagcctaattacgtcataatttgacaatgtgatgctacagtaaacatttactaatgatggattaattaggattaataaattcttatcgcggtttacaggtggaatctataatttgttttgttattagtctatatttaatactttaaatatgcacttaaaaataattttggccaaagaactaagcacggcctatgtcgtaaaataaatcaacgtaggtactattctgattcgctgtattgccagctagcattgttaccaccgttatggacttattatggtaaatttggttaggggcatttgcaaatttgccaccggttttttgaatattgcaaggataccactcgaatgacagttctagtggcatttttgcaattttctagtggcagttttgcaataataattcaaagtagtggtaaatttgcaattgcccctgttcggaagcatcacagccgcatgtcctaagattgattaggcatgcatggaagtactgatttttttttcagcaagctggcaatgacctgctaaaggctgagtttagttccaaacttttttttcaaacttctaacttttctatcacatcaaaactttcttacacatataaacttccaacttttccgcgtcacatcattttaatttcaaccaaaccttcaattttaacgtgaactaaacacacccgaagtttttctttccctaggagtaactcgctggagttgcattggtattccgtacatcagtctaccaacaatcgttaaaatagaagggtgggaaagctgctgaagaaaggaagtaatccagtcttattagaggcaagttgtttatttgcctaaccctagctggtaagaggtaacgcaatcgctagacagatggctgcaagtagacgctctcggctctcactaatttagaaacgaatttcaaagctgactggtccgtccttacgtataatacgtagttgtacacctgaaccgtgttatttgtaatattttaaatagcgggctaaagtatttagcggttagcttctcaaacaactatagcggaagatagtggcagctacatacaatgggagatttaaaaccctaattatttggtggttcataacgcgcaacagtagtcacgaatagtgatagtcagatggtgtcacattctagcaaagcatatttcaacattgttcagcaaataatacaatatactaacaggtcacccgcgctgcttaataatagtaccagctaaatcgtgatggttgatagtacagcctacaacactctgcatatccatagtcaattactaataagtgtcacgacactaatggcatgacaaccatattatgcacttctctatctaattttaaaatttattgcagatgtatacacatgacacggtagttacccacagacaactcatgcacatatgtacgtattccatatgatatgaacacttgggactttacataattcttattcaaaaaatttacgtaattataatttattttgttatgagttgttttattactcatagtactttaagtgtgatttatatcttatacatttgcataaaatttttaaataagacgaatggtcaaacatgtgagaaaaagtcaacggcgtcatctattaaaaaacggagggagtagcaaaataaccatgctttactatggtaaaatcccgcgcttatttgatatatgttattcacttgatcgaaaataaatattagaccattataatatcagaaaatatcatgaattaatttgtatagtgtacaaaaagtagtttttacaatagtataggaaattactccatccgttattccatagagaatgttactgtaagattcaaaattattactctggatactaatataattcctgtcaattacctctctttttttttcttccaacacccaaccactctgccactcctgagttaggagtcataaccttacatcatttaacaagcgaaaatatagtacgtagtatttcttttctcaaaccttaatctctactaaaaaatactccctccggcccaaaataagtgtagttttgcactattcacgtttaacatttgaccgttcgtcttatttgaaaaatttttatgattagtatttttattgctaatagatgataaaacatgaatagtactttatgtgtgactaaatattttttaaattttcacaaatttttcaaataagacggacggtcaaacgttgagcacggatatccacggctgcacttattttgggacggaggtagtatataataacttttctaaaacatatgaagtattttacatgtgcttaaaaaaagtcataaatttatccttagtaaaagcaattctatatcagagtatcggtttcacattctctaccacaatgaataatgatactatcattatagacactgacatgtggggtaataggaaggtaaaactcacattaggggcagagctaaaacgagatgcacggagaaggtgccacttgtttaatttgctctgcttaatttatatcaagtttaaactaatgcgagtgtttaaatttgtattgaagggggtgcacatatggttgaaatagatcaggtatagctacaaatttatcttgattgagttcttgggcaccccctcaatgctctagctccgcccctactcatatactagtgattgtaatggtataagtgatattatgtagaggatcctcaaccccattcaccacgtttttaaacaaaaaaactagtccaagctttctcatccttatccacccatattctcatccacccgatcgctccgcctccgtcgccatccttcttttcgcgggcgccgggtaagcgccttacgcttcgaccatgccggcgtgacgccagcctgtctctttgacgtcgtcgtcgtccccaccatcgccgcttcctcctccaccaccgacgcccacgccgtcagcagtggtgatgacgacgcgcgcaggcgctcgtgccgcttcactcacctctgtctccctctcccctccactcactctctctctctccctccctctctctttctctctcgggagaaggctgagaaggtggagatgaagccggccgagaggaaggggtcgtcatcgtcgtcgtctccggcggccgaggaggatgacgacggcgcggcctgattggcaagatcaccctcaagctccccaagccaggggtgatcggcgtctctctggcttgccgtcttcgtcggtattctcatcggctgggcatggcgcccacgctgggctatcgccgttgtcggggacaacgaacagccgccgccggtcacccctgctctgctccatcgcacgtcgc

SEQ ID NO: 5333 - DNA, 23091 bp, Oryza sativa
ttagacatttcggcttataagttggcttataagcataaacaaagagggcctcagcactccggttattatatcacatttccaggttttaaagattgggtgaaattgacctgatcgcagcgcgagcagctagcgcaaattgttggactcatgacccatccatgcatgattattcagtcagtcagtcagtaggttcccagaattttctccctgcaaacagggacaaaaagcctctccaaatcgatttgctgttcagaaattcagagatcgaattcagacagtcgaatcgacaagcaaacaagctagctgcgccacggcgaagtgatgcaaacaccatgcttcgtgagcctttccactgtttcactctgctcctgctcctcctcgcggctgccgaccgctgcgccgcggccaccggcggcagcggcggcctgcagttcgcgtacgatggcttctcgggcgccaacctcaccctcgacggcgcggccacggtcacggcgagcggcctcctcatgctgaccaacgggtccatccagatgaaaggccacgcgttccacccgtcgccgttcccgctccgcgcggcgaggtccttctcgacgacgttcgtgttcgccatcttcgggcagtacgccgacttcagcagccacggcctggccttcttcgtctccgcgtccgcggacgcgttcgccgccgcgctgcctggccagttcctgggcctcttcaacggcaccggcgccaccaccggcaaccggagcgccgccggcgtcttcgccgtggagttcgacacgcttctcaacgccgagttccacgacctgaacagcaaccacgtcggcgtcgacgtcaacagcctaacgtcggtcaggcccgcgacgccggctactacgatgacgtcaccggccagttccggaacctgaccatgatcagccggaagcccatgcaggcgtgggtggactacgacggcgggagcacggaggtcaccgtggccatggctcccctgggcacggccaggcccaagaagccgctgctgcggaccaacgtcgacctctccgacgtcgcgacgggcgcggcgcacgtcgggttcgcgtcggcgacgggcatcctcttctcgcgccacttcgtgctaggctggagcttcgcggtggacgggccagccccgccgctgaacatctcgtcgctaccgccgttgccgcgggcttggcccaagccgcggtcgaaggtgctggagatcgtgctgcccatagcgtcgacggcgctggtcgccgccgtggccatggcggtgtacgccatggcgaggcggcggctcaggtacgccgagctgcgggaggagtgggagaccgcgtttgggccgcaccgattctcctacaaggacttgttccatgcgaccaagggattcagcgacaagaacctccttggcacgggagggttcgggagcgtgtaccgaggcgtgctccgcaagcccgacatggaggtcgcagtgaagagggtgtcacacgaatcaagacaagggatgaaggagttcgtcgcagaggtcgcgagcatcggtcgcttgcgacaccgcaacctcgtgcaactactcggctattgccgtcgtaaaggtgaacttctcttggtgtacgattacatgccaaaaggtagcctcgacaaatacctttacgatggaagcaagcacccactaagttggcctcagagattccacatcatcagaggagtggcgtctgggctactgtaccttcacgaggattgggaacacgttgtcatccaccgagacgtcaaggcaagcaacgtgctcctcgacgatgagatgaacggtcgactaggcgactttggcctcgcaaggttgtatgatcacggagctgttgcacagacaacacatgtggtcggcactatggggtacctagcccctgagttggggcacaccggcaaggcaaccccatcaaccgacgtgttcgcgttcggcgcattcctcctcgaggtcacctgcggaagaaggccaatcgtgcaggatgagcacggcaaccgtgccgtgcttgtggactgggtgactgagcagtggagcaagggtgcacttgttaacgtggtggacgcgaggattccgagctgttttgatcctgacgaggtttctctggttctaaaacttgggctgctctgctcgcatccattgcccaatgctaggccaacaatgcggcaggtcgctcagtacctcgacggtgatatggccctaccggatttgtcaccgacgtacctaagcttcacttcactagagcggatgtacaaggagttcaaccgcaattccatttcatacatctcatcagcaagcatgggtgccatttctgatatctcgggaggaaggtgacaaaggaagggagctcgtgattttgagaagcagttggtgaggatatgaaaaatcgggtttctcagtttattacttctagtttattttctgaattataatggactgtttagggggctaaaaattcaaaaaaaaaaggcacacatcagatactcccaaagtagggccaaaaatggtgcttgtagcattgcagttaagagtatgttaacggtgtaactagatgctttaactatcttgttctccttgtactatgaaatcgagattcttctgtcttgattatgttcatagtttgatacagcatcgggatgcactaaacagttaagtagcaatcttgaaaagtatcaaaaggtttttttctaaaaaaaaagtaatacctagttttataatagaaagtacataaccaagagtataaaactactcttgatagaaagaaaaactagcgctgctatttttctttggcgaacacgcaaaaagacttgcgcatcaataacacaatatgttattggaaggaagcagattgtttacccaccgctactgactggtagccatcgccgaaggaggaggaggtaacggctgtcgggctattacaactaactagtactgccaatacaaatattcatgcggactcttgcactctacagtaggacttgtcatgattaatcacaagttttacgtgcatctacaaaaatttcctgtcaagagaaagcaaggtgctagttttcatggatgtagtctttaggatctagctaatccgattggtggtgttgtgcagcagctgcttctgtttctttcatgaacttaaatgaacgcatgtgatccatcttcagttcaggccattgaacgcccttcagtacctatcatacaaagactaaacgtataaattgacaagtattaattgaagcggcgccggccaaatgaatttatcaaactatggaccgccatatgacgatagctagaatctcctccacagtgcttgtcaaaatcattcgcaaattgagacgtttgaaaccaagactgatccttgtgaagtagaaacatctcactgtcaggagtcaaaacctcatcttctactacttcgttgaaactagaatagtagcgtagaacaaaggcaccagcatccaaacggcagctagcagagcagtccacaagtccattgattcttcagaaaagttttcttagagagagagagagagagagtcctttgaaacaggtaaaaacaatctctgaataataatctctggtctctttgaccactatattgctcaagtgctactacttctcgatcgatgtgttcgacagaatgcaatttttttgtccagcaacctagaagagtcaccgtcgaaagtacgaaaattaaatcgatctatgcgaaaatcaggacggcgagagagtagtcgtcttaccctgcagggcacggcgcctaccaaggcacacgcctctgaaacttgcagccgccgacgttgatgtttgccgatccagtaatcactattggacaggatgatcaacgcatgcggagtgcagccatcgctagcaagatactccctctgccccctaaaaaaaagacaaacccttaatttctgtgtccaacatttaactgaataagatggacggtcaaacgttggacacgaaaactcagggtttgtctttttttaggacggagggagtatctccgtgaagacagtgttgttgctgactacttgacattgataacaaattcaataatccatccaccaaagtgtactgggttaatggtcgccggccggctgatggttgtctgttcgtgccaaaacatgtccttgtcgatctgaatctttcagctctcatcgctcgacacccaaccactcgatcataagccaagcagtttatgttagccaattgctacaatatccttaagaggcgtcaaggcgaagtgtcacgggaaaaaaaatgggtcgtatgattgccaaattttctgcacacttcgttcttctcctcgtgttcagcttgagcaacgacgtggtggtggcctcggccgccggcggcgatggccagttcacgtaccaggggttcgcggcggcgaaccttaccgtggacggcctcgccaccgtcacggcgagcgggctcctcgtgctcaccaacttcacgtaccaggcgaaagcgcacgcgtttcacccggcgcctctccgcttcctcggcgagtcctccacggcggcggcgggggcgaacgccagcggtggcgccggagccgacgtggcgcggtccttctccacggctttcgtgttcgccatcgtgtccgggtacgacggcctgagcgaccacgggctcgcgttcgtggtcgcgccgacggcgaacctctcggcggcgaacgccgggcagtacctgggcttcctcaacgcgacgaacggcacggcgagcggccaaatcctggccgtcgagctggacaccatcatgaaccccgagttccacgacatcagcagcaaccacgtcggcatcgacgccaacagcctcatgtcgacgcaggcacggccggccggctactacggcgacggcgacggcgccttccgtgagctcaggctgaacagccgccagccgatgcaggtgtgggtggactacgacggccaggccaagcagctcaacgtgacgctgtctcccgtgcaagtgcctaagcccaagaagcctctgctctcccaggccatcgacctctccacggtcatggccgaggagatgtacgtcggcttctcgtcggcgacgggcgtcgtgaacacccaccactacgtgctcggctggagcttcggcttcgacgggccagctcctcccctcgatctctccaagcttccccggctgccacgcttcggtccgaagcctcggtccaaggtcctggacattgtgcttccgctggccaccgcatttctcgtcgctgcggtgctagctgccgtcttcttcgtcgtgcggcggcggcgccgcttcgccgaggtgcgggaagattgggaggatgagtttggtccgcaccggttcgcatacaaggatttgttccgcgcgacggatgggttcaaggatagaaatttgctgggtgttggagggtttgggagagtttacagaggggtgctaccggagtccaatttggagattgcggtgaagagggtttcacatgattcaaggcaaggtataagggagttcgtcgcggaagtggtgagcattggccgacttcgacatcggaatctcgtgcagttactaggctattgccgccgcaagaatgaactcctgttggtgtacgattacatggcgaatggtagtcttgacaagtacttgcatgagagaaatgttacaactctattttggcccgagcggctctggatcatcaaaggcgtcgcatcaggtttgttgtacctacacgaggattgggagcaagtagtcatccatcgagacataaaagcgagcaacgtgctcttagacagtgcaatgaacgggcggctaggtgattttggcctggcaaggctgtacgaccatggcaccgaccccaaaacaacacatgtggttggcaccatgggctacctagcaccagagctcgtccgtacagggaaggcgtcacccttaaccgacgtgttcgcattcggggtgttcttattggaggtgacatgcgggcggaggccgatcgagaccgacgagcacaacaaacgggtggtgctagtcgacttggtgcttgagcaccaccgcaatggctcgatcgttggtgcggcggatccacggctcacggggaagttcgatgtggaggaggtggccctcgttctgaagctgggtttgttgtgttcgcacccgctacccggtgcgaggcccagcatgcggaatgtcatgcaatacctggagcgtggcggtaagtcggctcctgacctatcgccgagctacgtgagctatagcatgatggcgataatgcaaaacgaagggttcgattcattcatcatgtcgggcggcccccggtcggcgacaagcattggcaccgtgtctggtgcatcatctatgactattatgtcggagggaagataaaattcagtgcttgcaataagtcttttgattcctactgactcaagttcttaagtgactttctttcttgttccttgaaatgacaagcatttgaaagaggagatagtagtgtgttaagttacctaccaaattcacagtaggcatttatgtttacactacctattagctatgcttcctcgagcatcttaagatagttgggtagaatggtgagttgcttggctgcttcaaaatttctctgtgaactaactctgcagcctgcttgctttgttcaagaatatggcaacttgttctgggtttatcaacaccagttgcttggaaccaggttattcatttatgcaataaccaaacattctctaaccatcaagatgttatgaaatggaaatttgataacaagaatttaaatgttcgataaagctagaatatgtgtacatttctaaggttgtgtttgatacttggggttgggaacccaactccaccacacgaaaaatagagcggtccattagcgcgtgattaattaaatattagctatttattttttccaaaaaggattaatttgatttttttaaaagcaactttcgtatataaatttttttaaaaaaaacacaccatttagcagtttgaaaagcgtgcgtgcggaaaacgaggcagaggggttagaaaccccctcatccgaacgcagcctaagcatataatggatagatatttctcaggtatacaaggagaaccagagattctggcctactaggtactacaaaacagatattgtagttacagcttacaagctagagactgagggtgtgttgtgatggatgataatggatacaaaatgtatattcatagctctatgatatatactaccaacttaaaagtgtgatgaattttttcttcatctccgtagtggttccggtttagggaaaattggttatatagcatcgaaagtttacatttttggttttatagcaccaaaagataccggttcactttaatagcacccaaaattcattccgttcccatttttaacacttccgtcaattctcgaccgtttttcgttcgccttgatcgctattgacctagccacacacgtgatataacgtatctacccctcacaagtacaagtagaatgcatgtcaatgagggtagaaacatcatatcgtgtgcgtgactgggtcaatagcgatcaaggcggacagaaaacgatcgagaattgacggaagtgttaaaaatgggaactgggtgaactttgagtgctattaaagtgaaccagtatctttgattcttcaagaatgtccttacggatataatgttcattgtttagcccaccaaaaccaacctgacggcctgttgcggcatcaagagaagtgtattagatctagtctttcaatatttaaccttctttatcaatgtggttatttcctcttccaagcgtaacgacgcgctacaagaagaacacgttgcagaaaattgcataccttctttaaattgaagagcttggtgctataaaacaaaaaacgtgaacttttgatgctatataaccaattttgcctttagcttatgctcgattgagatcggtcgtgtcctcgatccccagttagaactacatttacttattattaatatttgatatatttctaaatattgtgtgaaataactcatattaaagttatatatataattgagtataatatgacttatttatattaggcatgattattttaaaaattttagggccccatcgaactagtccactgcctgtgtacatttctgagcgtacaaattatcgaacaaataatataaccccggcagctggtgggctctccactacctgttctaccgcagcaccggccggcaatctggcatcctctcaagcgaatgattatacgaacacgtcaaacaaactcaaaaatctcctggattcatttataagatactacaccataaagctccatcaagcaaagctaaacggcatcataaattacaaggccagcatcgtatgaaacgcaatccaaatcccaagatttaagaaacagattgttggacagaaagaggttgaggatacagacgaatgctagagacagttatccatgaaagagcgccatttggatctttgtagtaagcagcaggccgtccaatatacgatacccagtacctttcactacatggcaatacacgaaacaatgtaaaaatacacttgtatttatacaaaaccatatttatcatcagtctagtacatgtccaccaatcagggggtgcagctccgattagcggctcaagctaaggcagccatggcaaccaagaacggtggttttgttgcgttgctgctgctgctgtcgttcttgctgagctcgccgctgccggcgcgatgcgacgcgccgctccccgtcaatgtctggcccaagccgacgtccatgtcgtgggcggagccccacatggccgtgcgtgtctcgagctcgttccacgtcgtcgccccgtccgggaacgcgcacctcctctcggcggcgcggcgctacgccgcgctgctcctcgccgagcggtaccggcccctcgtgacgccggcggtgaacgtcaccgcgggcggcgccggcgccggcgcggcgggaaggggagccgagctggggtacctgacgctcgccgtgtccgacctgcacgcgccgctgcagcacggcgtggacgagtcgtacgcgctggagatcctccccgccggcgcggcggccacggtgaccgcggccacggcgtggggcgccatgcgcggcctcgagacgttctcgcagctggcgtggtggtgcgggcgggagcgggcggtgctggtggccgccggcgtgcgcgtcgaggaccggccgctgtacccgcaccgcgggctgatgctggacaccgggaggacgtacttccccgtcgccgacatcctccggacgatcgacgccatggcggcgaacaagatgaacgtgttccactggcacatcacggactcccagtcgttccccctcgagctcccctccgagccggcgctcgccgagaagggctcctacggcgacggcatgcgctacaccgtcgacgacgttaagctcattgtcgacttcgccatgaaccgcggcgtccgcgtcgtgccagagatagacacacccggtaagtactccatccctttcatatttcaagtcgctttaatttttctaaaatcaaatgtttcgaaagtttgatcaaacttgtcctatagaaaaatagcaatacttgtaacactaaattagtttcattatgtataactaacattgaacatattttgatagtttgtttgttttgtgttgaaaatatttctataaatttattaggcaacttaaagaagtttgaaaaaaaaattggctcggaagtaggaataaaccttctaattaagttctaggcccagtgctaatacggcccagttaatcccaatttaattacgaggcccaattactttctcactaatcgcttcaggccacacggcgtcgtgggccggagcttaccccgagctggtgtcctgcgccggcgagttctggctgcccgacgcgtctgactggcccagccgacttgccgccgagccgggcgccggccagctcaacccgctggagcccaagacgtaccaggtgatgtccaacgtcatcaacgacgtcacctccctcttcccggacggcttctaccacgccggcgccgacgaggtcacgccggggtgctggaacgccgacccgtccatccagcgctacctcgcccgcggcggcacgctcagccgcctcctcgagaagttcgtcggcgcggcgcacccgctgatcgtgtcccggaaccggacggcggtgtactgggaggacgtgctgctggaccaggcggtgaacgtgaccgcgtcggcgatcccgccggagacgacgatcctgcagacgtggaacaacggcggcaacaacacgaggctgatcgtgcgcgccgggtaccgggccatcgtctcgtcggcgtcgttctactacctcgactgcggccacggcgacttcgccggcaacgactccgcctacgacgacccgaggagcgactacggcaccagcggcgggtcgtggtgcggaccgtacaagacgtggcagcgggtgtacgactacgacgtcgcgggcgggctcaccgccgaggaggccaggctggtggtcggcggggaggtggcgatgtggacggagcaggtggacgcggcggtgctcgacggcagggtgtggccgagggcgtcggcgatggcggaggcgctgtggtcgggcaaccgcgacgccaccggccggaagcgctacgccgaggcgaccgaccggctcaccgactggcggcaccggatggtggggcgaggggtccgcgcggagcccatccagccgctctggtgcaggaaccgcccgggaatgtgtaacttggtccggtgaaccacccggcaaccgacccgtatacgtgcgctcaactatcacagcaactgctaccatatcataacgatgtgttggagttggagaaactaaagtgtgagttctggatttttttttttggttggttttatttatttgtcattgtgcgagaggggagaatacttctgctactgctgctgctgctaccaatttatttgtttttttattttgagtaatgtgaagtggacggcatgttatgttattgtgtaccttgaaagccggcttttatcttatcatggggccggttccgaatttccaacgcattggttgtactgttcgatttgattaaagtagtattatagaggagagtgttgatgcgagctagtagcctgaagaactctttgtgcttagaaggatctgttctatatctgtggctctgtgtcaagtgctcgcttttgcttgtggaaaaaactatcacttgactgctatctgttgatttgtcagtgatatctcgtgcggaaaaatggagctttcttggggtaacatgaatgagatgatcagaatgagatgcttttcatattggagtgtaactgcaaacgacacacccaggacacaatacggacaataggaatgctagcctctgcggcagaactggccatatttgcccacttgcttcttgctcatcgctgcattgccaatcagactatcttatttgacagtgactaggctaggttcttttcagatgttcccctagattttttgcacgcgttatttgctccacacttcttaaaaaaaatacaatttctcaaaaaactttcttctattacattgatgaaaccacccattctaaggtatttgcaaatcttatttctcaaaatattaatttatcatgttaatcaaataaataaccctcgttaataattaagggaaaaagctatcgctaacagtacctagagtttcgatatctagtgacggattgttgtgtttggatcctgcgctccacggccaccagaacatcatgtaattgtagcctgcctcgtcaaaattatcagcgtttagtcttgattcttgacaacatgattatcaacagttatttataagttgtgatgtctgaccaccaacttctagatggaacagacaacagagaattcttaaaggtttcatatattggctagcatggcctatttagtcccaaaaaatgatgccagtttttgggtttgggcgacctatgtgttgctgcctcctattttggattggtgcattggaaagcttacatccatgcgttccaaaaggacagacaagtgagaataaaacatccaaatcctacgattcagcccaaaactttagaaatgaaaaatttcgggaaaaaaggtcaatagccccactagtattagtaatattagaaatgaaatttcaagcatttcagtctttatctcaaaacaacttcttcgaaaagaaatccaggaatttcacagccaaaagaaaaacaaacggaccagagttacagctcaagagtcgagtcaatagccacaagcttgcaacaatcgtactgaggtgtcttagcagtgatgtactgatgtttaacacttcaacaacaatgattgaagtgagccaaagactagaacaacttcaaaacagcacataagagcaatgtcaataatatagtccgctgttggcttcaaaaaatagccaagtcatctacagtaagcagtatagctaatgtttataatagaaatactacaacacgatttttttattttttcgtgggacccaccatcttctcctacctcacactctctttctccctccttctcctggttctttttcgattctacgaaagacggcggcggagcgcgacgggcgtcggagacagcggcggcgcggcggaggcggaagacggcggcggccgctcaacgggcctcggagacagcggcggcggcgccgcgcggcggaggcggaagacggcggcggccgcgcgacgtgcgtcggagacagcggcggcggggccgcgcgacggacgacgaagacagcggtggccgggcggctcctgctccaagacgacgacggctcctagtggccgtcgtattggacaaggacaacatactccgacgatggctatggtgaacgaagtcgtggcgatgaggcttgctgccatggatgcggaaggaacgatgggcgtttgagcatgggcgggcccacactctcgggtcgcgcgtagagcccggcgactaattagtcgcccgcccattctctctccacttccctctctcctccagctcatcgcaaaatctgacatggagcacttgtcgccgattattgtacccgctctaatggttataaggctgcgttcgttcctccatcttcccaacctactcctcctcattttccgcgcgtacgcttcccaaactgttaaacggtacgctttttgcagaaaatttatacacgaaagttgcttttaaaaaatattaatctatttttcaaacaaaatagctaatacttcattaattatgcgctaatgagttgctccgttttacgtgcactgcacaccagttcccaaccactagtatcgaacacagcctaagggcatccacaatgtacactgaaagtaaccttagacattaaatactgctacagtacaacgcatttagcattgtggagtcagaccacaagtccgatgcaaccaaagtacaccttaagcttaaggtgtagcaacaaagctataaaatacaatacctttactgtttttctgtgcacaccaataaaatatacatgtcagttactaaacacagtaacgagtactactagccgttgctgctattccatttgagttgctcatttggtcccctagccgttgtcttcctccagcattcttctgctgcctacaaaaggaggaacaagtgagatgaacaacaatttttgatctattcagtttccccacatactaaatggagcctttcaaaggaaacttctcaaacctcctcaaccaaggttcctcaagccaagcaacaaatagtgaggcccaaaactccctttctacccaatttcccacaagttatccccaaaacttcagacctagttttctccaaaatttccatccttttggtcctccaagcaactaccaaccatatcgacaccctccaatctttcaaggtgctcagcaacaagaatattatgggcaacctactccaggaagcttggaaggttttcaacttcaagaaaatctggtgcactcatttaaccaagcatttggatttgcagccaatagatcacagtttggtatgcaatatagtacttcaattggggctacagccaacacttctttcatggatcagcttctccatgtcatacaagacataatgagaaagaagtagttgaggttgaagaggcaagtgatagcagtgaagaaggaagaagagggacacgcatcaattggactgaagatgacaatatacgactaatgagttcttggttgaacaattcagttgatcccatcaaaggcaatgacaagaaatcagaacaatattggaaggctgtagctagagagttcaacagcaatatgcctagtaatgggaacaaaaggaaccccaagcaatgcagaacacattgggacaatgtcaagagagatgtcactaagttctgtggattttattctaaagctagaactactttcacaagtgggtattctgatgatatgataatggagaaagcctgtgaatggtacaaaaagcacaacaaccaaaaacctttcaccttggagtatatgtggaaagatcttaaagatcaacctaaatggcgtagagtccttgaagagagtagccataataagaggaacaagatttctgaatcaggagcatatacttcatcgtcgaaccaagacacagaggaggaaacagagcgcaaagagaagcgccctgaggggcagaaggcagcaaaacagaggcaaaaaggaaaaggtgcaccatcacctttaggggataagccaagtcaaaatatggttctctttcacgaagctattacaactaaagcagcagcattgctaaaggcagcagaagcaacactgattggagcagaagcaaaaaaagagaaggcgattgcaaaaaaagagaaggcaagggcagaaaaataccaaatgtatttaaaactgatggagaaggatacatcaacctttagtgaagcaaaactgaagagacatgaaaatgtgttggaccaattagctagagaacttgctgaggaataaatgactagcaagcaatgttagcaattatgcttattttataatgtcagtattcttgtcatatattaaaattatgtactgtgttgatgcttgtactgtgaacctatttgtactgtactatgttatggtaatttgtataaatattgtgtattacagctatggaatgaaactacaatatccttagtacttgagaaatcaccttttcacatggatctagttggtgttgatggttttccttccatccatgaccaatctgttttttttctccacctgaatacatatgagcaataattaatagagaacaaaagcaagagggatgttgacaaaacctaggaaaatatagctgttgtaaaagactgacaaaagcaagagctagctgttaggatattgacaaaacccaggaaaatatagctgttgtaaaaatctgacaaatctagtcgttgtaaaatgtatcatctacaaataggtaatgtagttcagcagaacaacacccattctcattttgttcaacttcatctcaacagccttcccactttcaaaaaaaaaaatgtccagcaagtcaccacatcaatctagtgagtcagatgattctagctctagtgactaccttgaagagctgattttggaagaaatcaatgatcctatggaagctgagattgaagatgagattgaagctcaacttcaagctcaaatgcaagcacaacaagctggtcattctaatcgtcgtgggggctacaaacgaaggtacatcaatagagatcaccaagacgaccacaacagattgtttgcaaaatactattctgacaatcctttatataccgatgatcagttccgtagaagatttcgcatgagaaagcatctatttttgcacattgttgaagctcttggcatttggtctccatatttttgtttgcgaagagatgcatttggcaaggttggtctatcaccgttgcaaaaatgcacagctcccatacgcatgttggcatatggtacaccagctgaccttatggatgagacttttggggttgcagaaagcacagcaatggaatgcatgataaattttgttcaaggtgttagacatatatttggtcagcaataccttcgcaagcctaatgaacaagatatccagtgtttacttcaacaaggagaggctcatgggttccctggcatgttgggtagtcttgactgcatgcattgggagtggcaaaattgcccggttgcatggaagggacaattcacacgtggtgattatggtgtacccactatcatgcttgaagcagttgcatctgctgacctatggttttggcatgcatttttcggtgctgctggttcaaacaatgatatcaatgtgttggatcagtcaccattgtttactgcagtgctacaaggaagagctcctagtgttcaatttactgtcaatgggacagaatataacatgggatactatttagctgataatatttatccagagtgggctgcatttgccaaatcaattactagacctcaaagtgacaaggctaaattgtatgcacaacgccaagaatcagcaaggaaagatgtggaacgagcatttggggttttgcaaaaacgttgggccataattcgccacccagcatggctttgggaaagggatgaactagctgatatcatgtatgcatgtattattttgcacaacatgatagttgaggatgagagagacgattatgtcatacctgatgacaacacatatgagcaatcacaatcttctgtacaactagtaggactcgaccatgggccaatccatggatttgcagaggtcctagacgcagacatgaatattcgcgatcgaacaacccatcgacgtctaaagtcagatttgatggagcacatttggcagaaatatggtggtcaacaacaacaaaactagagtttatttgtgttatgaaacttgtgttcttttttccatttttctttcagtcgtccaatttattcttattagtaactgagactctttactttttcatgcactaagagtaatgtaccagtaccattgccttaattagtcaagcacaagtcatattgaaaatatcatgtttttttgtcatttttttttaatttcagatctgttggagcacaactaaacactatgaaaattccatcgggatcgaaatcaacgattcacatgatgcatacgtacaaacagaaaaagaatctgtagtagcagcacttgcacatatttgatgacaaatttaatcgtagcagcagcagcacttgcacaaacagatataaatttaatcaccgggcaaaccaaaagcaagaagagattccacaacacggaaaaggagaggccacggaatcaatcaccttgtctctaacgcagaactcacggacgatgtaggcgaagttgagggcggtgaccgtctagtaggtgctgatggttgagagcagcttcaagtttgtggcgcagacgagacagagaagcacgcgtcggcagcgtcgcggccggagtagttcgcgcatgcagcgtcatcgatgggtgaggccgcgcgcggcaacgtggcaccgaagccacggcacagcgaggtcacagccgaaggaggggaggccgggaggagcagcgacgttggcgcagccacgggaggagcaatcgtcggagaaattggggatccagtgcatgcgctgtgggagaatttggggatcgagcggagcgacgaagagaggaattggggatctgaggcggaggaaatggggatcgaacagagtaacagtggatgaggattttttttcactcgcgcgaacaagcagatggttaggagtgatctgtattctttttctcccgtggggcccagcgggacccaccttatttccatcaaacaagcagtatcattgtagagatttccttaactattgctacctgtagatgggcccactcttgttatgcattttaccatatacattggccttgccctaagaggtttataaaccctaggaaggaaaataactaggctgtcatacttagggttagttcgttttagcaactcgggtaagattttccatagtgccgaaaacatggaagatcattgattaattagctattacaaacttgaagaatgagtttattctatttttttaaaaaaaacttttatatacaatttttttatgaaacgtgccgtttaaccgtttgaaaagagaacgaggaagttgctcaccaaagttgctaaactaaactaagccttaaatatcttaacaatgcgagatggaattgctagcgccagagtttacatgtttctaatgctacacaaataacatgatgagttgatgacatacggtttatatattacttcctctgtcccataatataacaatttagtaccggagaagacacttcatagtacaataaattcggacatgctttttatccagattcattgtattataaagtgtcttatccaatccgagattgctaattataggacggagagagtacaatttatacttaatcgaaataaatatacatgtatttgttacacttgtactactagtactaggagtgcagttactactactgcaggcaaggataagatggggagcagatgaatgatccccgcacataggactcccctccacgctgctccctgtccgccaccctgcagcttaatcatgacgtgggcgagatgtcgcccggccgcctgcctgtacccatcaatgcccaatcatacccccaccaccaggtccaccaccaccaccggcgtcctctccttccatcccacacatccatcacgcggccgcacgcacaccagctcacgctgcctcgcctcatccaacctgtaaaaccccaaaaccctctgagggcaagtattatggtatatgggcatctaatcacaaaacctaagataacacataaaactaaatgatgacatggaagagagaagaaagataagagagaaatagttacctcttatgtaaggggtaacccctacacaaacttcaagaaatatacgagagtgttagggatattggagattgtgtggtagaggcaacatattatacatgttacatcttaatttaattatgtatattatacatgaaattagatgtatagtcacctctatcagagcaaaggttaataatacaggcgacctgttggctataaggttctttgtagccttctcagcctaaccatataatagttagctctttacaattaatatatggcccattttatctattcattaacattaatatgaatgtgggaaatgttagaatgacttacattgtgaaatggagggagtagtttcttgattattgtgtccaaaccgaagtttacagtccgtttcttctctctcttctcttttctctcctctatattagcatttagccatgcttaagcatcgacgacgcggggggcttttaactatttgccactcttacaaatggtgcttaatgatttgccactagacccacatatcatagacacatgagggtccacatgtcattaatagggtgtggcaaatcgttatttgccatgtcataatggcaaatagttaaatttcccacgaagggaacgccgcgaaggggcaggagacgaatcgacgcggaaatccacgggagaataaccaaaagtggccgatgcgacaaggaatcccgcgaaaccggcgcgtgcgagcgagcgagcccaaccgtcccggacccaatccccaaccaggccaaccgaaccaaacccatcgctcgccctcgcgcgagccgcatctcattctccccctccaaaccctacccaaatacgggggattattaaacccaaccgcccccgggtctccctctctctccgcgcctgtgtgttgttgtgtttccacccctctccctccccctccccccacacacgacgccgccgccgccacgcgcgtcacgaaaaccctagccgcctcccccgccgccgccagagaagggggcgcgtatccaatccgatccatccgatggcgtccggggatgaccaggcggccgccgcggcgctcctgggaggggacccggcggcgttcgacgcgctgctctcgacgctgatgtcctcgtcgaacgccgaccgcgccgccgccgaggcggcgttccaccgcctccgggggtcccacccggagccgctcgcgctccgcctcgcctcgtcgctgtcgtcgcccgccacgcccgccgacctccgcgccatggccgccgtcctcctccgcaagctcctctccccgacgccctcctccgacgcgtccagcgccgccgcggcgccggtgtggccccacctctcccccgcggggcaggccgcgctcaagcagcacctcctctcggcgctccagtccgacccgcccaagcccatcgcgaagaaggtatggacgccatatcgagctcgccgcgctcctcctgccggagaacgcgtgggccgagctgctccccttcctgttccgcgcggcgtcgggacccgaggctcccaatctgcaggagtccgcgcttctcatcttcgcgcgcctggcggattacatcgctgaatcgcttctagaccatctgatgacaatccacaacctgctcgcctccgccctggcgcacccgacatctcctgatgtgcgcatcgccgcgttgagcgctgcggttaacctcgtccagtgcttgcccaccaacgctgaccgggataagatgcaggatttgcttcctgcaatgatgagggcgctcacggattgcctaaactctggtcaggaggcctctgcacaggaggcgctggagctgcttgtggaactggctggtgcagagccaaggttcctgcggcggcagattgcagatgttgtaggtgcaatgctgcagatagctgaggctgcacagctggaggatgggactaggcacctcgctgtagagtttgtgattactctcgctgaggccagggagcgtgcaccaggaatgatgcgtcgcctcccgcagtttgttggcaggttatttgcagtgctcatgcagatgttgcttgatgtcgaggatgatcctgcttggcacactgcagagacagaggatgaagatgcgggtgaaggaaataactatggagtagcacaggagtgccttgaccgtctagccattgctattggtgggaatgcaattgtgccaattgcatctgagctgctcccgcagtacctttccgctcctgagtggcagaagcaccatgctgcactaatcacacttgcacagattgcagaaggatgtgcgaaggttagctaaataagttcatgcttattgtgactactatgcaatagaatcactacaaaaaccagttgaaaagctgaaggtattttattttgctgcactgggtaaaataaaatatacaatagctcgtttaattaggtaattcgaatcggtgtgatgtgataatgaatcaattgccttcattgatttctcatgttcaagtgattataaacactgaattttaggtgcacaagagcttttggcgagtattaagacacaaaaatgctacccattgtttcattcatttgcaagaagcagccaaaatagctatttactcaactgtttgttctttgcaggtgatgcttaaaaatctggagcaggttgtttcgatgattttgaatggatttcaacatcctcatgcacgtgtgcgttgggctgcaatcaatgcaattggtcagctatctactgatttgggtccagacttgcaagttaattatcaccagcaggtgctgcctgcattggcaaacgccatggatgattttcagaatccacgggtgcaagtgagtgttcaaatattagtgctagacttgatctagcacacccttttacacatgttctttgctttatttataacatcttttgtggcctacaatgttcataaggacaacgcttattgactcacttacctgttagactttatgaagaaaatgcttcaaagtagatagtgggctttacataaaagataatgctccattgatctacttagacatctaggagtgttcttcaattagttaaattattttatctatccatgttctagttgggctaagtttactttcgtggggttagatgaacatcaacacgaactatccctgtctttcagattttgtttctatccttgttaaataagataatttggcattatattcaaaaaatatgtaacacgtcaatggcatgaagtatgatttataaacacattaattcaggttttttaatgaacttttgttccatatacaattttcaagtgttactttttgatatacagttttcaaggttttggcagttttggggtgcctattatacatacaaacttaacctacttttattatgcttattaggaaataatatgtctggctgtgttactatcattcacaggcacatgctgcatcagctatcttgaatttcagtgagaattgcacgcctgaaattctgacaccttacctggatggaattgttaccaaattacttgttcttcttcaggtatccacctccctcaccagttaaatatattttattgtcttttagtgttatttttttgaactagtagaacatgtgctaatatattgtacttatgctttagaacggcaagcaaatggtgcaagagggagcattgacagctttagcatcagtagctgattcatcgcaggtaatttgtccatgtataagttagcttaatttcttatagggggagggggacgcaacattaccttttatacttatcttgatggttaatgagagtttataatattgtgttaaattttggtgtacttgtcttgcaggagcacttcaaaaaatactatgatgcagtgatgccatacctgaaagctattttaatgaatgcaactgataagtccaataggatgcttcgtgccaagtctatggagtgtataagtctggtcggaatggctgtaggcaaggataagttcagggatgacgcaaagcaggtaattgtgtcttctccactgtaattttgttctgtatgctatgttctatgcatgcacttttctaatctacacattgattgataggtcatggaagtacttatgagtttgcaaggaactacaatggaaaatgatgatccaataacaagctacatgcttcaggtacacataaaacctattatgaattaatcataataaaattcagatcctttgtaa

SEQ ID NO: 5334 - DNA, 15034 bp, Oryza sativa
agaggttgtaagtgaaatggtgatattgttgtcagtttgagctgaacagatgctgcgccagttttggtaatgaagttatcatatttttgtggatgcttccctgcagtttttaataattattgctctctatttgtgctgagcatgtttcttcgctgatgaataccgtgccaaatattttacaccacagggtggcatttttttcgctttgtcttcatacgactgggtatcaaggaatctgtggtcgatcgagcgaaagattcgcaaggaatcttgaaagctgcgttcatcattaaccaagcatgaattgccctaacgatgctgtttgtcatccactaacgatactgtttatcacccaagatgctgcatcctgcaggtaatcctctccagctaacttgaggtattttgctgcaggaaatgcttcccagctaactgaggtatttctgagacgttttctttgcgtatgtcgcaacttcaaaacggtcctcgttttgagttttcctcagctaatcagaaaacaatagtgcaagttgcatatgcaatttatgcatgcgtcaacaggttggaatcagccaaaacaaaatactcaaaaggtatctttcagataatcttttcctgtatcaaggcttgacatcagaagttgaatttgaattagtcatgagaggattagctcctaaattataactggaacatctccatcatttccaagctcatggcggctcccagtacaagacaaatctcgaagactggaatgagcttaaacaagagctgagaagatgctcactcttgacctctcctgctgccccaaaaagcgttcttttgtcttttgcttgaggagatatagtccatcaggctcgacaagaaattgcacattgacagcgacaaatatggcatctgctacgctaaagaaaacacaagttcattgggaagaacctcttggagtcatcccgagtagaaaacaacaaaacatccatgagtgctctagcagtgtagcctattgctcatttgaacaagcaagcacaagattgaaaactgtaggcacggcaggtgatgacaatttgacaaaactcgcctttttgatagctgaggttggcatggcttttaaaattgagaggactaacatgccgctccatcacgcttaccttttctcaggtgatgatgaatgaaatgcctagcggcaaccaacatttacacaattttattaatcctctctagagtgtctttccgttcttgggttcaaaagaaaagacttgttctgtttaagtagtagtggtgtcgcttttgctttcaagattatcattattattgttttgataacttcgcttccaaggttagagaaagcttctaacatcacggttgctttagcttttgagtgattttacagtcattgagtaagtttttttagataatggaaaaaagctttacattttcagcctctatactatgtgcatacatactacttcggataaagtaagaaacataataatagggaaaaaaattaagtcccccctctcataaatctaaggaaaagaccagcataaccttctactagtgtgtcatctcaagagttgaaatagaaatagttcgttggtgaccgactccaagtgtgtagctctgatcataaatgcatgctgaattgctgatcctaaagtaagtaccactatatatatcaagacttgctaaattttacataaaaataagatacctctcggttccttattcctttgtagatactcaaaagttagctttcgaactagagaccttttacggtgtttgcgaggtacttagaggtacctagaggtgaaacaacgtgtaccattgatcaagagaggggcaaggtatggaacaaaattactgtaacattatagcagtggagtaattaactagtaaaacatgggcattatacgtgaattgaatacttacaccaatctatcagtaaatcgttgtgcagatcggtataccatgaggaaaaaaaaagtaaatcacagatacgctgttgatttagcaacgaattgttctgtatcaaaataaacagaaagatcgcatctcctttcttctctcccttcgcttcgttcttgatttagggtttgaacggttccccagaaggagacagaggaaaaagcgtctgcatggttgagggatgaagaggagatgagatcgcccggtcgacgactaggcgcaagctagcgcatctataagttatcctatgtttatttacacaattgattagttatttatgtagctcataaatttcttatataagggactggaatttttgtgggatagtaaacgagatctactcctctggtgttcttctagtgtttgaacgggtgcatctagtgtttgaacgggtgcacccacaaggagatacggtcgaggaagaagatctggcatggtcgagcgtttgaacaggaggcaagatctgattgacatgtatgggttacaagaacacaatgtaaatctagagaaaaccacgtaaaaaagaacatcaaagaacagagtaactctagataaaatgatgcgacttaagaacctgtaacgctggtgccaactaaatgacttaactcagatacaacgtaaatttagaggaaaccatacaaaagagaaaatacgcaaataagaacctataaagctggtaccggagaaatgttaactcatacggtagtacctacgcagtactgattctaatttgggagataattctaccctttttctgtactagtaaaattatatttttatccttagtacttaagtatctataccaatacttaaataccttttacatgatacctgtgattgagtagcgttggatctatacctttttttggaatgcaaacatcgtaaaagttctcttcgaactattgttcccgtaagctctagaagtacagaagtactggttttcgtagttcgtacagatatagtactaaaaacacactgggacggctgctgtcacagttttccttaatccttatgtctgtagaaaagatgctccggaaattgaaaggtatccaacattgaactagcagagaacgactgcctcatccagtgaaggagaaagacttggctgatggggaagttgtcaaatgacctgacaatacaaaaacacaagttgagcggcgttgatgaaaagttgatgtttagtagtttgtattttcattgtttgtaatcattctctcaaattctgccaaatggcacattttcatgcaatggaagacttggtctcatgttagtggttttggttagattaattgattaaatacatacccaccaattagggaagaactagtctaactagtggcccaaatgcttcagttaagctaatgctttccggtttagaccttgtaaaagaacattaagaaatgcaaactccttgacttttgcttccaggttaatttgggagcatgttcgttctaattcctattgattaccataacttattgctcgcatgcatgtaaagtttaggagatactgggaaaaaaactggccatattgactaaaagcaaaaataaatatactttttatattttcaaataattgactaaactcggtagagatatcttcagatatattggataagttcatccaatcactgaacagatcaaatgaatcatgatattatcttaaagaatcagaatcacagaaaatacaaaggtcaaatttagtggtgatgcactacaagcctacaagcatcccaaattgttgattcaattacagagacagggaggccactacctttgccatagtttctgacagacaatacatgaaacagaacaaattgacaagacaaaaacatcccaacaaaatttgccttatgttactatgtgcaaatacatacttcattttccatggacacacagtaacatacaaaaatgacaggatcatatgattgataataattcataagtagacaggccatgatttgattaaacccattttttagataatgtataaaatcgaacatttgcttcaacagaaactacaacataatttgaccaaacctggaagactgaaactgatactctgaaagtaaccccacaggggcactaccattggcatgatgcccttacaatatttctcacaaatcctctataaattctcacctttgccaaatgccaaccatcaagccatcaagcagagagcaagcagttggcacacagacacctgtgtctcctaccctaactctctcaaaccaaaacatcaaaaaaaccaagaaaaaagcacaagctcacacacaaacacatggagctcaacttccaagtgcaacctccagtgttccagctgcaagactactgctactactacagccaagaggtggcggcggcggcgtcgccggcggcgaagccgacgaagccgcgggggaggaagaagggcagcacgagccacagcaagttcgtcggcgtccggcagcggccgtcggggcggtgggtggcggagatcaaggacacgacgcagaagatccgcatgtggctcggcaccttcgagaccgccgacgccgccgcgcgcgcctacgacgaggccgcgcgcctcctccgcggcgccgaggcgcgcaccaacttcgcgccacgcatctcgccggactgcccgctcgccgtccgcatccgcggaatcctccaccacaagaagctcaagaaggccaggtccgccgccgcggccacggccggctcccccggcgccgcatccaagaagaggtccaccacggcggcggcggcggcggccactccgacgatcacaaccacaagcaatagcaatagcgatggtgcgggtagtgcttgtggtggctcgagcagcagcagcagcagcacggacagctgcgacggcgccgtgaagcaaggcggcggcggcggcggcgcaccaacggacgccagcgaggtgtaccggccggacttcgtccacgcgggcgccgaggagttcgattcttggatgttcgacacggcgttcggcccgttcccagagctggacagcttcgccgccgtcgacgccgtcacgccaccgccagcaacggcgtcgccggaggagtcaagcgccggcacgccgccggtcgagatggcggagttcgagcggataaaggtggagcggcggatctcggcgtccctgtacgccatgaacggcctgcaggagtacttcgacaaggtgttcgacgcgtccgcctgcgacccgttctgggatttctcgccactgtgccattagcgcgtgtgtgtctcacctccggccgccgtcgccgccggcggcagccggcgtatgtgcttccttcgccgactcgccgtcgtcgttcttgctcttttgttgcctcctggatcagctgtacccatgcatgtccatgtaagctcaattggttttttgctgcagccaggcagtgcagtttcaaagaggaagatgattctacttgtttcgagttggacaattggttattttttctgtgcaatttgctttagtttttcacttcaggatagattagagattctatgcagtaagttcaagtcgtttgttatgtatgtaaaaccaaattcagatgtagagtagttcatatatatgttcaagtgtttgagattggattctgatgagcaaaatggcaagctctaatcttttccatgagcatggattttaagtgcaatgcagataataaatactgttgcattgctataaaaaaaaccctgaaacttgtgcaagtttattgtgcactgacaagttaaaacatttgaaatattttaccgcccacaaaaataaaagggccgatttgaaaggttttccctatcaaaatttttacaagaactaaaatgcaccggtagtttctcgtttgaaatccgaccaaatcttttggctgttcctgaaattctataaccaatatcttcaattccaactggggggaaattactgataaattatgaggtcagtccaaaagttcagtttaacctgaattattaacgatttatctgcaacttgcagctccaaatggctgagctccacgagagcagaagaaatactgctgttgcttacgacactggaacatacaaacgcacgcaccatgacaagaagaggagagattttctattgcaatggtcaggaaaaggccacagaactccgggacgagcctaatatattcagtaaagaatgcaaagcaggtgagaactgaaaagagcaggtgacaacctcatcttaggaaaaagaaaaggtgctcagctactaataaacttgctcagatatgactcgaatcaattgttagttatttgaagcatttccgtttgttttgcttttgatttatatccttcgacaagacgggactcgaaagacagaatcagggtttgcaaatgcaatcggacaatcggtagtcgaaaactgctccatactggtttcgtcgataaccatgataaccaaacggttactggcaagaatcagacaaattttatcaataatttaattctcgctttgggttttattgaaattgtaggcttaccaagcaatttctaaatctaaacaggtcaaataagactagtaaccatgataaccaaacaattatcgtcgcattttggaagtgcgcacgtttcctaaattgctaaacggtgtattttttaaaacttttctataagaaagttgctttaagaaatcatataatttatttttcaagttttctttaactaatacttaattaatcatgtgttaatctaccactccattctaagtgttgaggggaaaaggttccttacacgcttacacgcttgttcggtacagaaaactccatgttgaacagttctaaaatgtctccagcctcctgttttgggtgaagagagcaggacaaagaattagctgcttcagccttcaaccaccgcaagtttgagcctttgatttgaatatttgatccgccgtgtcagccagtaatctcggttgctgcgtgcgtacgcgcgggaaatagccggccgaatgtttgcggcccagcccagaatgttctcatttcgactcgtgggccgtggcttggacacgtggttaggcggcccaaagaacacgtagatatatatgactttgggcttgggccatgacgcactgcctgcctgccgagtggcgactcgcgagggaaaaagatagttataattaactgtcaaaaccaaaaatactccatccgttctaggaggttgttttctttggacttattccatccgtcctataaaaaaaccaatctaatactggatcaggactacctatatatttatcgataaattttcttctgaaaatttgacaaatgtaattatagtacaatcgtagtataattgcactgtaacttgcatgtaactacagtgtaacttgtatgtaagtttccgtaattttgaattgttagatctattataagatttgttttggcgaagaagaaaaaaaatcacaacacacacatatgtgaaaggatttgttcccgcgatctctattttaccgaaataacatgttacgaagagatttttgaaagttatatacaagttatattatagctacagtgtaattacatgcaagttacagtgtaattacactacgattgtactgtaattacatctgtcaaatttttggaggaaaatttgtcgacaaatatatagcaaaattgcatcctaatacaacaagtttagacatacatctgtccagattcgttgtactagaatgtgttatatctagtcctagatttaaatttttttaggactaagggagtactaactatcagaacaatactgaaaatggtattcgcgacgtgatagcccggtcatagaaaaattaaaaatataaagtgaggcccatctgtcatcctacactatttctctccttccttctctaccggacttccgcggcgccgcaaaagtacgaaggcaatgagtagcggatgtacgcgtgcgccgtcactggcctctacatcctccaaccactccgtcggcttccacggcaacggtgaccaccgaccaccgcctcccgcttcatgcccaagtacccaatctggagactggagccactggacctcaggctcatctgtgacgaggagccagtcgagagagttggagtccgggagagcccccatgagaaggtattcgagcggctaagccgggatggtgccatctccaccgtcgccgccaccgtcaccgtcaccgtcaccgccgctgccagtgttagcctcgacgttgcctgggtgtccgacctcatcaactgaggctgtatgtctgatgtcactattggagcagctccaatgtgtgcagaaatcgaactgagtatatcggagacagcacactgggagagtcgattgttgtgtgtcagatagcaaaatcgatctccaaaattgagttagtgttagacaattaaagtattatttgttgctgatggggttgaacatattcgagcccaatcaaataatttacattttccccttaacttttcttgctgtatgtgagtcctataaatcgatgtgcacactgcagccaccgaaccaaagttgcattcgttgttcacgaactacagtaatcgaacatacactggagctgcccttggaagctccttttgaagtagtactaaatagcaaggattgtcatggaaaagtggcggtaagaaggtgagtatgaataaaatcgtttcagacctacggaaaaacggtacggctaaaaaaaatgatctccatcaccgtcctttaatgaaatagttaaacccatgctcgttcccggagacgaaagtgaggagacacagttaatctactttaggttcgcatcacccaccgataattcacctcacttgatcctatgacagctaaactacacagcgacaatggctaagcataattggtaccatgtgatcgtgactacagaaaaacgggaacaggccggccttgggaggcttgaatatgtgacaacctgtttcaggtatctcgaggctactacctgaccaaccaaagtcccgtactcccgtcccaaccagcagatatccactggcgctgcggtgcaccagccagccgccagatcgcttggttccaatcttctgtagtgcagatcaaggacaccctattaaacatgtaacggtgatacaggcatatggagacaccacattgggacaaagggaataccaccagctatcttcctgcatttgcttgctaattaccccttgaaccgagctcagattggtcctgtgaacgtatggatccaagttgctgatctctttactcgagctcagatttgtagctcagagtatcagatatttaggacctagaagcagtagatgctgccatccttgtgtttcttcagcatctcatgtttcacaattcacatgcaactaaggagtaaacgcgcagagagattaatagaagaaagcatccatagctccattggaccatgcatagagagcatacagttttgcaattcagctcagaatggcatatgtaccaagcttgggggggagtagcaagcaatgcacagcaaaatgggaagatatgaacaatcatggccaacgaggggctaacaacagtttagcacagtacaaaaagtaaacacacataacaggaatatgcaatgcaacggaaccggagtatactgacaaaccaatcattaaccagagaactacttattaaccagctactaatagtcttctccatcgtcgttctcgtcgtctgcaccctcggcgccgacttcctcatagtccttctcaagggcagccaagtcctcacgggcttctgagaattcaccttcttccattccctcaccaacgtaccagtgcacaaacgcacgcttagcatacatcaagtcgaacttgtggtcgatgcgcgagaaaacctcagcaacagcagtgttgttgctgatcatgcacactgcacgctgaaccttagccaggtcaccaccagggacaacagagggtggctggtagttgatgccacacttgaatccagtagggcacctttgtggaggaagagaagcaataaacagttggttagccaatcaggtgttgataaacaagtggataggttgcctgtgattaaaataagcgcaactaaaatagtgatgaagacagcttaccagtcaacaaactggacagttctcttcgtcttgatggttgcaactgcggcattgacgtccttgggaacaacatcaccacggtacatcaagcagcaagccatgtatttcccgtgcctagggtcacacttagccatcatgcttgagggctcaaaaacagcattggtgatttcaggcacagaaagctgctcatggtaagccttctcagcagagataacaggggcataggatgaaagcatgaaatggatgcgagggtatgggacaaggttggtctggaactcagtgacatccacattgatagcgccatcaaacctcagagaggtggtgagtgaagatatgatctgtgagatgagcctgttcaagttggtgtaggttggcctctcgatgtcaagggatctccggcatatgtcatagatagcctcattgtctaggagaactgccacatcagtgtgctcaagcaaggagtgggtggagaggacactgttgtatggttctacaacagctgttgagacctgcaaaccagagtggcataagacgagaagataatgatatgatgaactttaaataattgtacaacaactctacccaaattgtccccacaacagctaagacaaagcaaacccactcatcacatgaacaagctgaaaggcccacatcacatggaaagttggtacagtacactaggataatgctggctcatacaatgcatggtattacagacttcgcgaagaagactaatagtccataaaagttcactaaagagtctacataagatagggatattgtatagccatataggtagatccccaccagccaggcagccaggccagcagtttattagtccacatactaattagagaatggttggcagatccaataatcaatatattgccatgcacaactcacaacaacaagaaaaagaagtggctgataacatggcccatatctaagcaggtgtccaaataaattaattctacaccagcctgaaaatttcaagtttctggtatagagcattttatttaattttttccctcagagtacaactaacatggatcagattaagttatacctggggggaagggtaaattgtgaagccaagcttggacttctttccataatcaacagagagacgctccaacagaagagaaccaagtcctgatccagttccaccaccaacagcattgaacaccaagaatccctgcagcccagtgcagttgtctgccaacttgcgcacacggtccaggcatagatctacgatctcctttccaactgcattccacaaacaatgagaacaagacacatgcacagttgcaatagaataacacttgtatgaactctaagctgaattaccagtgtaatggccacgggcaaagttgttagcggcatcctccttcccagagatgagctgctcagggtggaagagctgacggtacgacccagtgcgcacctcgtcgatgacagtgggctccaggtcgacaaagatggccctgggcacatgcttgccagcgcccgtctcgctgaagaaagtgttgaacgcatcgtgtgcgacgccaaccgttgtatcactgcaccaagagcaaacagcacaatgtttagaaatcaaaactgactgataattctaatcattagcctatgcagtaccaaataaattacagtctaccagagctgcctacaaaaagcgggctacatccatgataatataatggaatctaattctcaggcaaggcagcatgagcacaattgtttatgattcaataatctactcaattcttacaccaagcaaagtaaaaccaacaaaacaaatcctcctcgatagtggaggatgccgcttttaatagtaacccagattaaactctccaatctaggacgatctacgtgctcagtctgacactcagagcttccatgtgacattatttactaagcatcaccccacaagtaaattcgcagatctagaaccgtaaagaactctggaaactcccaattgccaacttgtaaacatgcaaccagcacgcaaatctacagtctactccggagaaaatcaaacgcattcctccatataattccaaacggtaaaaaaaagagcgtaaaaactacggctaaaattcccttcctccgagacgcacggtgttcgtcctgtcccttgcaatcccctcaccaaccggcaaggagatgcaccaaccaccaagaaggttcggccaaaaccaatccgcagagtccaaacgagaagtacaagcggaaggctgcacccatcgttcgctccgccgaagcaaacaatttccccccaaaaaaaacacatacacacaaaaaaaaacagacggcgaaacaaatctggcatttcggacgcaactcaaccggggctaccagatcaaacgaagccggggaacgcggggccgcctcccgagatcaggaacaggaatgcatctacggatcaaagaagaagaggttgggggagggggaggggggattcatcgtcacctgggcatggtgccatcgggctcgatgccgtgctcgaggcagtagagctcccagcacgcgttgccgacctggatcccggcctggccgatgtggatgctgatgatctctctcatcttctcctccctcctcctcctcctctcctctcctctcctctcctcgcctcgcctctcggttggtttccttcctttggtctagactagagaagcggcctctctctctctctctttctctctctcttctttccaaaatgtgagagatcgggagataaaagggcggaggagagagaaagagagagggggagggtgggaggagtggtggaccgggaccacggcccgtgggctgggctgggctggctgagcggtttgcttttttacgtggaccggcgctctctggacccggttcacggtgagccctcgtgagcgaaacggccatggacgctcttgccaggctgccacatgaacttgacgtttggagtaacggcaaatggagccgccgttttttgtcaccttcttttgcgatttaaagaagtttccataaattgttttaagcaggtgtcatggctataaatgtaaacatgcttttgaaaattatatagggcatgtacagtttattatcataccaatcacatcccaccatgccataaaacatatttaagaaagtaacgaactaaacagcacctgaatttttttaccttgccaattcctgggtattaccaaattgtgctgaaatttactaattgttagaatttggtagcgttgaaaatgatagtaaaatgaacatgccaaatagactacacggttgattagttttttttagaaatttcaccggggggagagcttccccacctgaatttcattaagcaaaataggggggaggtacagtcattacatattgtgagaccttacagcggaggataggagagacttccaggcataaacaaccggcctatcgtctctacgaatacgctcggcccatagagaagcatcttcaatacatttcttaactacacggggaaaagaaacagagagagaacggaatacaacatcatgacgatgattccacagaccccataagcaaagaatgtaaaaaatttggaaatgctgctgaggtagacggcttggagggcggagggctgaaatatcttgcactgaagcgacggcaggggtgacatcaatggacccccaaaaatgttgagcaaactgacagccaaataacagatgcatcgttgtttcatccgcagcatcacagagggcgcatcgcggggattgaacaatctgcttcttgtgagccttagtagggaggcgttctttgatgaggagccagagaaagaattggactcggggaggggcacggttgtgccaaatgaatttccaatggcggcattcatcagtcagggcttgggagtctgagtaaattatcttggttgtgagaattccggttatagctaaacactatgcgtgcgcttgaaaacgtaaagtacacaaataggaaaacgatggactcactgggatcaatttcgatactaccagcaagctagcactacagtgtaggctagccaaccctagataatgtgttgggaatatgcctttaatattttacatgtgttggcatatatttttctgagtgaacagctctttaatattccttaccaaataaaggaaaaccatactccttcatagaaagtttaatgtttattatctccttcagaaaacaatgcacatcagagatgcgatcttggtatatttttgggctttgcttcatgtaccacattttcttctccttaggcttaggacatgtgaccaagataatcaaagataattttacgaatagacttttgtacatccatcctaggctgcgctctattctattcggtgtattttacaaagagtttcaatatataagtttctttttaaaacataaaataaatatattttatttttttaatagttaataatcatttaatcatgtgttaataacacgtcttattttgtgtgcaacaaaaaaaacaaaacctaacaaataaatcgaactaagcccttacggtctgttataaaatgagatggatcattagtgaatgattaattaactagtattaattattacaagctaaataatatatttattttatttttgagataaacttttatatataacttttttacaaaacgcaccatttaataattttcaataggtgctaacgaacaacgaggaagtgaatgtttagagttgttcaaaataaatcagccttaggctacattctactatttaacttttggctttagctactttatcgtttgagtaaacacacattccggactattaataatgtgttggttgcaaaaaaatcctatataaaagtttttttaacaagtcaaataaattcatttttcaagtactataatgttttatacttgattaattatacgctaatgatatgttttgtttcacgtgcaattgaaggacttatttactttgctactattttcaaccttaccaagttttggcattgccaaattttagtaaggttgccaaaattttggcaaggttac

SEQ ID NO: 5335 - DNA, 64863 bp, Oryza sativa
gtggattccctccttgtcgccgccgccgccgccaccgccgccgcagcctcctctcgctccgcctcaccgccgctcgacgccatgggccgcatgcacagcagcgggaaggggatgtcctgctcggtgctcccctacaggcgcgccgctcccgcctgggtcaagacgtccgcgtcggaggtggaggagatgatcgtgcgcgtcgccaagaagggccagctgccgtcgcagatcggggcgatcctccgcgacgcccacgccgtcccgctcgcccagggcgtcaccggcggcaagatcctccgcgtgctcaagtcccgcggcctcgcgcccgaggtgcccgaggacctctacttcctcatcaagaaggccgtcgcgatgaggaagcacctcgagaggaacaggaaggacaaggacaccaagttccgcctcatcctcgtcgagagcagggtgcaccgcctcacccgctactaccgcctcgccaagaagatccccgccttcttcaagtacgactccaccaccgcgagcactctcgtggcctgaagtggaactgaaggtttcgttcgttttcagcttcttttttgggcgacttgaattctcttgacagccatggagttttgtttaatcttaagtaagtaggaatgcttttgttggtgtaatgtgttaaatctacctcctgcacctgaagagaagttgcttactgagactcgatctaggaatgcttttgttggtgtaatgtgttaaatctacctcctgcacctgaagagaagttgcttactgagactcggatcagattttattttcctgaaagaaaggttattcgcaatgatatgaagttcaatttacaccttgactttgggtagttctttctaaagatgtgtgataatagaaaatgcagtatttgagtgatgtatgatgcatgatcaggttgtcgaaatgcagtacttttttcatgttgtcaggtatgcgatggtgaattgtaccaatgtccaatggtactaggtttgctatgatttggctagcctacattattgattattagtggaaagagtactattaaatggtaatgttcaatgtttgacctcttgtggcagggtttatttgcttttccatgcttcaaacttttggactaagagctctataaacattattttggtaaacttacttgaaggattttaagttgggtgatgatacaatgtgtaacacaaatgccaaggaaaatgatattttgatccaattaatctataacttctgatattgggcaggggtacgagattatataatatttcttttttttctagctaccatgtgctggtatcagggtgtaagttgtaacctctaacctattgaattctgctggtgcatagactagttcttttgttgattttataaattataaatccatcgtatgccatttcttctgctcgagtcacctttgctaatattccaatagatatgcttgctcatgattcatgtttgagaaacagagctcatatctcttgtcacttgaagttctgaatgaattcttgtgaaaattgtcctttttttgagaaatctgtgccataacatttgggagcggaaacattattgtgacagtatcacatttttgtcttttgaagttatgaagtatccagttatgagtactagttgtccttttgactttcagattgagctttggacatctgttttgattagatttaagatctccgtaagcaaatttagcgatatttcagtgttaggtcagtgcacaatgtgaaactagcattcatattttcattttggaaccaacagtattgcctagcaaggttttttattgacacttctttgatttgctactatactttgtgctaaatccactgttctgactggagcaggtcttgttcctggattatttacataacaaatgatccagctaacatgctgcggccactgtatcatgtttagaaagtagagctccaattgcaggtgaattccaactgtcagtgcaatagggtctattgggagcagtctccttttgggtattttaggtcaatatgatccaagatcttgattagtggtttgtgaatatattccaagatctggtaacctgatatcatgtctttttggtccaacaggtagatttcgcctcacatgaatcaatcggacctattgtcagtttgtcactaggtgtttgtacatgttgtctttgtagcataattagtactgatgaccaattagcagcagctaactccattcatgctttacaatgattgatgaaataaagcatctgcactttatcatctggacgacttgttggctggtgctcgcggcgctgggaatacctgtcgtatgtgcgccgctgatctgaataatgttgtgtgattttaatcaagttggatacttgatttgaatatattgcagatatcgtacctacttgctctgtttgtttgtttgttttttggttatatttctaggcaatgcattgtaagttgaaggccaccatcacagtatcagctaagggtgtgcatttgatctttaccttgtagaggtcatcaaactctaatcgtacctgaaactttgtgtattttagtctttacctgccatggtgaaagatttgttgactcagtttgataggtcgttttactatattactgtcattgtgatcgtgctcggtatgtagatttatttatgcgggatgcatatgctgcccaacatcattaggccactaacttactggtattgtcccacactaattaagtattctgactctacaaaaaacgacttcaactaaggcaccctatgctagcatgctacaccttgtttttatctcactagtcactaagataattttaggcaaaagatcaagtagataaccccctatgctagcatgctacaccctgttttgatctcactagttactaagataattttaggcaaaagatcaagtagataaccaataatttactttggtatccttggctacttcaggttgttgccttgttggattgagatgccatcaaggcatatggtacggataattagcactgacagtaattacatactcaattcaatcagcaacacagatctgagtgtgaggaacaacaccaaccaggcaaccacgttctggtcaaagccaggcaagaattccttgatgcctccaagctcaggataaaacaatgacgcttccggtacacttgctatccagttgaatacattatgcgaacatcttgccatttctttaacgatctttgatctgaataaacaactcgtcttcagacatggcgccatccgggcggacagttcatcgccctcgttttatatatctagatctgaacacaacctgctgcactgcattaccatccatctcttcttcttcctcttctacttgagctgaagctgaagctgccattgtcttgctgagctcgtttggatctctttggtctagcttgcaatggctagcgtcgtgcagtaccaggcggcggcggcggcgacggcgatggcgtgcgaggaggagttcattccgcaggggctgatctcctgcttcgggcggtcgctgtcgagggcgtcgtcggggcgacacctggagtactgcagcagggacgtgagcggcggcggcgaggatagccggcgcatggcgcaggagcgatcggcgagggcgaagctgcggtggaaggccgtggcgcaggagatcatggcgaggaggagcggcggcggcggcggcggatcagggcggcggaggaagacggcgttcagctacgactccaagagctacgcgctcaacttcgacgaccaggccgccggcgccgagtaagagctccagcctccagctgctacgtcgccggtgagctagagctagctgcagagacgggacagacgagcgcgtgcaatatcgcgctcgcgcgcgacggccggccggccggcgaggggacggagtgctcgccggtagctcctccggtgacctacccggtggtgtgcattgcatgcatggatggcgggatccatgtgaagacagagagagatcaagcttgaagaatgaagagcctgaagggcggtggttcttgttcgagttttgtttctttggctgttttttttttcatttttgagattgtaaacgtatgcatcctgacatcttgaattgttgatgtggtgcagtaagtaataaaaaactgaggcatttattcagaaagtattcactgcgttttatggctttttatcttataccttccaaattccaatggcggcttcaaacagcagatggtttcagcaattgttttgcctggttttggagcagtggtaattctgttatgtgggggggcacttgaatgttgaaacttcaagccttgtttcttttattttctgaaggcttcaagccatgttagtgtatcggtatagctgtttagtaaatcagcaagtggtttccgtactccactaatcttcacaaacatgaaccaagagggtacagcaacgtgctgttgttatgtctcgtcatgtgctgcatagcggtgccggtgcagtagtgtcatttggtttgtggaagatattgaccggcaaattaatacgtcgacgactacatgccagttttccattctctggatgatgcacacgccaaggacccaaagcatgcatgaatggcttcctaccatgatagttagtcgttgccactcatttataccggtggcgaacgcatgatttattggtcggttattcacttgataattacatgcaccttggatttgatgtttgatagactagtgttaagagatttgagatagttgactactagactattagtacctcctctaaactaataatacttgtcgttttagataagggtaagatcaaactttaaaatatttgattgtaaattatttttaaaacacttgttttcaaatataatgactacatgcatatgttagtcttgaaaagtactttaatacaaccatatatttattaatacttttacacgaattataatgaaaaataatggtcaaagttgtttttggagaccgtactcttgtccaaaataataagtattatcaacctggagggatgaagtgttgtgagctagaagtgcataaggagtgaatttgttgagaaaaaaagtattaggcacattcgagtataaatacatataatatactacatatattatgcttttaatgaaaaatttgggtatttccaggaatacaagaatacccattgatttcgccattgaattatattgcccccatctttcacttgcagacgacgcaactatttatagcaaggcatctatagtaattttaccaattttattagaattcaggttttgaagatgtttgtaggggtagatgtgcttataagagtgcgtgcgcctttactgtaggtgttttttttaaaaaaaaaataaatccaaacatcggtgaatcaagaggcttttcaggttggggtacagaatatgtcccagtcctcccattgcttctcatctcttccataacacatactccctctgtaaaaaaaaatcaacctagaacaggatgtgacatctcttagtacaacgaacctgaacaaccctcttcttggttgcgttttttttatggaggaagtagacaggtagaacaatgtgtctacttatcatgccattttgtttgggtattgtgcaaactgcaaaactttcccttgctacaactctcaatgctaaaatctctataaccgatttcagggactaaactctacttcttattggaccacgtggagctccgtaaatttggaattgtctcctccaagaatctgccatgtgtccatgtggagaaaactagcctagacgtttcattgtgaaatgaaaaaaaaaaatatattggcgtgtacagcccagtcacggatgcctgcctgggcctggtcgtccggtgccgttgctacagcatttgcattgtttccttctcaagctaattgtgcacacaggaccaggcataaatgagataaacgaaagtaaaaaaaaaacaaagaaaaaatatatatattttttcaaaaattatctaaataaataaaatacattatggttaaacccgaaaattgatttacgtacctaaccatactgatatcccatatttatatgaaataaataaaaaaactaaattacaaaaataagtcgaaacattggatgaaaatttgcaatattaacaaccaatatttcttcgaatgtgcatttcactattgatactgtatgcacaattttttgcttaaaaattgccacaattttgaggaaacataactttacgtttttttaatagcatctctaatcatgtgtctaattattggcaatcactaattacaatccaactttgttttttttttcattctaacataaaattaaattccatctttctgagacaaatacaaaattatattccattaattaatatttcctttttgaaagattattttgtgggtgttaaactaacttgtgtaaaaatatattactacaccagtttcaaattaccggtcattctcacatttcaatttctagatcaggatcccctatcttcacctttcatcaatgccacatatatctggtaatcaaggttaacattactcttaaaaccactagaatgtattaaatgagcataacaatgtaatttgctgcataatttgctagagtgataaataattcaaaataaaggctggtaaattttccaaaacaataggtctagataagatatacatgctataaatttaccgacgcgctaacagacgcacagattttctagtataatctaaatttagattagacacgatctagctagtactagaaacatagacataatctcatcgagcattacgaatctagatatgtagatgtatcaaatccaatatatgtagtagtatattttagaacaggataatagctaatgttaacctaccatatatatccaaattcgtaataatacttttctcctataaaacaacaatctaagatatatctcaatattacaatagtagtatattattcgatactagattattactatatccgtttcaggttataagactttctaacatatatgtgtgactagatttattagcatctaatatgaaacggataaaatatattgtaagataaagaaaacattaagtcgtgtctattccagtattagttgctatatttagcacggggcaagcctaatatcctagtcgagctctctcgctggggcctgggggagagtagtagtaacaacaggaaaagggaaccgcgtggcctccattcgcggttaaccccattcgcggggcctccatcgatggaggcctctctcccgtttcaccaccaccaccccgctgcctcctccaccgcggcgcatcacgcggcccgcctcactcctcctcctcctccgcgagacccgcgtgccactgcccgctgggtgccccccgcggccgcgcccgtgcggagccggagcccggcaaatctagggttgccgccccatcctccccgacgcctccgcctccgcctcgcgccgccgaggataaccgctgcagtcacgggagggccgcgtcgcccccgccgccgagccccgcctcccttggaatgcgccggcggcagcagcagcagcctacgacgaccgcgtgaggaggaggaggaggaggaggaggaggagcgctcttcgacggcgcacgcgggggtgagcctaggtaacgtgccctaccaaccccgcgtgtcctctcctccctctcggtaatttgtttacacgatgagttgatgcaatgcggttgatctcctgttgaccggggagaccatggcccgcgtggtggaattggggcggcggaagaattcggttgcgtttgtatgcattgcatcactgcggaatcgtgtggccgtggcttgtctcctcgtcgtccaggaaattccagtcacttgaatcttcccaactgcttcatttattagtattgttttgggcttgtatcctaagtattgggtactgatcttcttttttaatccgtttacctattatactagtggtcactggtttgcagcagcgattgttctgatacttgatgtgatcttttatttttcccctaaaattttgaccaacggattagactacaattaaatagacagccaagttctttgcttatgtcaccaattagttagcttgttttgttacgctttgtggacataaggaaagagatctgttgtttaggagataagtctatcttatcaatgagttctgaagttatacaatgattaactggattggaagaaatttctgctttcgtgtagccctttttctcactgtgatctgagtaattgtgattttacacagtgggcgagaacaaagttttgcaaatgtcatcaattgtgccgaaggcgtccaatatcttctggcatgattgtgcagttggccaggctgatcggcagaagctactgaagcagaaaggttgcgttgtttggatcacaggacttagtggttcaggtaaataaagctaatttctttgaaactttgtgttgtgcttcttgggatgttggcacatctgctgagctgttcaagcataagataatttcaacagcaatttgtgtctatgtggaatgatatatctttactaacaaataaaacgttcttaaagtgcatcctacaatattttgggctaaaggatgtaatattgggtgaatcttgttacattctacgcaatgcaaaaaatactactgccttatttctttagttcttgaatgatttatatacttattggtttggtaactactgaaatattttgtactttatcttcatcgtctctactgaagcaatttgatcaacaacattacacgagtaggaaaataatattgatgcatcagtgacatgttcagtgctcccaggtcctgctattgatcctcacactggatgttgctgttcaatttttacatttttacaatgctacttagcaactttcccttaaaatattcaggcgattattgtaagttttgctcacaaaccatgatgagttcaactgtgtttaagaggtggtgatctgttcaaaatgatcaactacatttcagagtgtcatgtcaatatatgatatattgtacctattttttgctgtccatgaatccagggaaatagctttcaggttattgacgggcaaatctgtagagtttgtactgtaagctgacatgtcgtcatctacatgaatgatgctttagtttctcactattgatttgttctatcttcatgatttaacatttattgtcagaacaaaacttcttaactttccaagtgatgatttacttttttttaagtaagttcattctcttaccttccattgtcaaggtaaaagtaccctggcatgcacattagatcgagagctccatacaagagggaagctttcttatgttcttgatggtgataatttaagacatggtttgaacaaggatcttggctttaaggcggaagaccgtgctgaaaatatacgcagagttggtaagtatcccctgacacagaactttcatgtggcaattgaatgaagttctgatttaggtaaaaatatgataatgcttttgttgttattttacatttttgacacatctgtgcttgacatttatatccaactattctgagcaggtgaggtagcaaagctattcgcagatgcaggcctagtatgcattgcaagtttcatatctccgtataggagagaccgtgagtcttgtcgtgcattattgtcagatggtagctttattgaagtaagcaattcttagtttatcttctgtttaagtgcacctagctttgttatggactttaattttgaatattcacaaacatccctgaaaccccttttgtaggttttcttgaacatgcccttggaattgtgtgagtcaagggatcctaagggcctttataagcttgctcgtgcaggaaaaataaagggtgagatactcatatagtgcttgatttccaaaatcgaaagatttaagagtccttattacgaaagtgaattgtttaaaaattcgccttactttttaagatttgttcctaatatctgcatgattgcctacttgaataattactcttgccaagttgaagtacattacgcatatcttggtctcttggggaagcaacaccagaaaccaaactagagaaaacttaatagatggccgttctccaaaattgtcgatttctttaagcaccaagagtctgtagttttttttgcctcatgctcttgtgcaagtccagacatcttagaaaggaagtttcgttgtgtgccactgccaactcgtcctcactttgtcagctctaacctttatcgctgccaataatctccatagtagtttttgaatcatgtatacatcactcatgcttcaagctttaattttgtcctgttgcaggttttactggaattgatgacccttatgaatcaccattaaactctgaggtacatctccattagatttgctatcatctccacatggtcaaagtgtgcattattaactgtgttagtatatggctgttctttctggttcatattaaatcagtggccttaatgaaactcaagatattaaaagttttcatttgtgattggattagattgcagagcgatccattttataagcatgttactcctacataataatcttgtaggattaaatgcattctcagaagaggcaatgataaaatatatgcattggtggtcggctgatgggaatggcagttgtgggtagcaaatgttacattatgattattgccacactagacgtctatatcgctagctgaatatagtttgtgatccttattgtattttatcctcaattttaaattacatatgtagcagtctggaagacacctttaatcaattcggtagttgtctatttgtacatctatgtctttgtcattgtatcatttattgtgccccacatgaagttgccactgtttgtcctttacccagtatcacgaactcttccttttgttacagattgagatcaaagaagtggatggtgtatgcccttcaccatcggacatggcaggacaagtagtcacttatctagaggagaaagggtttctgcatgattagatgggatgcatcgatcagccggtagagttttctcctccatattagactagttcagaataagtcaagctttggcatgttttctgtacttgtttttgtttagattggttacatgctttgatctacccatattccttcttcactgcacagctaatggagctgtgcaatgacattcaggtaagttggagtagatttgtttttttgggatccaaaatcatcccagttattaacaggccgtagaagatatccatttacttctgttcttacattgtggactttatactgttactgttcttctaccagaatcagtgcctgggctgcgtacatccatcgtggatgaagaggctggattccaatccattttctaaaaagaaaagaatcagtgcctgtattatctgaaaccaatccgaacttcaaggctgtttggtcgtaagaatataaaattgtcgtgaccttgactttagataatacggatgcctggtgagggtaatgtctcgtccacggaaatcattggaagttcccacttccgtgatcatcggcaactatgttgtcgttatatgatctgaagttacgagggggaaaaacaaacatatctactccctccgtcccacaacaaacatactaggtgatgtcgtatctagtcttagattactatattaggactagattactatattgtgagacggagacggagggagtagcagaccgagaagggtaggaagatgggggaatgctagaattggcgtcaaccaaacacggaggacgcggacggtacagggagggaagacggacttatgtgagctcctatgcgatggtgtgtgggaaggagaaaagggatgtggtgatgtgataagattattgcgttgcacgaatcttggcgtgatctaaatagtctaaaatgaagttgtgtgttttcaggtgcttagaaactactcccttcgtccaaaaaaaaatttagaattgaataggatttttgttagcacaacgaatctggataggagcttgtccaaatttgctgtactaggaaatgtctaatgcaatactaggttgtttttttaagggtggtgagagtacactcttatccaaacggtagtgcaggctgcaagcttgcggtttcttacagagtcgacgtcgtctctgtcaaacaacagacatggtccacccaagagggatacggcacctttgcgagctgcgtcgaccgctccgccgcggagacgaccagtcgagatcaccacacacctgccggcccatctgcgtacgcgtcctgtacacttgcacacgcccctccagcccctcgcggcacggtcaaaaccgccctgccgctcccgacaaaaaccgcgcgccccccgcgcccccaccggccggacgatgcgacgaccggccgccccgcacgaacgcagcagctgcctcctcctcctcgtctttccctcccgcacgccaccacctcacccacctatccacgtcaactccctccgtccctcgcccgcgcgagctacgtactacgtttacccttctccctttctccgcgactccaccccaccgcgcgcgcgcacacagagcgcttcacgcaaacgaggaaaaacccccccacccacaaacaaaaaaccgcacgcaacgcaacaacgtaccacgagtctacgaggcagatggtgttcagcgtcgcgtgggtggcggcggcggcgcgggtgccggcggagctgtgccagggacagggcggggcgcgcgggcggcggcggcggctgcgggccgacgaggtgctgcgcgcgctgctcgtggcgcccgtgcgggagctcgagcgcctcgccgactggctcttcgtgttcttctgcctccccctgccggactactacgtgccgggctccggccgcggcgggctgctggtggcgcgggcgccgtcgtcgccgtcgggcggcgcgctcctgcactacggcggtaggtaccggaggcccctctcgctcttgttgccgtcgtcgtcgtcctcctcctcctcctcgtccatgtcctcgtcagaggagtactactattactccgacgattaggaggacgcatcgaatcaagctgaggtgtaccgaatgcaattgtgttgtggtttattcatctatctagccatggccatgggcttttgtgtgctaaattctttgtgatttgtacatatgtgtcattgaaccgacaaattcaaatgatggtttttgttgattttgttggttaaagattgtttcgattctgaaatttcaggcgtttttgatggttttgcggtagcttctttgattaagaaatgaatatcaaaatgatgtcttttaatttgttcttgacatgagtgtacgtaacaactaacaaccatatatataggtggacggcgattaattatttcgaagaaaaaatatactaagtttgtactatttggtggccggacaataattgggccattgcaacaagagcaatgaagaacaaatcgattgtttactaattgtccctttcgatctcgatctatcatatattcttaggggacccttttctcatcttcaatacatctcgagcagtggttgacaaagtagtgggggattgtctaacataaatcgtctgaaaaagagaaaatggtacgggtagtctttgttatgaagatccttccctaagttgcaatattacacttctaaacattttaaggtaccttccaattattagtaagaagttcgatcacattagggcatgtacaaagttagagtctaatataagctctctatattaatttgcgtcactaaagagctctctatattaatttacatcactagagatcatcctcatacaatagtagagacaataagatctcttaatcattaatgcactaactattttttttattatacttctttccttttttttccatcctcatgcaacaaactttccgttaataaatactaagagtggattctaagccattgttatgcgtaacaatgatgtttctcttttattccctctctttctttcacatcatcaaatttacatgacaacaaagagagcccattaagggcatgcacaaaggtaaaatcaaatatgagctctctatattaattaatgtcgctagagactatcctcttacgatagttcactctccggattcattttaattgacgttttagacaatgacacggtctgcaaaatatatatttgaccttatttttctattataatatatatgcaataaataaatgcatgtttacttttattataatgctttgaaagacaaatctatatatgttgttatagtttctttaaactaaatatttttaaaattattgatggtcaaagttataaaagtttgacctaaacatcagttattataaaaccagagggagtagagactaaaccattaatgcactatttttttatacttctttccttttctccacccccatgcaataaatttttcgttaataaatgctaatagtcgactctgagccgttatcatacgtagcaacgatgtttctccttcctcccatctctttcttccatgtcaccaaatttacttgtatgagaacgaaaagagactcttattagacatgattatacatgcccttatttcccaataacaattccatttttaagacaactataacctacaacattattccagcatacaagtgtatcgaagacacacacatcagggtttacctttctaatgaactgtttggatctcgacgcaacgggttttgccaaattccaatcgaatttactgtttcagatttcaatttcttaggaactattttaattttgcctccaaatctgctttcatcctatgtcgaagccatgaaatttcatggttttctgtttgtaaaaaaaaagaataagaagaaaaaccctggcacacatatgcatatcacatgaacacaaccgcgacttcgcaaatacttccattttaacacatgaaagatacttttaagtataagcgatacatccctaatatcataaaatttgtacaggaagtgtacctaactgtgtgtaccaggatttgagatgtggtaagccacaaattaactccatcaccagacaaaaatgtgttctcatatgtaggaaaacatgcgattaactattcatttgcctaatggccttaggttgtgttcgagttcaacagtttggctggctaatttgtttcatgtaaaataagatgggtcattaaggaatgattaattaagtactatatctattttatattataagtcgctttgatttttttctactcaaacattttcaagtttgaccaaatttataaaaaattatggtaacattttcaacataaaacaaacgtattatcaaaatatgtttaatgaaactaatttagtgttaaaaatgttactaaatatttttataattttgatcaaatttaaagaaatctaactataaaaaaacaaaaatacttataatataaaatggaagcaatattaattattgaaaatttgaaaataaatgaatctatttgatttttaaaaaacttgtatatataaggttttatcacaacatgcattattgagccgtttgtgaagtgtgtccatacaaaaggaaaatactcggccaggtaacccaatcaaactcagccttaagttatttgagaaaaccgtgcactttattttgataggtatcggtttctaacttttggtaccttcgtcccaaaatataaaaacctatactagatataacatttgctagtaaaatgtatctggacagaggaaacgtctcatccagtcttagatttttatatttttgagatggagggagcagtaagatatttgcacaaacacactatgtttttcagtgccttgctatatacattgatttgtacagaagtaaacgatcaaatgattcagtacctattgctactatcttcattccaaaataagtttatttttcactcatccacacataccaatacaaatattaaagagtaggatattcctactttatccaaacacaacacaactattcatcactttatctactcccgatataattattcaacattcgcaaattcccacgtaatgattacttttagaaaataaacatatttaataacagctataaattaacttattttttttagatcagaacacattttgccccgactatacataagttcacatgtcctctggccctctggccgtcgatttatgtaccactttaatactcccgtctatctagattcattgtactaagattcattgaacggagggagggagtacttcataacacaataatccttgagacataaattaattaaataatatatgggccaattcttacggagcttcaattctttaggcctttaatcgatggcccattaatatcccggcctttcacacacggcggcccatgcaaagcccaatttgaccggccgcgtgacccgcgtttagacttttgactagccaactcacacaaacgagtataaacgaccaaaccgaaaaccaacgcgggtgctatcccagccgtccgttcccacctgacaaccgaccgaatcgaacggccaccatagccccctcacctcaccacctaatccaacttctaatcgagcgactcctcatcatcgtcgagtcgatctccctcacgaagcaaccccagccttctttacctttcccgggccgtgtcgcccacgcgattcccttccctccaatcgaatcacgtcgccgtcctcctccgcctccgccgccgccaacctcgtcggcgccgccctcggatccacgccgcgcgatgcagcacggagactacgcctcctcggcccccccggctgcgggccactactacccgcaccagttcgcgccgaatccgcctccgcacccggcctcctccgccgccgacgccgcgccgccgacgatcccggcgagctacgcctccgcgccgccctactcgggggagggtactccgatcagccgccgtcggccccgtcctacgcgccgccgccccagtacgccgggtacgcgccgccctacaacaatcccaaccccgcgccctacccaccggagtcgtccccggcgccggcgccgtactacagctacccgccgacggcggcgggggtggccacgcagcatgctccggcggcggagcccagccccgcgccgctgccctacgacgccccgtactacggaggctaccagccgcctcctaccgcggggtacggcgacgatgattacctgaacgagggcgcctacgcgtatagcggcgacggcggctccgagccgtacggggcgcgcggcacggcgccgacgcggtcgggtgccgcgatgtttgatgactacggccggtcgattgggccctcgtcgggaggggcggaccagtggcccaccggtggcggcggcggtgtgggtgggagctttgggaaaattgcgagggctgttccaaaagcagagtctcatgaggatgctaacggtggtgcgcagaagtttcgggttaaactgctgcctgagggtgccgggagccctaccgatgtgctttgtcaggtatgataggattggtcaaattatacatcacacatgcaaaatttagagtaatgatgtttgaaactttttagattatgcgctagagtgaccttggtagttccaatatgcctttaacatgtttatttttgctgttgcagattggtctggatggaattcgcatgcttgatcccagcacaagcaggacactaaggatttatccccttgatacactgacaagatgggatgtaagtgcgacatccttttgcagaggattatgtgtatatcttcttactacaaaatacaatggcaatgttgtttttctaatggacggttcatggttgtggtgcttggttaggttttagattcaaccgtatttgcattttgggcgaagactccagttgattttgaagcaaagcgaataaggttgaagtcaaacagctatacctccaatactttgcttgacactgtgactgcagcaacagtgcaggtgatcatcttcctccattatcaatcgctatttaccctcattttaagattcttaggtttagacttgctttgctctgtaacacactaacaccactactaatagctgcttttggtgaaaaagtgttaattagaaaaaccaaagcgatgaatatttgaatttgaaccaatacttaggaaacagcaaaatatgacttatatcatgaatgtctctcttctccaaaatattactagaaatcaatatgtcatactgcggcgagtatgatgccatataagttggctaacttggataccaccttattactctgtttgaattatattccaatattctgtgtttgaattactctcttgtatattgatgaatggaatataagttgctaacttggattccacattgattggcagtatcctttcacaatatttgtagaaactagttttttttttaaagaaaaggttttgctccaacatatttttcttgatagattttgttcacggagttgctcatacattcagcatatttaatgcttcttcttttttttttacaaaacattcacattttttaactttgtgaaactacttacagtttaaggagattggtggagatgcaagaggcagaggaactgtagacagtagcaaacccatgtcacaatcaaatgagaagaagaaaggttttgattggatgtttgcaaaacctgttgacgaagtgaaagaccattgggtaagttgaattgctgcgacacacatttactacttgatcttagttacaagaatgctggaacctttttagtttattatttgtttacttgcattgttccacttcttatttttgataattttcttgcaatatctgctcttccctgcgaatgcatgtagtttggccccttttttgaagtgtatatagtttaccctttgattagtcctttacatgacgatacactctgtaaccattttggttgagcatttcagcatataatgaagaccacttcagttcacttagcagtactgttgctctagccactgactgttttgccatcttgtaccaccattttgttaatcttatgatcgtgtttcttctctttatcccctttctaggttccagatgaggctgcgaagaagtgctactcatgtgctgttgattttagtccttttaaccgcagggtaatttgaatactctttgttcggatatacttatttgttacttttatgatgatattttgataaattaagatgatgttttctttgcagcatcattgtaggaactgtggtgaaatattctgtgacaaatgcagtcaaggaagaactgctctgactgctgaagataatgccccgcttgtccgagtttgtgatagatgcatggtacgttctgcttcttgtttcttaattatatattctttcttttgcttgatgttatcttaggtatagttacttagctcattttaagcatagcttgactgtgttacttcttggttgtatttctcttgttttccaaagcgagcacagctcgcataacctctgcagcaactcacctattgtctgttgctctacttatacatgctttagcagttttatcactgaccaaatggaaaacatagtaaaatttgaatagctgtgcactatagctcttcttggcgagtttcaattcagtgccatgtgttcatacgttagaatgtttcttattctctcaggcagaagtctctcaaaggcttagcatagcacaggaagctgccaacaggtctgccacagtgcaaagtcatgaagatcttgcaagaaaacttaaggtgacgtactagataacacttcctctatattatacattcattggagtgacttgtacacttgacggattaattgagcatgatttgttggaatgtaagagttgtaaatgtttgttggcacatgttttgccgccaaaattttagtccctaacatcttaggtgccatcaggaaatttcagcatgttctatgagtctgtgatcttaacaaatttatgctttgatcaacaggaggaaatggagagaaatcgcaagtcctcgggttctgcatctggaggttcatctgggaccagaatgagggaagttgcatgtcctacttgcactgtccatcttcaggtcggtctgactttaggcactcaaatgtgaatgctcttacagtaatgacttcgtttggcgcttacatactaacagtggatgtgcaattgcaggttcaggttccaacctctggctcagaaacagtggaatgtggggtatgccagcatgctttccgtgtcagcgccaattgataaaccgggagacagagcatgtctatagcaattattctgtttataactcacttattttgctgttccatacataataagcgtgtgtgcagcctgtagatatttcctggttgtgttggtgaccatgacaggatatactaggtttttcttgtacatgggttaatcctaaaatatatgctctaatactgctgaaattgaaacatgcttggatgtctctggagaatatcaaagaaacattcgtttctatgcttcaaacatatatatctcaacataagttcttaaaaacagctttgggtgtgctttcagatacaaaatggaatgccttttgcagcaaatgtgtagaactgcatctaactatgagtgttttaagatgctttgcatcttcctgtcagcatggtcggctcgcttccggttgcaaatatgtcttctctggattatctaggcaaatgtacttattgcctaaaagtctaaaacacttgttattgcttgctacttcctctgtttcacaatggaagtctttctagtattgtctatatttatataggtgttagtgaatctagatatatatgtgtttagattcattaacatttatataaatatgagtaatgctagaaagtcttacattatgaaacggagtgagtagttgctagtactacttattagacaagaactgaatgtggggcaaagatcaaactgcgcctagttgaagcacgcaagagcctaaacccaacctcactacaagtcactatagcagcttcttgtatcaacattcatcatacctctcgaaaagcaacattcttgaccaaaatttatggccatcaagtgaccccccatggccatggcccaactgaagcagcatccgcatctgtagttctgcacacgctccacagcagtgtcatctagctccaggcaaagagtgtgcagggaatcaggatagcacgtcgcaggccaggccacaggccagcagcaacgcaggcagcatccatgcacgcatgtgcccggtgtccatcgggacggatctagaaattttctgcagtttgagcaagacactacaacaatggctaggtcaatgttattgtaaaatgttggtgatatactatcgagattgatccggttcctagtacaatgttgttgtaaaatgttggtaattgctatcgagattggtgtataaattttcttaattttcttgaggtcttgttcgacttagaggggattgaaaagtattgaaggggattgaggaagaataatcacactataataggtgtgtaataaatcctctccaatctctcgctcacatggattaaccaaacaaggtctgagcgggagcaaaacacaccatgacggtgttattccatgctatcgtgaaatattggtgatatgcatggtatgccctcctatactactgcgatccgataagcccgggcagctgcatagggtcgctgggccatggatccgccaatgatgatctggtttaaccatcagggggagagatggagggagagggattattgatctgattttacttcgtatactaaccattaagaagaagaagaaggacaccggcacgttggcggcatgattgatctctcctcgaaagcagcatctcttcctctccccacccgcggcgtttaagcggaaacaccatcattctgctgctgaaagcgttccatccaggcatgtaaaccacgggaaagtctgtgcaggaaaccggtataaactccggaaagaagtactactagctatcaagcctatgcaatgcagtgtctacgtacaggtagcctgtctgtctctgaatacaacgtgaggcgagctctcgagatgggcaactcgcagcgtgatccgatgagtactaagtttcaagtgtggtatactggtagctgaattcttcagacattgcgccgtggacactgtgtttgttaattcttcaggctatcaatgatctgccttttgggtcttcttcttcatcttcttcttcgcgagcggattaaccgagcctgcaatggatggcaggtttctgttcctaatccggatggccaatgctgtcttttgaccgtcgctttggggcagagccgtactgtatgattactctgtaactgacagtgtcgaacgtgttcatctccgtgaaatttgatggatacacatcctgtgcgtttgtgtttcttgctcttgtgtttgtaccatccgatgtggtcacctaatttcttcaatcttgaaatagcatttgatcccacaattaatagtagtatgacatcccaacttctaaattgtctttaagcagtttcttgattgcttctgggtagctagctgagttgtccttgcatatttgtatgttacagtacattgcaagggaaaaacatactaggttgctttcattaactccattctttcagaaagattaaccgttttcagttcatgaactaattgctccactccatatattccctagtccctaccttccttctttctctttgagaatcttcagcgtactgagaataatcaagacagagaagaaagcgaagagcaccaagtcattcttatctgtagtactttctgaagttaacactgcacccatcatgtacagtaccaaactcagtttggtggattggatcaatgcattctccaagttgttcgattaggacttcagatcccatctttcatttgctaatccacttgactacgttcaaaacgataatctgcatgtctttccaaaatacctaaggactaaaaaaaagctatatgcattgcaaacaggccatgctattcagacatgcattttggcactatctctgtccattatgcggccatttgaacatgtttccatgttctatgatctctccaaccatgtcctcttcatgatatcattgcatgtatggactcactcaaccatgtactcgcgacctcaccatattctagtagctcagactcagccatcaggcttggcatgcttgtagacagccaccagcagcatgctacgatacagttgataactgcattggacctcgattggactgcatatgatagaacatagataatgcttacaggttgttttgacagtgacatggcatacagttgagtggacaaccgataattgggtccaatagtgattaagcgagtaatcttcggtccttagctatgaaatggacttgttggtcacgaccgtcactcaaaacagaagaacgaaagagattgcttgtttctgttctctgaaaaattaacggtgtgtcgtactgtccacctattggaattctcccttgagggaagctctgaattagcccaattgtctgtcctacaaattaaccgagtactctacaaatttatgttctctattcgagtgattaagtatggctttagctatggttgttaagaactgaaatggacatggtcgcttctgtcactcaaaacagaagaacgcaagagatcgcgtgtttctgttctctgaagaattaacggtgggtgatgctgcccactcacacgagcaactctgaattaaaattaagatggtcagctgtattcttccacaaattcctactatattaatgcctaatttaagcaagatttgatggactgcgtgattcactaaacacaatgcagaacatgcacgtaagcactcgcgaattcagagaaaatgtatgggagggagcagatgacatcgggccgtgctacaggttgcctcggtgtctcctgcgctcctgctctctaggctgcgtcctgcgtgcgtgcgtgcgtggcgtggctgcccgtttcaggcttcgactagtggtaggtgagggcgacctgcggcgcaactttgaaatgcggccgtattgtggctctcaaattggccgaaaaacggatggttttttttgcagaggattccctgctgatttgtgattttcgtcgtgggttttggggggcacgaccagcgtccacacgtaccggaacaaagttgttctgctacagtgtttcactatgtcggcactcagcattcatacagtgaattactgaatcgtacgtttttactttttacctagtacgtgagactattttacggtagtttcagctggtaggaaaaaacgtagcataggagttggactcatagcaggtttttaaaataccatagattaccgctggattatcgcggttatagggtacgtcgacgtggtctaatatgcaaaaccacttgttatattagttaggtaaagaaaagaaaagaaaagaaaatttgagttcttttgttacttttctatcttaaaatatataatacttatacttcatttctcctataatatagcaagatataactgaatgagacatttcatagtaaattaaatatagactggtatctccttttaggttagcttttttgagacagatagagtacttgattcattttatactctatatatcctaaaataaatacacgtagtacgtaatgtggttccataaaaaaagtacgtaatgtgatttattctagtactatgaatctagactacttgtctagtactccactacgaatctagattcacagtcctaaaatactgcttgtccagatttgtagtatattctaatactgaccaaagtgcacctggtatataacatgacatattatagtattacgaattctggattgttacatgtctaaattcataataccaggatatatcaaatcacaaattaggtatatttattttgaaacaaagaaaatagaatgaatcgtatatatgtccagatttatactattaatatccatcctgagacagatatggaatcctacgaaatgttttatccgattatatcataccagtatattacatcatggcgcctcctctctctctctccaacccgggccgagcctctcgctccgtactcacgcacacacgcagcggcgcagcgagagaggaaagagagagagagagaggcaaaaacgacaccaacgggcggatttttaagtgcggccacctccatcctccccgtgtccgctagccccctcctccctccgttggtctccgcccacccagaggaaaccacccgcccccggtccccggaggaaagcttcggccatggcggcggcggcggcggctcggaggggatgcctggtcgcgcttctggcggtgctcttcttggcctgcgccgctgaggggggtgcggcggcggcgtcggcggcgcagcagcagcagcagctacggcggcggaggcatctgctgcggcggcagcggcaggtgcacagccacctcaggcggctcaacaaggcgcccctcgccagcatcgaggtagcggcccgtctcctcctctcctctcctctcccaccaacatggcgcgcattcaatgcacgccgccttgctcgccatcgatttcccgtttcgttttttcttttcttttcttgctctggtcgctcgctggtatggaggggcgaaggaatgaatccatggaggtgaaaaaaaaagaaaaggcggtggtgcatttggtatggaagtcgcaaaaaaagttttgcgcttttgattgatgggtcgacttgctcgtgcttggtgatgagctcgctttggaagtgtggattgactgttcctcctcctctcatggaccatgcattggggtttcttccgttgatggaggaaaaggctcgcttttggaggaacattttatgggtgcccgtgcttctttgggttctctccacttcaagggaggaaagatatggttgctttcctttctttggaggagaacagactacagagtgtcttcttccttttctttctttcttttttttcctctgaaccattaacaaattttgcttttgttgctcaaagatttcttctttggagtatggttgatagtctacttcatggatgttttggattatctgaagttgcattggtttgatatatggaattctagaactttcttttcctattttttttacactacttttgctaaaatgagatttttccctgtctctctcaaatcattcatgtcctgaatttaggataatgttttctctttttttttcttgctttgattgcataattgacagtgtgaattcaacagagtcctgatggagacatcatagactgtgtgcacatctccaaccagcctgcctttgatcaccctttcctcaagaaccacactatccaggttcctctctctccagaacacaccactgcccctttttttacagttggggtaatgcttccccacatatcatgataacactcaatggtgcactatcaccacctttcagatgaggcctgattaccacccagaaggcctgtatgatgagtccaaggttgcatcacagcagaacacccagacaatcacccaaatgtggcacaagaacggcgtgtgcccggagaacaccataccaatcaggaggaccaagaaggaggatgtcctaagggccagctccatcaggagatatggcaagaagaagcacaagagcaccccaaaccccatgtctgtcgaccctgatatgctcaatgagagtggccaccaggtagggtagagtgtgtaatgtgttccattcaagaaccaatctccctaatagtacttaacatgttattgggattgttcatttaaatcttgtttctgctccatggtgcagcatgcaatagcatatgtggaaggtgataagtactatggagctaaggctaccatcaatgtgtggcagccaagaattgagcaggccaatgagttcagcctgtcccagctctggatcttgggtggttcctttgggcaggaccttaacagcattgaagcaggatggcaggtgagagggagaagaaaaacccacttaggtcaaaagttctattaaatgctttgttgcagcttccatttttgttcttccatgcgcccaattatgaagctcattcctccccttgcatgcgtcaataattcctgttttgcaataatgatatggtacactacgactggagaggcctttcattttaggagccagactagattatattcgtttacgaagattctttctttcatgagcaactgttttaggagctaagaatgctgtgatggccgattaaagctatatgcagtactctcttgcattgtggcttatgtctttattctctctacattattgcaggttagcccagatctgtatggggacaacaacactagactcttcacctactggactgtaagataaacatcacattcctttcaatcttcacgataattgttttttagcttctttttgtctcttgtttagatctacattcctatcttgctgttattaaactacagattagcctaatgatactgatttttgtattgcctctgtactctctgtagagcgatgcgtatcaggcaacaggatgctacaacctgctgtgctcggggttcatacagataaacaatcagatagccatgggcgctagcatctccccactctccaactatggtggttcccagtatgatatcaatattttggtctggaaggtaaaatacaagaaaccttcacatgcgtgtgtatacacacagacgaaattcatgaacggtgccagcgaatctatgcccacctgtttcttgttctttcctgaggcacctccagggcttaaggtcaaggctacaactgtggccctggcctgttttgtggacgcattcacagttgtcccccacacacgtactgtatttatgcatgctaatgcaaacactaatgatttgagttttaaacaaattttcacaggaatattctcctagagctcatgtttcttctgttaaaattttccatgtcattaccatgtgacattatgttggcatgccaccacttgcataaccaacaagatctcgctccacgtataattccgaaagtgggctatcaagctaaaataatttaaaactcgttttcatcaaagggtagatccttttcatagtgcatataatgaacacaaaaaggaaaactttatttttgcgcgtgcatgataacactaaaaggtacctacaatattcccttatcattatcctatcttctaactatgccccatggattgtggtttgcaggacccaaaggagggcaattggtggttgcagttcggtaatgactatgtgttaggctactggccatccttcctcttctcctacttggcagacagtgcctccatgatagagtggggtggtgaggtggtgaactcggagcctgatggcagccacacctccacacagatgggcagtggccacttccctgaggaaggatttggcaagtccagctacttcaagaacatacaagtggtggattcatcaaacaatcttagggcaccaagtggtattgggtcattcactgagcaatccaactgctatgatgtgcagaatggcaacaatggtgactggggcacatacttctactatggagggccagggaaaaacccaaactgtccatagtagaaatggaaaaattctatccatgcccctaacaaacccttgacacctctgtattatgcagtaaattagtttacacctcttctctttttctcctcttggtttttgttttggtttcaccattttcccaccaggttattaacttctaggtaagtgtttgacatgtgaaatttgttctcttcctcagagatgttggtctggctcttgggaggagtgcggtcaagtttctgaagagaaacaggcctgtttggttggttggtttgtgcacttgtgcctcatgttttgtcaaatattttttgttttctcccatgcatgccttcaacttgattgttggagccttggaggtactgcacttgttaagttgaattcaattaattaagctgttggtgcatgtgtgtggcctttggttaatacctgtaccagtatgggtttttctatcctgaaaaaagttgctaatcaagtgcttagctattggaatatgtgcaaagatgccaactttttgtgtgctacgtttggtggccacacttgggtcttctggaaagcggcattaaagttggttaagcatatggttagacctgggacttgcattctgtgaaggcaggtggagttcacattgcaagcaacagtgcaagcaccgcaccattgcttcagcaatcttcaagctcctgactattggtggccactgattgatttggttgtgagctgcctaactgaattgacatttttactggtctacggtttgattctgactactgcttctagtgtaaggcttttggatttcagtgctctagttgtggcatccagttcacaaatcacttgttcaagtcttcaagatgtaaggtttgattctgtccagctataacgcacaaggtgagatggaattcgggacgattgattttctggctggtcatttgatatgtttcatgccaaataacggtggaatgcagagcatgtctggataaaaataggagtactaaccagatccgttgacggctgcaattttgatattttagtccttttataaaactattttacaaactagtaacatgtccaagggccaaagtcatataattgagaattggttgggtggatggtgagaaaaaaatactggatcggtggttatgcttgtatgttttaatgggcagaccaatataagtgggatgggataggagaataattaggaatataacattggattcggtggttactctagcgaagcttactaaatgaggggaggggaggtttttaaagtagtaaagataaacctctaagaactagtaaatcgcaggaatggatcttctgctccacaaccgacactgaacacgagctcagtgctattgttaatggctttcaaggttagcgccgagtcgagggtcaaatagtttttttagtgcctagttctgaaataagttgtatcaaaggtccaaacggcaaacttgctgactgagggaataccaccaaatgagcttctgaaacatgtgagctgcatgattgtgcgaggaaagatggttaagaaaacaaaccacaccagaaagtaaccaaagcagcatgaggcttttttatttaccatgtaatccgggcaacatctcctctccagcgtttagctcgacagtagtacagtacagcacagccatggccgtagtagctcacgagcactcaccaagctgtctcaaaagggctatagaaagaaaacaagctgccttcacatgccacacaggggcccctgcttttcttttggttggattcgatggaaaataattacaccaacaaaatccagtcccaaatttttttcccaaaaacatcatatcgaatctttagacacatacatgtagcattaaatatagataaaatgaaaaactaattgtacagtttgcatggaaatagcgagatgaaacttttaagcctaattagtctataattaactataagtgctatagtaacccacatgtactaatgacggattaattagataattaattagacttaataaattcgtcttgtggtttccaggtgagttatgaaattagtttttttattcgtatccgaaaaccctcattcgtatcaaaaacttcttccgatatccggtcaaacgtctgatgtaacacctaaaaattttctttttgcgaactaaaccaggccgcaatgcaatgcaattcactgcaactgcaatactgcatccatccatgcatgcatgcagctagtagcagggctctcatcacaatctttctcactggctctgctgctgactccagtagtactgggctactagctgtagtagccagctgtgacagtggtgagcatggatggtttcgtgtgtttgcccagaggacaagaggccactgtggtattcatcaacctcttgacgcctctcttgtttgcaatcgcagagctcgtcgtttttcatccacatgcatagtgagattcttccatggtgattgtgcctttccaacttgtcaactctctctctctctctccctaccagcgtgcattggatgctgaattgctgatgtgttcttttgtttcgcccatttcaggctaattctcgatgtcttaggggacctgtgtgttcatgtgaattatagttaggccttgtttagggaagcttttagtagctgcggtttcttttagaatctcatgctccttcaaacaatacaaattctcgcatatattctccagttacttggaatctcaagccccctccaatagagccttaaccttagaaacttttcacaaatgtgtatactacatgaattgaactgtttttttaaaaaaaatgctccaaaagattaatgcttgcaagatgcctgaaaagtttgaggctccaaatgccagtttggtactctgaactctgcagggtaaccttcccctgtagcctgtataggcaatggtagcaactagcaaggcaccagctttccagagaggttgcaatgcaattgcaatgggacgaacaagaacacgacgtactcgctaaggagaagtatacgctggttgtctagtactgtactacttggcatacggcagagagaaagctcaccatctttctacttggcacaatcttcttgtacttttccgttttcactttcaccgagtaaattatcagggctaggaggaacacagccttttcatcattaaaagaggcagcaggagcagatcagagcagacatttagatctgtaaagcaatgcaactgtgtggatagcctgaattgttcagcagtagtagtaatagtagtatttgcgctgaatttttcagtagtatttgcagtgaaaaccatacgtgtttacggtgaaaatgccaggaacgggccggcattgaagacgatgggccaggaggcaacggcggacggggcggcgcttgttttcttcttgcattgacgcccattgcctgaaaatttcaactccatgttcctgaattcagagacaatttgcacctttcctgcttcatatgctcttgacttttggtagtagtacagtttttgataattcggtgaacctttctatttcaattgaatcacataagaacataacaggaagaggaatacacataaagttaactgattcttcagaaataggctgtctctcaatgttccaacgctaccaaatggacaggtgattaatactatcactgaagacaaataagtcataagccacaacattttctgatactgcaagtttatcattcttgaacatcatcatgattgatgagtggcacatgacgctcacaagtcacatcacacacaactatactaaaccatagactatctaaagaaaaactataaaccatagacaagcgttggtatcttttcaatggtgcacacacaggaattgtggggtagagtgatctttcatgttggcttctcgtagctgttttggtctctgaactctgaaatcttacttctgatcatctccgccacatgaggctgcacaaacatgtgtgtcgggtcaagcatgtgcaggatgaacttgtccgaagcgggcattgaagcattcagattaacaatgaactgtgccatcggtacatcgctgaaaaaaaggatttatgagttgattgtgcaaactagatagaggtgaagaaaaatgagctaaattttatcaattgtaaaaggagcttaccaggagatgaacaacccctttattgcattaaccatgttttctgctctttggagaacagaatgccacctgatcatttaatcagcaaaccacacagccatgtcagtggaaaatcagaagtactggaaaccttccccaacaatcagactctaaaacagtgatgcagtgatcttttaaagcacggtaaaagattgcaagtgaggagataccgagatagtggagatagagaccttactgccttctaacaaggataattatgagatcatataatgacaagcacccaacctataacttatgcttaaattgcttactgctaccactcaggtacataatagcaaggtgtgagctatgcttgaagaggcaataagttcaaagcaatactactggaagttgggtaactaacagaaatatgcaaaacactggagtggacagtgatttgtgctcccgtgccaatgatacttgcgatacaaacacagaaagtgaaccagcagtatctttcttatcttttctgtgcaacacatgccctcactgtgtgtatacaatgagacgacgacaaatttattactccatcttaggtacaaagctacaaaattccattagttaaagaaacagttaacgctagcaaattagttttacaggacgatttagcacgttgcgattttcgacctcggggaactatctcaatagggcaggcgaaaaaaaatcaacaggctcaaattgcatattgattgttgagataaagtagggttgcatcgggcagggtaatccaatggaagaaatacaccacactggtcgtaaaccttgcaatatatttcacgagcaagcataaatcagtagctcagtacgaatcctccctagagatctagaagttcatcttacctttgtcgcctccctgtgctgttgtcttctctagcaccggtgcgtcgttgtacggagcgatacgagcaaaccggcgaggaacaaggagcctgcagcggcggcggcggcggcgcgcggctcagggcggaggatcggaggcggaggtcaggcatagggttccgaccaacctgctggtcttgtttggatgaatcgggccaaggttaccccgtctaaactaggcccagatgtaagtggcctttcggcccggcccaaactatcaaaaaatcttaacaagcaaaatgccatcaacaaacacaacatttaaaaaaatgctattctactagtcaacttattgctattagtattagggttccatccaatccccgccgttaaaatgtgatagggttaacagagtgacatggttggaatcataacggattaacggtgatagcatttctaggataagttggcgcatgataacattttctaaaagttgagttcgtcggtcgatggtattttttgaaatacggttcttgtaatggcaattcatggatttttctcaaaaattaatatagatgaattcaccctatgggccggtccacaccactgtgatgatgtttctgaatcccacccctttgggctcaaataatgacaagaacagtggccagagaagctgccgcaagttgggtgaatcatcctttcgtatttgtacaaactacagataatgctccaaagaactacagataatgatatgacatacttgtttgtcagaaaatgtttgctacgtggtagcacatacgctcttcgctatagtaggctgaaatgaattaggagtaagaaataaatggcaagcatctggggacgggcaaaagagagcttcaaatcatcagtcaagcggtcaaaacttcagtagatctgcattgatcgtcggctggttggctcggcttggaggtaaagtccgaaatccatcaagaagttggctcaagactcaagagtagtcagatggtcaagaatgaatctcttctccggcattctgcagtagtaccaacggtgccacccaaaaatcattctatgctgccacttgccgatacttcaaaagatgaagccatgaaagtaaagctcatttctgcggttgtggtttcccaactgaatgcagatatacggagacagaaacaaccctgaaaattatagcatgagctgattactatcatgggttacaggggctccaatcaagagaatatgttgttcacttcaataagcacttacgtagatccgaggaagaaagcaagggatagatggaagccaaacaaaaagacagatacaactgctgtaagaagcatggcaactgaagttgagtacacctgcattacagttatatgtcagacaaatgtctgatgaaaagatgcgtaaacattacagtgttatcaaaatattttcagcagacagtaattggtgtgtaaatcaagtcagtctttgaagctgcatcaataattatacaagaatcttcagttgacattttatgaaatttagttatacatgtgcctcacgtatcacaaggttttgaatccaaaagagaggcttgtgcattatagttatcttttttcaacaggatacaatcaaccatccaatgtcctgtttagaggcctggatgatctgttcactaaaatagctcctcagacaggtatggaatatggaatggcatagtttctcatatatcagaatgtagaaaatgtaagtataaagaataattcaccagacaggcatgcgcatggacacaacacaatagaagatgttgttaaggtgttattaaggaatacagagatgtataaaacaaaatgtgctttgaggtgtaatgtatagtagactgtaagcgattcaggtaaggcaaaacagccgtagtgttgaataaaatgtaagatgtatttcacagtccagaattacttaaactcgtaacaggacattcacaataggaagatgcaaaatatctctattgggcataatccgctgagaaaagaatatacaaatgcaacatggttgaattctaagaccatataaatgcaacatggttgaattctaaggccatacaaatgcaacatggttgaattctaagccagctttagaagttcagcatttgtaccttgacaatattgtcagcatatttcatcaccattgatacagcaatgccactgcaaagcaaaaaaaaagtaaaacaatacaatgtggtatataaacctcaaaagagagcagacaaaacaggatccagctattagtacctgagtgcatgattaagaatcatcaaaacagtaatgaatgagtagccatgaaaaaaacctctgcattagattgcacaatcaagttaaaatggctgatagaatgaaacatatcaaaatattagcatgagtagatagattttgtcagaacaaacttattcatgacagcatcgaagtcctgaacacaaattgcaactaaattgaagagcattccaaaaatgtacagccaaaaattctgcacattgatgtttcttgaaggacgtttcttgatgattgcctgcattggtcaaacacgaacaatccacatcaaataaatcttcgtaaagtcaggtaaatataaaaggggcaaataacagtgtagtaaagtcacttacttctgtgtatacccccgcaaaaccacttagaagagccatcacctgcagaagaaagcacttccattaattccattggtggagtaaaaaacacatcgtgtaacatttgtaaataactgactgattatttccaatcctagtgactcacaattgccatcacccaaccttgaataggggtttgcagaacatgatctgacctggaaaataacaaattattttagtaattgaccatgatgttttgaagaaatatgaatattgttaagaatgaacacagacgaatcataacatattttgcttacgaggggttcagctgggctgtagtgcaaccggcacataaaagaataaatgcagcccactgaatttcacttaacctggaaagaacacaatacattcagcacatcgtgaagaggaaattgaagtaatttagattttaaagcacatcgtgattatgaaggtcaggtaagaaggctaagtaaactaccggaacatttagcatgccaaaataaaatgttctaagtaatattaatatctcaccacatctgctaaacacaaaacagcacaaagaaatcaagcagtttttttatgatatgtttgtgtggctctacttacaatgatgaaatttatagtgtgcaattgaactttagtacatgacttttgtgatataaatatagcacctttctggcagatttatatccagctatatattcccaacttcaaggttgatgttgataaagaataatgcaacattttccagttggtgagcaggtaaattaacattttttttcagagttgccgatatgttaggttataaccttgaatattctggagagtggaaagcttactttttctttagaatgatgcggtataacacacccgtgctaataatgttcaggttcttcaggatttgataagctggtgcatccacatatgcaaagatgtaatactgacaggtagcaggaagtggagaaatgtatcaaacactttctattgtgaacagaaaaatacttttagcatgaaagaactggacaactgaacatacctgcagtaaattctttaccatgtaaagtatggcaggaataggataaacactaacttcatcaaacgatgtacttaacctgaaaacttgacaacaaattgctaaagagtaggataaagacaacaaacactagcatgaaattaaacagcagcttatgatagaatcatcacctattatcttctgtaacaccctgactgttccatgttctgtacagggctatgagagataacagacattttaaagcttccacctatacatatatacaaaggaatacattcttataccaatagaaacaaaagaatggtcctggaggttggaggtactgtcaccagtcaccaagcggaatttgtgaaattttcctcaccgaaaaatttgccgtagtgacactatattcatattttccagctcttttcgaccacacaattagtattgcctgagaacttgttagtaatgtcaatgcaagtgtaacaatggacctgccacaacgcattactaataaatcaattgattttcacaagtatgctatttgatgacaaagattgcaataattaagtcttactttaacttccaactattcttgccctttgaagctcctgctgtgctaagactggaggttgctgaagctgtaaatggtaagatcataaggatattggagtcctggttatggatatcaaaagaaaaagtttctatgaggaatcgacaacttactgctagaaagagacctctcaccagggctttctatgtctttctgagatacaacatcatagctctcctttagacagtacagcagatacataacttgttagcaaacagaacaacagctgaagtacaagcttaattgcaatgctcatgactccaaacatatatggttgaatatatttgccagattgatgattatcagcacctgcttgccaaacatcaacagaactaaaaagaccaggcaaatctaagtcgaatttcaagtttaaaccacagagcatctgccaggtttggccactgacaggtgattgaaagcaccaccagtttcccaaatcacaatcaccaaacttgccgttatctatatcttcagtttactatttacaatacaggaattaagcattggtcactttactacttactacttcctccgtcccataatataagggattttgagtttttgcttatactgtttgatcactcgtattattaaaaaaatttgtgcaaatataaaaaacgaaaagttgtgattaaagtactttggataataaaataagtcacaaaaaataaataataatttcaaaaacttttgaataagacgagtggccaaacagcgcaaacaaaaactcaaaatcccttatattatgggacggagggagtaccagtaatcagataaattgtcttaaatctaaaaatgcggttgaatgaccgctacattgttaataacaatatgaactagtagtcactatcctgtttcatttgctacatttttttcagagttcaaaacgattggattacaaaagccaccgtctcactgacatcaagagccgcaaaacgcccgaaaatccggaaattctagaaccctaagtgaggaacagaaaagggccagcgaaaatcgcaaaaagggaacacccgttgcagcgatctaatctggaggcgcggacgcatcagcgcgagtggcattcctctctctctctctccattagggttgggcgggacttggggttggtgcttacctggtccttcactctcctgtactccatctcttcctctcgactccccacctcgtccccgccgccgacgccgctgccgtcgccgccgctgcgggttgcttccacggggaggaaggaatcggcgggaggcggagccggtgacgtgacggaggctgaaaggtgggccctcctgcgcgagcagagagcagtaaaggagcacgcggcgaggccgcgagggtggcgactggcgagtgagggaaaggagcacggcgtggctgaggagagaggtagcagatgggacccacaagaggtactttttttcacataagcccctgttgtatataatttatttacgtaaatcccattttgcttgtaagatgatgataaaattccttcagctcttgatcttgggccttgaggtgaaggagaaagaaaaagcttgtgttagaccttaagcataagatactccctccttccctaaatatttgccgtcgttgacttttttaaacatgtttgaccattcgtcttattcaaaaacttttgtgaaatatgcaaaactatatgtatacataaaagtatatttaacaataaatcaaatgataggaaaagaattaataattacttaaattttttgaataagacgaacggccaaacatgtttaaaaaagttaatagcgttaaatattttgggatggagggagtatatattaagttaatacaagtgtaatcattgttttaaggttacatttttcatatacgtggctgttctaatggtagcggtactgctgtttctcacataatctcctgttttgggttgaaaaaattggtagagatccaaatatgttacaaatcagtccttgatccggtcgggggtttcggctccacggctgcgctctgttcgctgacaccgacggccgctgctcgtatcatcgtctgatttgcaccttctcttgcatgcaaaaatttcgggctgctattgataattgagtattagaggctgctgaaacatatgttatctttgtctgcgctccaatggaattcatagtatgtaattgtaagctctatcctgtcgtttgagttgaagaaaagttttttgacatgttatatgcagtagtcatgttccatgtttctttgtgattattgccctgttaagatcccactctaaaattttacacattgtcacatcgaacgtttgaacacctgcgtgaattattaaatatagtctaaaaaataattaaatgcatatattgcgactaatttgcgagacgaatcttttaagcttaatttctccatgatttaacaatatggtgctacagtaaaacatttgctaatgacgaattaattaggcttaataaatttgtcttgcggtttactaacggattctacaattagtttttttattagtatccgaacatcccatgcaacaccctatataatatccgatgtgacacgtcagaaactttacactcatggatctaaacatcctctatggggctttttctacctatgaggcctcatatctacatcttgctgatttattggaaatttcttactgtcatttttatattaaatgctggatcatgaatatgatcacttcgatgaatcctttgtgacagtttcatttcttttcagtctcttcatggcatcacttgtagcaacactcgcatttctgttgtatgaatatgattgttgccttgttaagagagagtactagttgtaaacatcgttgccggctaggggtgaaaacggtatgaaaatttcccaaccatatcgatatagtttccacaaaactaatataataataacatttttaccaatggttaccgtttttaaaatttagtttttttaatttctatcagcgtggcattgaagttggcactaaatagataaattcataaatatgaaaatttcccgaccgtttccgttcgttttcgagaaaataataaaataatgataccatttctgaccgttttcattcctagctgccgcggaataccagcaagcaacaaagcaacaattccgtgatgggaggagcgatgtgggtgagtagagcagtagagatccagcaaggcagcaatcactcaaactcgagaaaatggacatttggccatgttcaaaaagtagttttgctgaaatgctatcccaaaaacacatttcgctagcatttatgagagatgatggtagctgcatctgcagacttccaaagttccaataagacttaagacaagtaagaaatgtacacacggtggagcgtttcagtgtaaataatatacaagtagattggcatctgttcggtgttaagctgtggcattgtgatatatcatgtgtaaaaacatgacatttcctagatcagaaaaaactcatcgaaaaggacatctttatttcatttacaaggacaaagacgtccctttctagaacaggacattcattcagcagaagacgatgaggcttttgcagcttggagcatttccacaataagtgtcttaacatccctataaaagaacagaaaaaacaatgtagtcagtctcaagatatctatatttgaaataatcatatcatagacattaattataaagtatcattcggacgtttagataaaaggcttaagagaacgcagtgcaggactgcggggactcacttcctgtcctgtgcacgcctagggaaggggatacgcagcttcagaacacttccatcatagcccgcctggacaaatgcaaaagcttatattagaagttcagggttggcttttgattgagtggacactgcagcacattaaggttcaacgagatatgttcaaagatgtatagaactaagtgtgtcgttataaagccaatgaggggctccaaaattcaaggtatctataggtattctttccttaaactgtaatgctatcaggattcaggaagcataacctttgctttcagaatcttatcaagttctaaatcttattgctttgttgattgttcgtcgttgaagcattgttatcattgtatcaaatgtaacatcagtatttcatatatttggttctttggttgcaggcttgcagcattccagcataacatctatgtaatttcatatagtataagagtaggacaaggaatttaaagagttaccttcacattgaaaccaagactatccacatcaagcatgtaagcaaagtccacctgagatggtttatctttttcaacacagtacatagaaaaaaaaagaacattctgtctaatatataaggtataatagtgtataaactaaaaagacaacagataagagtaacataaagcataaataggtgtgttttgggggggaaaataagacaggctcctgttccactactccacactattgtgatctggatatggttcaagagtactggcaaagtgatgtttacaggccttgctggcaaaagtgtgcacatcatgtgcatgctatagaattatagttcttgttgctaacactaaactggatacacaaaaatatcagctaggctacaaaataaatggtataaatttgttggacccaaactacagaactgggtaatcaaccccctcaactctcaacgcctccctggcttccattcccatgaaaaattgagagcatctagttgtgtggctatgcattgctaaatctgatcattgcgcaacaccaggataggtgatagggtgtggtcgtgtgggttcaggacatcaggtcatcaggtcgcgcttaacttgaggaacttctgggtgaggttatagacagcactcttgtgaatccatcctacatcagctagccatggtttctcagttacggagtaggtcttccctaaaaaaaacagcaacagtatgtttgaacccaagagtgttttccttttcccaaactaaacacaccaagatgactgaatacatgccattcagtaataacttaaatagttagttgcggaacaatagctcagcaaatgtgatttgcctaaaattttatgccaaataacatttgcgactaaaaactgtacataaattttcttgtttacttgccttgacagtggttgagtattgcacaatgagctttgtatcatcagaatgatccttattcatgtggctctgcatggaattaaaatttaacataattacactaacgattggcatatctacggtgatgccccttattgatggaaaaaggaaacagaatgtggacacaccgtaataggggttgagaattgagatattgggtccacttttgcctccttgaactcagcagcactgaattctggggatgtttcacaatagcattaaaatcaggcaccattatcatcaaaccatttgtcatggtttctattcttgtacaaatactagaagtggaaacacaatagaggagcatggctactcagcattcacaaataaatgagcaaataaaaggttgattagatatcgaaccctgaaacctggttcttataaaggataaccttcacttttcaaacagtggctcaactagggcaatgaagaaggcaacatacctccagaaccaaggatggcagttgcaaccccagacacatatcgcacggcttttggcttgatgtgcagaaaacggaagtcaccaaaatcaaccttatttggcattttttttcatcagaaatcagtacttcataaaacaacatgtgcttccaaaataataaaattgtccacatagcatacccaaaatgcctcaggatgtcttcgtaagtatgcacttcgtactgcatctttttcttggtctgaaacctttcaaacataatacaaagaccaacagatctatatttgttacgtaacatgaacaatatgatataggaaagtgtcatacagaaaagaatcaagggtataggcaggccagtatctggagcattacaggtgtggcatcaccatatacagtaatcacagtatctgttctgtcctcagggtctttggcaaccagaagcgagcatttaggattttcagagagattctgcaaaaaaaaaaaaaagtatcagaatccaagaagcttgcatcaaaggaaaaacatgacaatgaaaaattttccagctggactggtggtgaatgtagagttgcagtactattttcatatcactgctagtggtcatgcattttacatctgtatgcatatttagttatttactttgcatgtccaaacatctatgccaatgtagtaatagcgttattgtgtgtatgtacagggatatccatgcatgggaaacagtgagtatatagttttatcatgtattcaagatcataaaagcgaattatatcttacctttgagtgaattgctaaactactaactgctaatatgggggaaccatcctgatcacatgcaaaatcaaccattgaaccagacggatagccaacatgaccctgtaacaaaatagcatgttattccatgctcttgaggattgccctgtacatggcaatacaaccactactcattagtctacagaatacctgagaatgggtggcaaggacacccctaacactttggtccagaatggtccgtatttcttcaaccggaggaagtcgagcagctttttcctacgataacaaaaatcttgtttgagtatggaccatcgagaaatgataatgataaaaactaaaagatagatcattgaagttgaaggtttcccttctgacagttccacacttgttccgcaagttgattgctcagactcttgcaggaattgacaagggaaaggtttgcaaaagctcagttggtggtgttgtggctagtaaacaattggttctctgtaggtctaattcttgttatggaaacttcttcatgtaattgttaattattgatgcgatgcctacttgttgcaacattaatttgttgaaacattcacacacagcagagtagcagacagcctccaaccctgtttcacaataccataactaatccttcctgggaatatatttgacgtttgacttcttaaaaagaaactgactgtattacatttgtacatttaccaggcacgttgtcctaaatttgtggaatctccgggacactactgacccagaacaagtcaatttgtgttttttgtatgttgcatataggggtgaaaacggtcacagaaattaccgatcgaccgggcgccgtttccgtttaagggtactgtttccgaccgtaccgtttttggctatttttaaattttattttttcctaatttctttctgcatcatattaatgtcgatactgtgtagtttaaatgataaatatggtcaattaccggccgatcaagcatcgtttccgaagagatgctagcgattccaaccgtttccaatcgttttcacccctagttgcataagctactgcctggttaggttcctcgctcctcggggacatcacaaacaaggagtgaggtgtccaaggaataaaagggcgatcacgatgctaagggccgcacctggtgagcgcggatcacctcgaacgcgtccgcggatccgcccggtgcatcggcaggcgccgccatctgcaacgcagggaaaaagcggcatcagccagagtcacagccatattcacctcgggggcattccgtcgaacacctggtccgcaaccacccccacaagacaggccaaacaagagctggggcgcgcaagccagacctgagaggaggaggaggaggaggaggcgatgaggcggccgccgcggaaaccgtcgcgaggaggacggaggagagggggcaataggcggttggaggaggaggaggcgtgcgcatggtggcgaccgctttgtaggcggagcagccgcgagagcgttgacggcgccgcggccgcgagccgcgcggccggcgtgagcagcaagggcttcatctgcgttcgcgtgcacgcgtctctctagccgaggccgtgaagcgaggcgttgcgtgccgcctgctggcgtgcgtgcgtgagactgtgagagcggagtgaagcgatgcggtgccggtgaagcctcgtctggttgccgcttggtggtggctcggccacggcacggcgttggcgatgcgcttgcggctgcgggcgccgggtggacgaaatggcccaaatagccagccttggcatctgtcaacttggcaggcctaataacccagtgatacgaggatgaatgggctggtgaccattagcccattgcaagtatgcaactgattgagtatttgtacactgcaaaataacaagtctattttacctcctcgtctctttctcatgactgtcactcaaccgcaaaatcgggtataccgagtttctgacatgttttcctaaccaaaatgcgtattccacagcgaccgatcactcgtgttggcaacgtacaaattgcaatgcacaacttgcctaatcccagtatcacacgactagacgagcatctgacatcgtaccgtgttttcctaaccaaaaatgcgtagtattccacaacgaccgatcattcgtgttgcattggcaatgtccaaaatggcaacgcgttctaccactttctacggttcgttcaacccccaacatccaacccaagcacagaatcactacgactcccacgagcttccccttcccctccctccatctggcgccggtcacggtcacggcctcggcgtgcgtccagtcgaaggaggaaatgcaaaggcggttaaccacgcgcgtaccccgcgtcaccccacgccgcaaaagcaacggacaaagagagaaaaataggagtaataaaggagaaaacgcaattgcaactggacggcagcaggagtggtacttatacgacgaacctaacgcgtgttcgtaatggttgccgcagactttttgcttccgaagaattgaattgttcttcgtccacgaccttccagagggatcgaaatcttggagttggaggacggcattgtgttgtgctggtggtctggtaggatattattccgctctgctcgtagaaaaaactgacgtctattttgtagtttttcgacgcgtccgtccgttcgttagcacgttgcaatcagggttaaatcaaatttagacccggatttcactctgaattccatgcgcgaactactggtgaatgtactacacgagagtgtcgcgatcgcagcaaagcaaaaaatcgttggccttcttggaattttcagagggggaggggaatgggggaatggacaaaagagaaggaaggaaggaaggatggccggccgcattgctgaatttagctttgacagctaatttcgtggggggccatttggcaactgtcacgccagctgttcccactaggctggccttcttcccccatgagtccttgccccccttcactcttgatcttctgaatccatcttcgtgcaacctgagctgggttttgcttctttgttgtgtatagtctcattgttccgctacagttgattataagttgtaatgcatgtttctctcaaataaaaagttgtaatgactattactccatccgtccctaatataaaggattttggatagatgtgacgcattctagtacagagaatttggacaaacggtttatctaaatctattatattattaaaggaatagaaaaaggagcctccacgttcgctctcacggcctagaaattctcacattaatcggagaaaaagaaaaaacagagtctatatagaaatacaatttagaaatagctgaaattcggaatcaaaaaataaggaatattagaagaggagactagagtccatataaaaatacaatttataaataactgaaattcggaattaaaaaataaggaatattagaagatgagactagagtccatatagaaatataattaggaaataactgaaattcggaattaaaaaataaggaatattagaagtagagtatagagtccatgtagaaatataattaggaaataactatataattagaaaataactgaaattcggaattaaaaataagaaatattagaagtagagtatagtccatatagaaatacaattaggaaataattgaaattcagaattaaaaataaggaatattagaagtaaagtatagagtccatatagaaatacaattaagaaaaaaataaattcgaaattaaaaaaataaggaatattagaagtagagtatagagtccatataggaatttaaaactaactaaaatttggaataaacataatgaaattaaaagtagagtttagagtccgtataaaaatacaatttacaaataactaaaattcgaaattaagaaaaatatgggaagaagagtttaaagtcaatataggaatacaatttagacgtaactgaaattcgaaattaaaaattaaagaatattgaaagatgagtttagagtccacatagaaatacaattagaaataataaaaatttagaaataaaaataaataatattggaagaagatcatagagtctatatagaaatacaatttacagaaaattcggaattaaaataatatattaaaagacgagtatagagtctatatatgaatatatataatttacaaataactaaaatttgatattaaaaataattaataactaacaagtatataaaatacaatatgaatattacacattagtagttttgtaaagttattgcaaaatttaaaattatgttgtcattttaatatatttaaataatataatgagaaaatatatatactattatatgatagaaaatataatgatgctagccgcgcaatctgcgcaggccaccatgttagtttattatactgtgatatattacatcatccaaaatcacttatattatgttgtacatatgttcttaatgacatagaaatcaatgttgaaaaataaaataccatgaaaaacttaaaaatcaattttaaaattcaaaatatgattggaatgacaagatgaagagcaaacgataaaataagcccttatcgcgctctttttatgcggaatggttaaatacatgaataatttgagataattgtttgaagattaaaaaaaacttaatgcattaactattataaaagttgaaagaaaagaatgtaaaacatttttttaaagaattcatatatagttttttttaaaaataccatttagaagttcgataaagaatgtgtgtttgttgattattccactaggaaaaaaaggagacagtaaatcaacacgtgatttcttttttgttagccaaatgatttctacgttatagtattgcaaagacttctaaaagggttaaaaaaaggcctttgctagttgtcatgttaccgttgcttaagcgtccgttatagtcaacgtgtctaaaagaaactatagttctcacctctcaatggactgtgaacagtattctctaactcaaaaaaaacaagattcacatcgacagcaaagaacgaagcatgtgcactcgtggtgcacattgatgatgaacagctactacaaaagcctggaaaaaagaagaccaccacaaacttggccacggttcacgcgagcgagcagagcagacgacgacgatgcgagacgcgcgtgcattggccagagaggatcccaaccggcaagtcggcaaccgcaacgccccaccaccaaacccgcggaacccaacaaacggccagccgtgcgccgtgcgcctctccccgtcggtctcccccgccaacccgaccccatcacccctacgcgtacgacctaccctaacctgcccgcctatataaacccccgcctcctcctccacctccacctccccacaagccgcctcctactactactacccatctctctgcttctcgccagaaagatctagaagtcgaagccctaatcctcttccgagttccgaagacaatggccggtctcaggatgaaggcgctcgcggtcgccgccatcgccgcgtccctcgtcgcgtcagcggcagccgaccacgcgccggcaccggcgcccgtctccgacgccgcccccgcggtgcccctcgcggccgcctccctcgcagccgccgcgttcggctacctcttctgctagatcgatccccttcgatctgcctcgggctgatccgtttcgtcgtcgtcgtgtgcgtgtctccgtcgtcgtgtggtcgtcgcgtgggggggatttgtgtatgtaattaatgagtcggcggtggtgtgagggagggagggtgtggtttcgcgccatttctctgtggcggcggccatgtacttactcttcttttttttttatttgtatgaattgagatgatttatttgattcttttcagtttaaagaacatgagtatcgcgtactacatggtgacacttgtatgatgttgattgtcatctattggcctatcgtttaaaatatatcatacgggaactaacgagagattaacaattcagaccataaatataaaatctctcctgcacaaacgttcaccactccaaactgtgctatgttaaatgaacgacagggtagtacaatcatcttcaagattgtaattacctcgtagttacgattaaaaaaaacagtagcatacaatgttcagtgctccaatttgtgctctgaatgaccaaagaactccaatttgtggtcatagcgctccaatttgtgttctgaatgaccaaagagtagcgagtggcagtaaggctggacgcaaattattgcattcaaagtttcaaactgcgagctgttaaatcgtaatgctggcctggagagatgttcgtgattcggtgatggatccaaaggccgaaatcattgaagcatgtttgcccatgtgcatcttgttgagtagtggtccacatatgagttgtcttagtggtagcgcagctgtaccggctaccaactgtacgattccatggtaaacacagtttaacttcgttgatttttttttacttagcctaactgttctctaggcttaatgcatcgtgcacagtaaaaaaaggaactgttgttgcagatatggccatgcaaaaggccaaacaaagattcagactcctcatctttcacgagtacagttaaatgctcgagagttttgcagctgtatgcaattgcgagctagtaccgccgtaaagcacgggcgaccagtaacgtttttcagtgacaagtgatttttatacgtgtcgacggctaaccgcaatgaagatggcagcggcagaaccggggcggctggccgacctgcccgggaattgcagtgtgttctgtttctcggtaaaatttctgaagagcctagtactggcgtgatgtagctgaactctgaagattgatggtaacttctaatgtggttctttgaagctagccgaatgggtcaggttcactgcaattgaccgtaccgtacaggcaagtaggcaacgtgtggcgtactggcgtggaaccgtggatggttcattgaaccacagccagcgctgcttttccgtcgggtcatcgcctcttctgaattttcccgtcttcctcgtaggctcgtggcatctaccctataattcaccaacccattttactcatctctcatcttacactctaacattcttacgccttacagatccaacagctcatatttatctgcattgaatccaacggccccacgacgctcgcaccccctccgtcgctcccccaagagcgcgcccctcccgcacccccaaatcacgctcgctcccctaccgcccatcgcacccatcccctccgcgcatcccggccctaaccgccgcacccatcactcccctcaccatcgccggctgtctccctttccaaccttgccggccgccgattcccctaaccgtcaccatcgcgccgccaccgatctggagtcgcctgggtcattgtcgcccccaagccgcataggcacgacccggcgtggtccttgtcgccagcgtcgccaccaatctccgcctcgtcccctgcctcgccggtcttctccgagaacccacgacctcgcgtccgctgtctcctctgtcgctagatcgctatcctcttacgtaccacccgcctctccggctccggttcgctgcgagtgccgtggcctatccccccactccgccgcatatcgcgtcggccgggaagaagggggagtagtcgtgttgcagttgtcggcccctggcacgagcgcaaatgatttagtcggcgtgcgatggtggtggtctgacaagttcagccgaccgatgcatccactgggagcccaagccgacactgaagaagaagccctctgccgttggccgtcggtagtgccggcattgtccagccacttgtggctgcgccggacgtccacacagggacgctgagccatccatacaggagcagacgtggacgcactgacggtggcagtttgacaggctcagcctatttgacgcatggggctctcatctctatggtgtaggtaatgtgaatcaacattcaaaagtactatgtgctcatttggtaaaggagatgctcgagaatagtaaggccccgtttaattccctaaaagtttttccaaaagcatcacatcgaatctttgtacgcatgtatgtagtattaaatatagattaaaagaaaaactaattgcacagttaagggggaaatcgtgagacgaatcttttgagtctaattagtttatgattagccataagtgctacagtaacccacaggtgctaatgacggattaattaggctcaaaagattcgtctcacggtttccatgcgagttatgaaattagttttttcattcgtgtccgaaaactccttccgacatccggtcaaacaaccgatgtgacactcaaaaattttcatttcacgaactaaacatgccctaactgattcctttatattaacaagttctcacttcctttttaatatattaatgattttaccacctctttttaaatatattatattatgtgttgtgcaatgcagaagtatatttataaatgagtaacccgaaacacttgcaaaaatactctatctgagttgctgttgttgtcacttgaagaaaacaatgagttcttttagagagaagaaatatattcatgtggttatttgagcagtcggtacagtattttgaagatgaatgatgacttgtttcatatcatgacatgaacaactgattggtttgtgaaacaatgttacgcattgctggtttatttggtctgaatgtaccagttccaattggttgtagcttgcgaattcattttctttttcttaccatgcttatataggcaacaagtttcctctatgcagtgcgcatgaagggttgtagctgctggactataccatgatgataatctgaagggaaaagaaagagccaagggatgttacgtgtttgaattagaggtaaataaaccacttaaaatgctagatatacatatgctgacctgttaattttatgatgaaggttgacaatatatttgtttgcaccaataaaaattacaacagttgatcatctttggatagtggtcaggattggcacatgaatttagttctcatcttttcatactacaattattttggttcaacatatagtgctgctttgattctgagaaataacatcttctctaattaagtggaacattctatttaacagggaacactcattggctttatcatttaaaagcattttgcaaggcatgttcttctcaattgataaaagtgagcagtgcaaatattttggttgagtccctcgcgccgccaaggatcctgtgccatctgctccattgcaccgccaccggaaccctctccaccgtgctgcgaacaaggaaatcattgcttgattccgttccttcaaccattacagttcaaatgcaaaattatgaaattagtggatgtgattgtgaatgatagtgtcacgtctcttatgtatgtgcatcccaatatcaatggctattatgcatctcttcgaaagttactgaaatagagagaaattataaaataaaaatgaatatatacttgctgtttaattttcctccctcgcactatagcatacactactcagaaaattgaaaataaaaatgaatgccaagttattgtttcacactgattttagactcaatctatatgtttctctaactcaagtgattattttctggataacctgggagaaaacaatttattatgtgaatgtgtgtgagaaaattattgtctgcatatttttctctaatttagatagcaggcctaatcttttctcaagctaggataaggcctgagtcaggaaatgactgatgatggggcaccatgaaggatttgtcgccatgttcttcctctccgtccacggccgcaagctctccgaccaagtcactggaacccctatttgtagggttgtttaaatgagttgcttccatgttcttcttcagtagcatataatcatttccaagggcaacaattcgatggcggcagattttaaatgaaccaactgcatataaacccaagtttgcattgctttctgtattgtacatatttgatatttgatagccgctgcatataaacgctgcatctgaccacctgacataaagctagctggagatgaccatgattcatccgtagctttgcacattagtttgcacctaacattgtctttagtgtgatgcagctgtcagaatcgtcaacaccaacgggacgagcatgatggatgaactcaggaagaccctggatagaagaggccctgggtaattgccatctttgctgcaaatgcatgctttagattctgctttgttcagagttcagcgatgtgatgcagttgtcggaagcatcaacaccagcaagatgagtgatgctaaagtgtttacttttgtttcgtttcctgtttgaatggcaatttcaatgaagcttgattatttattcttctatacatgcaaatggattgcattgtgtatagagtttgcaaatgttagcaagcaatatatattgtgggaaacatgcatttatacatggctatataattattaatatattaaaccattctttttattgtctgaaatcatatattagatttgtattattaaatatagccgtagcgttagcacggacaaattactagtatgttctggtttctaaaccttgcttagtaggcgcacagcccagtgaacccagcagagtgagacctgcaaagctatgggccgggccactaccaaatcaaatggttctcaacccaaacttgggctgctagaaggaaaactctcaagtcattgcctgttagtttttctttttggggatgctatataatgaaatgtcattcggacggaatgatataggagtaggttagttatcagatcatgacgtatctgaatatttgactcttctttgatctttgagatcagacttgttgccgataggttttctttttttgacgcgaacattagggaatgactcgaacccaggttgtttagcccaccatcttgtaaagccagctggaagaccccagctggaagacccctgagtgtttctccttttcttttctttttttttcttttttttgtctgaacgcttgcagatttcgctctttccaaatctgatatcaggaagataaaggctactgggtactgggtactgtgctactgataatctttatcgtagcttgcactgcagatctgcagtgcagctgattaacgagaaatacatgagatttatccccaacagattaagcagtttgcgctacaatttccccaaacatcttgcacgcgtacatgctgttcttgcactcaataaggatttttttttctctcattgcacttcttctgttaatgctagcaaagctaaagactcagttacatgctagtaactgattgtgcagctgcttcacttcacatgaactcgcccatcatggcgagcacctgcgccatcctgggcctctcctccggcgcctcggcggtgcacagcatgccgatcttgacccaccccatcgtctcatcctccccgccatcgccgccgccgccgccgttgccgtccccggcattgtcggcggtcaccacctccaggagcaccatcccgaagctgtacacgtcggactcctgcgtcgcgcgcgcgcccgcggcgccggcgccggacgccagctccggcgccgcgtacccgtgccagcctcctccgcccgccgccgccgccgcccggtccaggaacagccccggcgggcaccgcggcggctgcgggatggactgctggatgttggcggcgtagcgcatgaccccgcactcggagacgcacgccgcgccgtgctcgtccaggaggatgttggacggcttcacgttcgcgtgcaccagcgccggcctcgccgggaacgtgtggatgtagttcagcccctgcgccgcgccgaacaggatggccttcctcgccgcccagtccaggctcctcccgccgcggccgcctcctgcaacaaacaccagcaacaaatcaagaacacctctcgcatcgcgtcaatggcgaccgatcgagtcggcgcggcgccggcacgcaccgttgctgccgtgcaggagggactggaggctgccgttggggaggtagtcgtagacgagcagccgctcgccgttggagttgcagtagcccctgaggctgacgacgtggcggtggcggagccggccggcgagccgcatgtggcggtcgaacgccttgctccggccggggaactgcagcgcgctgaggcgcttgacggccaccacgatgccgtcctccagcaccgccttgtacgtgctcccggacacgcccttgccgagcacctccgccgacgccttgagcaggctctccagcctcagctcctcgccgccatcgaagcagacgagtccaccaccattgctcttctgccccttctcctcccgattcctcaccttgtcttcctcctcaaagctcagcgccgcatcggaagcacccttccatgaccggagcttccttctcatgtagacgaacatggctacagagatagccacagagatcaccatgagcgccgcgttgccaatgccggtcgccatgagcgccgtcacactgagcttactcaagcctccattactaccaccactactagcctcctccattgccgcactaggagattgtccgacactatctcctaacgcattgtaagcatgaacacatctcggaagaggcaggccacagaggccaagattcccgccaaaagacgagctcgggaacctggaaagatcgccggagatctccccatccagcatgttccgtgaaacattgaagctcctcaccatcgggacgctgagagctcgcaggtcgccatggaagccgttgtgctccgctctcagggtgaccagagaaggcagcgagacgcggaggcctccggtgagctggttgtgtgagacgagcaggtgcctcagcctcgggctggtggagttgtcgagaggagggagacgaccggacagcgagttcctcctgacggcgagcacgccgaggcgggcgagcccgaggaggggggccaagccgccgacgagcgaggcgttgtcgaggaacaccccgaccaccctgcccctgctgcacctcaccccgatccatgcgccggagcacgggtcgccgccgacccagctctccagcgcggcggcggctgggttgtaggatttgaaggagaggagcggagggagatcctggtggccgccattggcgacctcggcctctccgcgcacgcaccacgcggcgaggagcaggagcagcagcaagaaccagcagcaatggtgggaatctgccatcgttggcagctgctgtttgagagagagcagtggttgattgatccagtattcgagtgagtgagtttttatagcagaggtgaggaggagaaggagaagaagaaatgcgcggggaaagtaaagagatttttgaaaggcaacacgggtggaagtggtgacaagaagagagctccaaaaaggaaagctagagaggagagcggcgtgtgcagtggcagtgaggagagtgtgggcacgatcacacgacacgaggagaggaacaagcagatgaggcgaagcgaaagcgaacaaggcttggctgctttttctccatcgggggcacaaggaattttggacgcttttggtgaggcaactaaatgcgtgagctatactgaactgagcactgcgtgtatccgtgatggtcgcagtgagattgtgtatttgtgcggtaatgcgttttactttatggaaatgaccaaaaggaagagaaaggttgcaaggctcttggttccatagaggcgtcgatgctgttggtttcactggctgtgggagaaaaccgacagggaattgggttcaggggggatttgccaagtgccagcgcgaacagtggtcaagattccatcttgtgttcagctgctgcctcgtccatgggcaaagggagtggacattcgtgtctcttcacagcgtgcatgctgctccgggtcaagcagctgcgggtcagccaagccacgacacgaatgcacgactcactcgacccggcccacaggctacaagcttctcggtactgtgctgttcaagagctaagcactagtagtgcactactacattttcagatttcagaacaaacacaagtataacttcaggttttagatttcagaacaagcactactatatttttcagacttaaaagctaaagtttaacatttcagagcaaacacaattacaacttaagattttagatttcggaacaagtattactacattttcgtatttcaaagctaaagtttaaaatttcagaacaaacacaagtacaacttcagattttggatttcagaacaagccctactactgtattatcaaattgtagaacaaacacaagtacaacttcagatttgagatttcagaacaagcactactgcatttttagatttcagaactaaagtttaaaatttcaaaacaaacaagtacaacttcagattttagatttcagaacaagcactactatattatcagagaactaaagttcaatttttcagaacaaacacaagtacaacttcagatttgagattttggaacaagcactaccgcattttcaaatttcagaattaaagttcaaaaattcagaacaagcactagtgctaaagctcgaaaaattgtttttgacaatatactaagactgatttcagaacttaaatcagaactgagttctaaaaaccatttgcacttgagtttaaaaaataaattaagaatttcagttttcagaaggcaatatcagatttcaggacattgccaaaattcacatggacaacaacatcatatctagggatgaaaacggtcggaaatgatcggaaacaatatcattattttattgttttttcaaaaacgaacggaaatggttggaaaatttccatatttataaattcatttattaagtgtcaacttcaatgccacgctaacagaaatttaaaaaaaactaaatttagaaacagtaaccatcgtaaaagtattattattatattagttttgcggaaacggtatcggtatggtcggaaaatttccataccgttttcaccgttcgtatcttgataacttaacttcaggcacttgacagaagttaaaaagtttgactagagtactcctacagtcaatgcaactgctgtcattgtagtttccgtacttagggcaatactcaaaccttgaggacttaacttcaggcacttgaatttcagtatgttaaacttacattcaggagctgttcgttaaccggattatgtactgaactagtgcttagcttcagatctcaatgaaagaaaagtcaggaattgtgacccacgacttcatattcagaacttcgaattctcaaataacattgtgcatttacacgtgctcaattaaaatgaaaccgatattcatccatgagctatgatacggggttggcgttgcaagtgattgatcggattacccaggaggggtagcattggatggaagcgaggctcaggatcctctatcttcaaaggtacgtgcctttgtcacttacatgtggacccaataaaccatgggcccacttgtcagtgacaaaagcatggtgcatttgaaggtagaggatctgaatcaccatctagtccttttcactgctcaccttgaagtttctattgtctgtaacaactttgtatggctttgttacctgtatataagtatattccctagtgatcatctaggcgagttgcaaatgaactttttttttctacatcttccattttgtattataagtcatttttattttggtcaaagtcaaactactttaagttaaaaaaagtttttagataaatgtggtaatatttacgacatcaaattagttttattaatctatagttaaatatattttcataatatagtaatgggttaaaaatattactattttttcttataaactcagtcgtactttaaatcagtttgatgttggctgaagacaaaacgatttatagtataatcttttaaaacggagggagtactaatactagtactaggggagtaccaacgtggaaagcttttgcctgcgcgtttgaaaaaaaaaaaggttggtgcgacgggcggacggggccagcggcgtgctgtttcggcagcgcaacgggcgggcggggccatgggcccatgcgccgtgcaaagcgcgacggtatgcgcggttaacgaaaggccgatgcgtgtttttatccacgaacggagggagttggtatataagcagccaagcagggcgacggcacaccgcccacatccacacacacacccacgattccccacaaactcaccggccatgtcgacgacctcgccgagggcggaggaggacgcgaaggagacggtgaagccgatcttcatcacgctcaaggtgatggaccaggaagaccggaggatccgccacaccatcaggatggccgacaagctgcaggtggtcatggacatgtactacgccaaggcgcccgatgtcacctacggcacggggaccttcctcttcgacggcatacggctgaagggcgacatgacgccgatggggctcgagatggtggacggggacactgtcgatttcttcccggttatgatcggcggcggaggatttttccaatgcaatcttcttcccagttctcactagtagtctacgactgtcgccgccgagcgtcgtagactcgtagttagaattgttcatcctctgcgatttgccgatcgtcgtagtttgcaatttgcagtgttttatttcctcatggcagcagcaatcgatgttaacattgaatcagttgttctgggatgattaattatggcaacagtagttgatcttggcaagtcactagcgtcatttaatccactcaattgccatgcaatgcatccgctgatccgccatagcctataggaaaccccttcgatgatatcaccgtgcaattactgcggcaacatcaaggttcagttctgagattacgcatatcgccagttaattaaaatcatgctcttacattggcatcatatattcatatatgctgattgaacagcaaaggaagagaaatattatgaatatggatcacgttgtattgagtcctcaggagttggtaactcggtatatatatagcaaattacaaggataaagataaggataacttcgagatacaaatcaatcctatcctagctaatggagtactatctctagttagaacttaacaatatactacataagagtacgtagggtgaaatccatggcaacgcaactactcagatagctacgcaagtacacctacgcagatagctaaaacaccggaggcgatgtacggctggtctggcatcccagcggcggtgaaggtggagaaggagaacgaatggaagacgccggcgacttgggaatggaaggcgccggcgaccagggtggccggggaatacgtcacgctgaaggtgcagggcaccgacggccgcgccgtctaccgcaccatgctgcggacggaggagctgcagggactgatggacttctactacgaccgctcgcatggccgggtgcagcgcggcacgggccggtttctgttcgacggccgccggctgcgcggctggcagacgccggcggagctccagatggaggacggcgacgaggtcaatttcttcgaggagttgatcggtggcgccgccggatctggatgggatcccccatcgtcgatcctcgcgtagcttgttcctggtagttatggatttagtcttttagatatgaacactgctacacatactatttttttcttactaaatctttactaacaatcatctcaaccgtttaatttagatagatagaagttataaaaaatctagatacacttactggtggagaaaccatctttgatcggtcgaccaaattccacaatagtctcggttctatttaaaaccgggactaaaaacgattttttagtcccggttaaaaaaagtctcggttccatttaaaatcgggacccggttaaaaaagttttgatctttaggccctaaagataatttttagtcccggtttatcccctgtcagggggccgatgatatttagtcccggttcataataccaaccgggactaaagattaccactttagtctacatcctagttgctagtaccaaccggaagtgggagtaaaattcgcaaccacttcctcacccacagatcgatccttccctcttctcctcctcccccctctcctatcttacacagatcctcccctttctccttcccctccccttcctcctccctcacctggagatagatcttacacagatcctcccattcctccttccttcccctccccttcctcttccctcacctggagatggagaaggccgcgccgcgcggacgcggtagacggacgcgcagtgtgcggcgcagacgtgtgttgcaggggaagcacatgcgcgcagtagtaatggtagcggtagccggcagtagtgggattgatatttcgtgattgatttcttgagtagtagcagtagtagcggttgtgggattgttgcaagggaagcacatgcgcgcagtagtaacggtagcagcagccagcagtagtgggattgatattttgtgattgatttcttgagaagtagcagtagtagcggttgtgggattgatttcttgagtagtaggattgatttcttgagtggttgtgggattgatttcttgagtagtagcactagtagcggcatccggcagcttgttttctctctctttatatttttttgatattttgtgattcactaagatgtataattttgtgattcattgtatagatttaagatgtataatctgtgttgtatttgatttatgtgtaaattttttaggatttgtgatgtattatatttgtgtgtataagtaactttaagatttgtgatgtggatttaggatgttactttgatttggggatttggggtttgatttaggatgtgcatgccatccgattcgggagaaaataaaaaagtaacaaaaaaaaaaggggaccatccgggactgtctctatcctctctttagtttcggttggtaacaccaaccgggactaaagatccctctctttagtaggactaaagattgatctttactctcggttatttcacccgggactaaagatagcgatcttcagtccctagcactaaagattgatatttactctcggttatttcactcgggactaaatatagcgatctttagtcctggatttgtagttccggtcaaccgggactacagggggtttacaaaccgggagtgacagtttctccaccagtgactcatagcatgacacatcagtgttagtaagaatttagtacgtatagacttttcctttaggtatatagtccctactatcattatcattatcatctgaataattatgccagtaattcgctctagtccaaaccatatctcgaactaataagttcgtattttgaaaatcgaaacccgaaattctgaacgtacaactccaatttcacttatgcacatacttgataactgaaggtagagaaaatctatactaatataaaaggtacaagttcatccagcaatcctacaatccttcggatccacttttgtttctgagccattgatctgcgagatcctacgaacgatattcctttcacgatcctcccacgcgcgacccttccctcttcctcagcgagaaaaaaccgctcctcctcctcttctccgcgtccccaccacgtgctccacctccggggccccactctcttcgttgcgcccccaccacgccccgcgtccgcgcctcccctgcctcctcaactcctcgtcatcgtcggttcccctgtgtgcctccctcgccgccgccgccgccgggggcggttccctactctgcctcccccaccacgcctcccacatcgcgccgcccccatcgccgcgcccccacaacgcctccaccgtcggcacccccatcgcgacacccctgagctctgcatcgccgccgaccgccgctcctgctcgccctcatctacgacgccgccgtcactaccctctcttcgctgcgctgcctccctccccggcgtccccatcccctcctcgccgcgccacttccccatctgccgccccgcctgcttacctccccggcgtccccatcccttcctcgccacgtcgcttccccattcaccgcccccgctgcacgcctcacgccgcaaccccgcagcggaacccaccggcgagctaaccgccgtcccggcaggtcgccgtcaatcgccgtcgccccgcaggtcggcgttgcactgcagagggatttccccgccgaacggtcgccgcagcaggtctacgccaccttcttcccacgccgactccatgtctaatccctacctcaccacaggtaggcggcattgcttctgctaccatcttcctcttttgtgtttcaatcaacaaccgtttgatttatttctgaatcaaatttcctcttatgtttttcaatcagcaaccgtttcttgatttatttctgaatcaaattttcttcatgttaatcacttcacattcctgttaatcacttcactaatgagagttaaaaataagattctgagattaactctgagaacagcttaggaaagttgatattcacattaatttcagaacatcatgttccttgtgaataaatagtatgatcttcaagcacttcaagcaactattatgacttgtttgttttccgcattgtagtttcaacttgtggttccagctgaagcaattggagatttattaaatctaaggctacatgctaggctgctatgagg

SEQ ID NO: 5336 - DNA, 1161 bp, Oryza sativa
catagattcggtattcctcaaacgttaaagaagcttcttttatgtccaaagaagtgagaagttttgccgaatcttatgatattaagttgttgagttcttctctttactacgctcaggctaatggataagccgagtcgagtaataaaacattgttgaaattgccgttttgccagttgaggtaaatcttggctctcttcggtatttcaagcaaggcgacttgtcggttaaagattacaagaccttgatgggaagtaatttttgaagatgtcatcgacgagcgtttgaagactttgagggagatgaagacacttcgagatggtgttttcagagatcaattaatgggaaatacttgaagaaatacttcccgagtatttggcaagatgcttaggaagtcttatggccggtaattggattatcgccctgagataacatgttctatgcttttaggttcacgtctgttcaccaaaaaggcaggggggcatgtgtttacacccaaatttagcacctatggacgaaataggggaaaattgccaaagtttggaaagtgacgggtttccttactcgggaaggcaggtttcgtgtttcctttggtttctatcccgagttggatgtggagaagggcctgtagagggcaagaccaacccctatttaagggacaaggccggttcattgtaaaaccccccaatacaatctacttgaatcgttcttttactatgttttctattttaccctagtttagtccatctttgtcggtttgcgccgtaaaccgtccgccgccgctgcgagagtgcgacacctctttgtaggtttgtcctgaaaaccttccgttttgcccacgagacgggtagttatcctcatatcgatctaaatcggcctagaaactgattttgatatctaaatcggctccgctagccggtttagcttttctttttgcaaaacccatcttgatttggccctttggctagatcgaggtggttggcgactccatatcaccgcaaggtgtttaggtgttgcgatcgtgcttgtcgacttatcaaaaaaattatcaacacgtatatgagcacttctaaacacccgacgtactatgtaaaaattacatggaaaactccacgcaacacgggttaaccgactacgactcaatttaaccgaaaagaatattac

SEQ ID NO: 5337 - DNA, 2670 bp, Oryza sativa
accctcgagtatcctgctgaaatcggcctgaagtggtaagtcccggaagggtccgttgggatggccattcccaacgccaccttcacgtgatgagaggttatctattagtaatcaacctaagcagcaacttgcggaatgtacaagtcaaaaatcatcaaactacgagcataccttgattgataagttcttgaagggaatatgcagctcacatggtgtccgctgcgtgatctcatcaacggggcaggtggtttcgtcctaggtttgcatggcgtccatactctgtgatccgacctgccccgttgaggcgcagctgctacgattgcctgatgggctgaccattgcaggatgaatgtacggctggggatcctgggaccgatgtgcggccatacgttcatccaccttccttgccacctcctcttgcatgctgagctcgtagctcgataccctgtactcaagatctgcaatcttcgcctcggtatctctcctgctcctcatccgactcctgtacatgtggatgtcctccttaaattcaatcttccagggaatcacgcctttccctcgtgttcgtcctggaatgtgccctgaaattcaatcttccagcgagtgacagctcatccttctctctgtcgggtcggaatgtgccctgagaagaggctaccactacgtccgttagtcgactggcagcctcgcgtatctgatcgctgaagacaagggagccatcaactgggttaagcgttccaccgtgagcatagtaccagaacttcgatcgatccggccaattagcggtggccggttcgatacccctctcaagcaagctaacctccatctcctcccacttcggcttcgcgatgctatatccgcctgagcccaagtggtgatggtacttcttcttggcggcattttctttgtttctggccatcatcgcttgcccttgttgccctgtcttgtaagcaacgaactcatcccaatgatcccttagctttgggaatacgtcgaagttcggtgttagtcccttcaggatgtattttttgtagaaatctcccttgaagctctggaactgttctgccattttcttcagagtccaccgtttcactaagttatccgtacccgcgggtagcgtgaacgtctcgagcattgtggtccacaacatctctttctctgaatccgggacaaagctgtcatcatccccgcgtgcccttgttctgcgccagtacaccgtgctgacaggcacgttgtccctcacaacccaaccgctgtggcgtacaaaattcttggctgcttctgccggggcactagttcggccgtcttcgtccacctcagttatgatgtgccgaccctctatcttcttcgcggcacctcgttgtccgcgtgccctcttctgtccagcagagggttgacttccactagcctcctccgcatcgttcccctcctcgttcccctccgcagccctctccacggtcccctcctcgttcaagtactggtttggatcctcgttcccctcttcttcgttctagtactggctgcttccctctgcgattgtatcgtataatatctgttcctcatcgcgatcagccatctgtgcatacaaaaaatatttgttaggtatataggatgtatttgctaaccgtaatattgaaactctgctaatcttatattaaatctcttataatcttatattaaatggctactaatctcatattaaaattgtaataatcatacatatatgctaagtctaacaatcttatattaaatctctaacaatcttatatttaatctctaataatcttatattaaaattgtaagtcatatatatatatatatgctaagtctaataatcttatattaaatggctactaatctcatattaaaattgtaataatcatttatatatgctaagtctaacaatcttatattaaatctctaacaatcttatattaaaattgtaatagtcatatatatatatatatatatatatatatatgctaagtctaataatcttatattaaatggctactaatctcatattaaaattgtaataatcatatatatatatgctaagtctaacaatcttatattaaatctctaacgatcttattttaatctctaataatcttatattaaaattgtaatagtcatatatgctaagtctaataatcttatattaaatggctactaatctcatattaatattataataatcatatatatatatgcgctaagtctaacaatcttatattaaatctctaacaatcttacatttaatctctaataatcttatattagaattgtaatagtcatatatgctaagtataacaatctcatattaaatcactactaatcgtaattatattaaatcgataacaatcttatattaaaagtgtaataatcatgtatgctaagtgtaacaatcttatattaaatatctaacaatcacttatttacatcacttgcctgcgcgaattccttcgatggctagctaccacttcggcttgagggacgacgccgacgtcttctgtgcaacattaccaggaaaatgtattagtctaaacgggtcaagttacatatataatcatatatgtattaccagtaatcgtattagtagaaacgcgttcgttctcacacttttagtacaagtgcattcacgttcgtaagcgtttcgtgcacgttcgt

SEQ ID NO: 5338 - DNA, 8842 bp, Oryza sativa
ttataaattttaaaatagtctagagcctcgtctttcgttttcaacaagtacacatagcaaaatatagtagcatcatcaatcaacgtcatgaaatatcgttttccacccttcgtcaacaccccattcatttcacaaagatctgaatgtaggagttctagtggtgccaagtttctctcctcggcagccttgtgaggcttgtgaggttgcttcgattgcacacaactatgacacttagaacctttgacagtggaaaacttaggaattaaacacatgctggaaagccgagacatcaagccaaaattaatatgacataaacgtgagtgctaaacattagcctcatcatccacgccgccacaaatatggttcacagacttattgcagaaatcagaaagggaaaagcggaacaggcctccgcactcataacctttaccaataaaatatccttgtttagacacgactactttattagactcaaaaaccaacttaaatccgtctctagtcagacgggagccactaacaagattcctgtcgatagaagggacatgctgcacgttcttcagctgcacgatctttcccgaagtaaacttcagatctatcgtgccaacaccatgaacagaagcatgtgacccattccccattaggacggtggaaccccgtgtgacctgataagaagaaaacaatgagatgtcagcacaaacatgtacattggccccagtatcaacccaccaattagtagactgattaactgaaaaaacagtaggtaaattatcatacccgcttccatctccagtgttgccaatggtcacattagcagacttaaaagtctgccctgcaggtgccttcatccccttgcgctgtggacacttcctagccacacacaaagcaagtcctctcatcctgattaggattgttattgttcttcatctgcttcttgaagtcggtggtctgttgagctttgtatttccccttgctcttgttctgggccttgtgcacaacattggcactggactgcccaccatcgcccttagacgcagcgtccttttcccgagctttctcctcaacatcaagagacgctatcaacccctcaacggagtattcctgtctcttgtgtttgagtgcagtaccgatctccaagatggaggtagtttcgcaataatgcacccggccacaaatttgtcgggtaagacacatttaaggagttcgagttccttagccatggtttgtatctcttgagcctgttcgactacagaacggttgtcagccatcctgtagtcatgaaactgctccatgatgtacagatcattgctagcatcagtagcaccgaatttagtattcagtgcatcccacaagtccttagcgtcggtcatgtgcatattcacctcgaccagacgatcgccaagaacgctaagaatgtatcccacaaagagagtagtggcttcctcgaattgcttctgctgatcagcagtaagaattccttcaggtttgccagtactgacccagaagcatttcatagctgtcagccacagtgaccctaatatgtcatctcttaaagtgcacaccggtgaatttatccggccttagtgcatcggcaaaaccagccatagtaaaatcacagcgcctataataaggtttttggattgttgaaattataagcacgtaatgatttaatttattccataaataaatcatgacattgcagatgtaaactagcatgaacgcatcattagatctacacatgtaaactaagcagtaaaacatgaacagatcaaatatgcgtaacatatcgaacacgtaccgaggtggcggaaagacaggttgctcggtaggaactactcgcggttgcaggcgtcgacgaaggcgcgcagcacacgagcggagaggaaggcgagccgtcgcggacgaacagggagcggtcgcgcgaagcgcttcccaaaaaccttattgccgccttctccgacgtggacaatgctagaaagtctaataatatgaaacgaaggaagtagcaattatcattgccaattgaaacaatagaccaggaatgacaacacggtgtctcaaatttgattttttttgtttgtgaaaataatcttgaaagcataattctattttttcacgcgcatgtatcctccctagacatatctcttcacctttatcctccttatcttctcatctttatagtaatcttgactacttttcttttgactctccctgtaagaaacttccattaatgcttagggtgtgtttagttcacgccaaaattggaagtttgattgaaattggaatgatgtgacggaaaagttggaagtttgtgtgtgtaggaaagttttgatgtgatgaaaaagttggatatttgaagaaaaagttgggaactaaactaggccttatttgagcatctagattacttgaaatataaaaagttgtcaaaggcataaagtttgtctccatcgtatgtttcatgaaaccataaagtgggaactaaaccaggccgacggagagggagaggagggagaccggccggatctgtaccccgtcacctatggggaggccgccgccacctcccttgggcactaccgccgctgcatgtcgccaccaccaacccaccaccccgagcaccttctccccagatctggctaactccggtgaggccgacggagagggagagcaagacgaaaaggggaccggatttgcacctccccgtcgctcgtggggagggcgccggtcacatgtgccactgctcgccgtctggaagagggggacggagggggagggaagcagccagccggcccgctgggacaggggagcgaagggaggtggcagccagcaggtgcaggagggagaaggggaggaaagggcagcggagttggaaggtgtgagacgaacgagtcaaggcgtccgcgtctcgcatcgcgcggataaggaaaaggctgacgcgcggcacggataaagctgaggccggctgggctcgcctggtttggctcggttttgtatgggtgctagttttttaattaaccggtacctataatataatataggtgtaggttcttcctaaaaaccggcacctataatatattataggtgtaggttcttcctaaaaacctgtacctatagtattggcaccggtttttcctaataaactgacacctatagttcttaaaggtgccggttggtgccggttgtatatttttttcaacgtgtggaggtaggaaaatgctccacacgttgaactataaggccggttttatagtagtgttatgaactgggtatatcgtaaaatattttcatcatctaaacagtctgaaatgaaaagtcatcatctagaatgttgtaaatcttttcgagatttacaaaattgatataatgttggtcttatctgacttcatatgtaaaagttatctatgttttaaaaaagtaaaataaccatatgataacatcactgctggttatttctgtacgaacctgcaaccggccatgttgaaaacaggccaaaaactgaaagattagattgagaaccaaattgatatgcttaaatttgctcgcagcaacaatttcaatattatgattcatcgatcttcgattttcaattacaacttttaatcttctgtttacttgcgcactcatggcattattccctgagtactgatgggcaatgctagaaagtcttacaatatgaaacggagggagtattcattatattacgtgatctctgcagctttacgtcagattatgattttgttaaattcattatttaccttgaactccaatatcagacttgagatgacaatatttcataattttctttttttttttggacatgtacataataatcaactttgttgctgtgaacctccacagatcctgagacaggggatgaatacacaaaaggtttgagaacagcacaaatttgcagccgtgagaaaataacagcaggataggtcggtgacaatggctacctagctagcaggatgggtggtaagagcaggatggttcgtcacctctaccatacctccatctccatggcatcacccttcagttcaacatcgaggaggcttcaggcacattgtacgtgatcttcgatcttggcatggtggtttacacagacagagggatgaaaacggtcataaagatatcagcttttattatttttatgaaagcggtatcgatacatgtgggaatttttgaaattgatgaatttaactatttagcgacgacttcgatactgcacatatggaaattttttagaacacctccttctgtactatatattttggcaccagatattgtgtaaactgttcttcttcatgagaagctgagcaccacttgtccaaaacatcacatacaggaggcggaagctttgttcccaactcctctatatagagatgctgttttaaaaacacatattaattcatttttaacttaattttaattaatacataattatcatacgctattgagctgctccgatatatcagagggaaagttcccaaccgacacaaaggaacacaaccataatcatgagcacagcacaacacgttaattcactcctttggcattcaattaacctttttaattttgttcttttgtgagagctacactacattactttttctgcctgtacactttccattttggccagacaatgataatcttccacctcttccctcacgtgctggtggtaatgtccatgtccctttgcttttcttagaaaaaaaaattcacatccctagctctactctggagatttgtcgtcgtcactaacacaccttttcatttgaagcggagggagtatgaagcacaggcttctaaaggactatgtttaaaatagagtgaaaaactaaaatattgattagattgacaaaggaattttatcgacattagatttttcattcatcattcctggcgtcctgcttttattcatctttgttatagtgtcacactaactcgtagggtaatactatgagggtccctacgatagatttatctacgttcttataataggatacatggtatcgtagtattaccgttatgtggttgactgcaccaggacctggttcatgtacttgcgtcatctcaattgtgtcaaaactaaaatttaacaatatgaaaaagggtagcgcacaaaaaagaaagtagatagtggataggttatgagacaagggttcagacaggtatgccttctcgatgagaccttctcgatgagaagtaataccctatagtttagggattgtattcgctgattgttgtattgatctgaccatctgagttgtggttatatcctcaaggggtatcctgcccttcttatatagtcgaaggagacatgttacaagatagagatataaccccttacggtttaaatcactataactagttcacaatcttaccgaacaaagataacaatccatttccttgataggcaggtaaacgtaatacctgagtcttaattctttacatattctatttacatgatatatcccctataaccagttagatagtccagccgtgtggttatatggtacccataatctccacagtagcccctgagacattcatagtcgacaataaaatcttctctcaaaccaaaaatttccatagccaagtgcttcaattttctctgccttagtcttccaagtattttctcctattcagtaggatgtgaagggctgaaaaataaaaaaaatataaaatatacctaattaggtgtagccccccaactatgtatttgaacaaactaagcatatagtaaaggttaaaaagtttataataaccatccgagtggttttttaaaataatatgcacagcctaagcttaattacataaagaataatacagctagcacgtcactttactactaaagcttactgcataatgaacaactggtactggcgtcatactatgcacatattgccaaagcaaaatatgttaaaacacataatcgtcaaagttgcggacgcgtagggactcaaactccatctcactcggcaacatagcttcagccccatatactaaaacggaaggtgactgacctgtcacacgactgggtgtagtgcatagtgacgacaaaactgaaggcaactcctccacaaagcggccgatttacgacacaaatcgacaaagatggatgaactagactagaaatagattgaaatattgaaaaaaacgattcaatcactggtggagaaaccatttgtagtcccggttggtaacctccctttagtcccggttgtccaaccgggactacgaatccgggactaaagatagctatctttagtcctgggtgaaataaccgagactaaagatcgagctgacctttttttttttttgcatggccctgtttgctgcatggttgattatatatatatatacatacatatgttacaatacatatatatgcataatatatagtcatatatatatatatgtgtgtgtgtatgtataaatcatatattatatacacacacatatgtataattaaagctacttaacattttatgtgcatatatatatgttaccaaaatatatattaacacacaagtaaatgtgtacatatataaatatatatatatatacatgcatatatagtacaattcatttgctcggtagttatatctacgacttcgacttcgacgccggcgttatgtcagaagaggaaggaccgacgttataaattgttgatccgtcgtagtagaattcaccgtcgggattaagtacttcctcgttgatgaatcccatcagttgttcttgaacagccgtgataaaatccttgtgtgagagattatccctcatgtgaatacgctatcattcgaaaaataataacgtatcaatatatgaaattaataaacaacttaacaaatcgatacgcaatgaacctttgaatggtttatgtatacgtacatcgagctctcgtgttgtgcatatttagtttgataggcagtgggcatactcgcatacgtagtagccgcataagttagttccctggtcctgctttgcacactacatgagaaacgatgagagatttaatatactctttatattaactgtaattagatattcaattcaatataattttggatcaagcatgtactcactggaaaatgaaacctccgtccaagtttttctttccaagtcccgcagaccaattgacggaaccgatcccaagccctacatatgcagttgcaagctatgattaattaattattacctgagatcaacataatagcaatagattccccgcgactttggaatagatggcattatattacctgtctatcagtttgaagaccttgtcaaaaatcttctcctctttattcattgagtcgtacacagtgactctgcatgcatccaagtcgaagaataacaagacccagtggaatctggaatatgcgtgagatgagatatatatgatcgaaaatgtacatgctatatgtatgggaatgaaatttgttcgaacgacaataaaaactcactctgtgttgtacggcagtaatatgtacgtcttgaaatgttgctgcgttaggagatgcacgagattgtcctctgtatgtttctcgtacttgtcgatcatttcggtgttgattttccgagggtcgatgaacccagtatcgtagactctccgccgtcgggccctttgaatctccattctacaacgatgaaaggaaagtattattgcttacatatatgccaggagctaattattgaacgaaacaaatcgaactcaaagatactcacaaaatccatgcgctcagaagagagacatcgagggcgtccaactggtacagatcgaagagttccttgaaatggatccagagaacatcgtctccttgcaagaagtcggggtttctgatcctcgctccgaacatctctctacccttggcgctcatttccatgtaccgttcatggaatttgtacatctgtgtcggtagggactccagctgttcaggtttgacaagcggtttaccgagttcaaacttgtatgccaattccgccttcgggattggtgcgccttgaaccaattgatccacagatagaccggtgtctgcaatgaaatccgttatgccaaaatcttcaccggtcaccaaaggctcgacctcttggtttggttgttctccaagctgagggactggtttggacttcttgtgataggctctctgaagtgttcggtcatagtccgatatctgtaaggcctccttgtttgttttggacattcccttgaagaagttcttcacgctcgggtcaataggtatcttcttttcaggacttcgaggcttgagttgcctcttcacctctcctgccacataagcatcaagctcctcttgactgcaatcgtatggtggctccttgtttttggtggcgtcaactttcgccttcttcattgcccttgtgcgggcaggcggtggagcttggcgagaccttgtcttgggaggtgcaggcggacacagtggaggcggaggaggcggaggagccgaggagatggtgcaagaggacgtggcggaggaacctgaggagatggtgcacgaaatgccgcttgtcgcccaggaaggatgatgtaccgcttgcgccatagtatgatggcgtggcttgtgtcacgtagatgcgtctaaccgtcccctcctgggtagtccaactcgaggtcctcgtacgcagctttcaccagctcaacttcgaccctcgagtatcctgctgaaatcggcctgaagtggtaagtcccggaagggtcccgttgggatggccattcccaacgccaccttcacgtgatgagaggttatctattagtaatcaacctaagcagcaacttgcggaatgtacaagtcaaaaatataaaactacgagcataccttgattgataagt

SEQ ID NO: 5339 - DNA, 6476 bp, Oryza sativa
taaaatagtaaataatgcattacaattatttaaagtcgaacaattaatgataaaaccttcgaaaaaattattgttgtacgtagtagaatacgtggataatatataataagcacatgaatgatttaaaattgttaaaaattctaattaacatatctaaatagcacatgcatgatttaaaattaatacaaaatctaatatcatatataactagcatatcatgatattaaattgttaaaaattctaattaacatatgtaaataccacatgcatgatttaaaacctttagaaattctaataatcatatatatgtagcatatggatgatttcaatttgattaaaattctaataatcatatatatgtagcatatggatgatttcaatttgatgaaaattctaataatcatacataattaacaaaaaaattaataatcatatataactagcatatggatgatttcaatttgataaaaattctaataatcatacatatttaacatttgccatacaacaattgattagtatagatattcggtacatccaacatagtttacatcgtgtacagaacaattacggcaatacatcggcggtgacggttgaccggacgtactttctcctcactattgttccttccttgtgatcgctacgtgagtaaggggtgtcttcatttgataggaggatgctagggtcaattgtcaccgtgaaagggggttgcccatcaaactgatcgtaatcctcatcagtcttgtcctctactccgacgatttttctttttcttgggagaaccacgtggcgcttcggctcgtcagtcactttgcccttttttcctttgctagacatgtccttgacgtaaaaaacttgggttacatcatcgacaaggacaaaaggttcgtccgagtatccaaccttgttaaggtcaaccgttgtcatcccactgtcatcaatcgttacgcctccaccagtcaacctaatccattggcaccggaacagagggaccttgagaggtccatagtcaagttcccatatgtcctcgatggcaccgtaatatgtgccagttgtaccatcgtgtcccatggcatcgatacgaacagcactgttctggtttgtactcttcatgtcttgggccctcgtgtagaatgtgtacccattgatttcatatccctggaatgtcgcgatcgagccagatggtccccacgccagaaaggccagttgttggttaatcgtcttgctacccatgagatgttgtcgcagccacgtggagaaagtatcaatgtgataccttgtaatccatgcatcggacttaccgatgtttttggcgcgaactagagccaagtgctcctcgatgtagggagccaccaatgaagattgttgcagaacagtgaaatgggctttacggaataaatagttgtctgccgtcattattgctttcctttcgagagtcccctttccccgtagtctcccttcatggcgtgattcaggtaccccgattgggcgaaggtcttcgataaattctacgcagaattcaatgacctcctctgttccataccccttggcgatgcttgcctctggacgagcacggttatgaacatacttcttcagaacgcccatgtacctctcgaaaggttacatgttgtgtaggtacacaggaccgagaataccgatctctttgacaaggtgacaaagcagatgcgtcattatattgaaaaatgaaggtggaaatatcaactcaaagctgacaagacattgcaccacatcattctgcagggcttctaatctatcaggatcgatgaccttctgcgaaattgcgttcatgaaaacacatagctttgttattgttgtccggacattgtctgggaggataccccttattacaactggtagcagctgtgtcatcaacacgtgacagtcatgagactttagatttgtgaacttcttcttcttcgtgcttattattcgctttatattcatggagtatccagacggtaccttgatgctctccaagcattcaaacatactttccttctctgccttgctaagagtgtagctggctggactcaagtaatggcttcctttcttctttggttccggatgaaggtcaccgcgttgttccatatgcttcagatcattacgtgcttccagtgtatctttcaactttccatatacacctaggaagccaagaaggtttacgcaaagattcttagtgaggtgcatcatgtcgattgcgtggcggacgtccaagaattcccaatagggtaactcccaaaatatagagttctttttctacatcgccgcgtgaccatcttcgctctctataggctggctgccaggcccctttccaaacactactttaagatctttaaccatagaaaacactgtttcccgctgcgatgtttaggcttcgtacggtggtcctccttatgttcaaagtgcttgcctttcttccgtacctggtggtttgctgcaaggaatcaacgatgacccatgtacacaaccttcctacagtgcttaagatacatactttctatttcatccatacagtgagtgcaagccttgtaccccttattggactgtccggataggttgctaagtgcaggccaatcgttgatggttacgaacagtagcgctcgtaggttaaactcctcctgtttgtcctcgtcccacatggggacaccttccttcttccacaacagtttaaaatcttcgaccagtggtcttaggtacacatcgatgtcgttaacaggttgcttgggcccttgaattataatcggcatcattatgtacttcctcttcatgcatagccacggggggaggttgtagatacacatcgtaacgggccaagtgctatggccgctgcacatctcaccaaaaggattcatgccatccgtacttaaaccaaaccgtatgtttcgtgcgtcctttccaaagtctttaaattttctgtcgatgtttcgccactgcgaaccatcggcggggtgtctcagcatcccgtcctgttgacgctcttcagcgtgccaccgcatcattctagcgttccccttgttcctgaacaaacgccttagccgtggtattatagggaaataccacatcaccttagcaggaattctcttcttcgttagctgcccgtcaacttctcctggatcatctcgtctaatcttgtatcgtagtgctttgcaaacagggcatgcttttaggttctcgtactcctcaccgcgatataggatacaatcattcggacatgcgtgaatcttctgaacttccagtcctagagggcacactatcttctttgcctcgtacgttgtctcgggcaacttgtttccctccggaagaatgttcttgacgagtttcaataaatcgccaaatgccttgtcactaacaccattatttgccttccattgcaagaactctagagtggtatccaactttttgtgcccctgctcgcaacctgggtacaacgacgttctgttgtcctctaacatcttgtccaatttatgggcccccttttcactttcgcaatcctccttggcgtcctgcaacatctgaccaagatcatccgcaacgttgttaccatcagcatccctttcctcctcacccgtttgattttcttcaaatccagcgtactgagcaaagtccggaatattatcgtcttccacttcatcttcttccatttcaacaccttgctctccgtgggatgtccaacaattatagcttggcatgaaccccgactcaaacaagtggaaatgaatagtcctggatgcagaatactccttctgattcttacacttattgcatggacaacaaataaaacccttttgcctgttagcttcggccactctcaaaaaataatgcacgccgtcaataaactctttggaccgccggtcagcgtacatccattgccgatccatctacatgacatgaaaaaaaatcgtacacacataattattcgtacaataatgacaatcatacaataattataaaataattacaaactctttcaacagtcacacaataatgacatatcattattcctacaaatattatgaaatattacaccgaataattatatatttactatttataaagttttaaactaatattaatgtgttgtacttattttaatttttcattttactttgttttctattattcaagattaactttcactatattttccttctcaacttttttataaaaccttctttagcaaataaactaaatttctatatattctttcttctccacacaaattttctctctcatcaactaacaacaaaattttgaagacaaaaaagtgtgcaaaacatagctccaaatgtaatatgaaaaaaaaaatattggaggatgaagttgctaaccttttaggcacctccgatttgtatataatcaccaaaataaattcactagaaattttggcatgacctcccctcttttttgaagaaattttgaagcttgctcgggctggaggaggaagaagacatatatataggggtaggactttagtcccggttggtgttatgaaccggggctaaagatcgccgtgatctgttaccaaccgggactaaagttacgatctttagtcccggttggtgttattaaccgggactaaagatcccagggggggcctgacaggtcctgacagcatttgaacagggactaaagatcatttttagtcccggtcaaatatgcccattaccctttttaaccgggactaaagatcatctttagtcccggtttttgttgcaaccgggactattgtggaattagcccgaccgacgaaagatggtttctccaccagtgaattgacttgtgtgtagattatatattgtatgttaaattgaaccggccatgtcctttatataggggttagtcttgccacctacaggtcctcctctatgtctaattcgggaaagaaaccaaagaaaacctgtgacatagcctcccgagtaaggaatcccgaggccgacgaaaatggacttgggctcaaactctgccggtctgaccagcaacatgccttcggttagaccggccctcagaccatggtctgaccggcccatacacggcggttagaccgacctagtggaggaaaccggtgaccttcccaaatcttgggcaatttttcttattttgaacctatctagcaaatttgggtgtaaacaattgtatcaacatatcacctcaacttcgttgatgtggtaaacttgtaaacataggtcctctctgtcctttttcttggcaaagaccacactattttctttatcgttgaatcgttgtagcgcatcaataatcggaacccaaactcctttaattttcacacttagtaaattaaacatagttagcccggatgattatgttatcagtaatcaccaaaactctaaacaagggactaggtgcttacactcgacactgccagatgctgggaggctgtccgaggatgttgagtctcacatggttagctcagagggtggaaaataattgagagaagttgcaagatgaaaaaacaaaggaaaaccattaactctactcactggagggcaaatataagtatatgtaatttcaaattgctattaacttacaccacaacacatgatgatttcaaaatcatagatgagtaaaaagccccgtaattggttcttatatgtattgcatgcatggctgatcataaatttgtataactaatcatgctgtcgaatgacttgcttcactaagcactctgcattctttagacagaagccatgtaatccttttttatcttcgccagtctcacaaccacttcgctcattgtcattctttggtctggtaattcatgtgagcattgtaaacccaactcaaaaactgggactataaagttattcaatgaactagaggaatcttgcaccagtaaccggttatccaccacatccatgacatttgatggaaatgcactagtaacccactgccttagagatagttctccaacaaacatgggatcagttggcctctttccagtgaataactccagaagcataataccgtagctgaatgcatcgcttttccgtgatgctttcccaactgacccatactctagcaatattttttccaaacaggagaggaataaattagtagcaaaactaatagttgaatcaaaacgagagaaaaaaaaacatactagaaatacctggtgccatataaccaattgttccaggcatacttgcagaaataacagagttatcgtcaccacgtaacagttttgcaatcccgaaatcggccaccaatgcaaccatgtcttggtcgaatagaacattgcttggcttcaagtcgcagtgtaggactacctcacagtgatgatagtgaagatactccattgccatggacacatccaacagaatgtccagtctctgaaggaatcccagttgctctccaccttcagagtgtagctgtgtttctaagcttcccttgggcatgtagggaagaaccaaagctctgaagtccaggttgccaccccc

SEQ ID NO: 5340 - DNA, 15507 bp, Oryza sativa
tgtgttcatccaaagacttgctgtaaatcaatatgtcatcaaagtacactaccacaaatcgtccgataaaaggccttacaacctcattcattaagcgcatgaaagtactaggtgcattagtcaaaccaaaaggcattactaaccactcatacaaaccaaatttagttttaaaagctgttttccattcatctccaagtttcattctaatttggtgatagccactacgcaagtcaatctttgtgaaaattatagagccacacaactcatcaagcatgtcatctaacctaggaataggatgacgatatcggatagtaatattattaatggctctacaatctacacacattcgccaagaaccatctttcttaggaaccaaaattacaggaactgcatagggactaaggctttgacgtacatacccgcggtccaaaaggtcttcaacttgctgctgaatttccttagtctcatctgggttggttcgataagcagcacggtttggcaatgatgctcctggaatcaaatcaatttgatgctctatccctctcataggcggaatcctgggggtatctcagctggaaagacatcctcatacttctgcaaaaggttagtaacaacaggaggtatcgaactagcaatatcatctaaagaaaccaaggcttgtttgcatatcaagaaatagcacatatcatcatctgacatttcagcaatgtcacatttagttgcaagcataacaccacccttcaacttaattccctcaaccttagaactaggtgaaatcttatcctttttaggtggaaaaacagatttagccacttgctgattttcagattcatcaagtttcaaactagcagctcgctctttatcagcttctacaatttcagcaggggtcaaaggtagcaaagtaattttcttcccattatgcacaaaggtgtatttattactcctaccatggtgtgtagcatcattatcatgttccaaggacggcccagcaaaagtgaacaagcttgcataggatccacatcacaatcaacagaatctgcatattagccaatggaaaacgaaaccctacaaaccagtgttacctttgctcttccggaatcgtttaaccactgaatatggtaagggtgtggatgtgtaagtgtagtcaagccaagcttctcgaccaaatcagaactcaccaagtgtgttgcagctacctccatcaatgatcacacgtgcacgacggttgttgatgacgaaaaaaatctgaaacaaattatggcgttgcaacctgtcatgctgctgtacctgcatgctgagcacccactgcacaatgttggtcctgtagtccgttgtgtcatcacgaccaaagacttcgccatcctcatcctcaacttcttcttccccctcttcctcttccatgtcggaggtggtgatgtagccatcttctgtagcaacataggcccgttgactagggcaatctttctgcacatgcccaaacccttggcaacggtggcactgaatgcgtcccgtcgaggcgacagatgaggcactcttggcgggtacctgcgtggaacctttacctgactctgctggtcgtggtggtggagatggttttggtgccgcagaagctccggatgcagctggtcgcttgcccgctggctgggaggacacccgaaaagagacggccttgggcagtgccgcagatggcgtcgtgcgcggagtgtatgtgcttgccttgctcttgccctgatggtcgcgcccctgtaattccttctctgcaagcatagcaaaccgaaacaactgttgacagagttaaattccttataatcaacaatgttctgaatttcctccctcaaaccagaataaaaacgacaaatagcatcctcgaccccctccactatgccacagcgtctcacacccttttgtagctcaccatagtaatcctgtacagatttatccccttgttccaaacgcatcagtttcttgcgcaaatctctatgataagatggaggaacaaacctattgcgcatagctaccttaagttcttcccaagtagtaggtagtaccccctcagcagttaacccaacccaccacataatagcaaaatccttgaactcactactggcttgtctaactctatgttgctcgggtacaaggtgggcattaaacttttgttctactgtcatctcccaatcaaggtatttctcagcatcataatatcccgaaaaagatggtattttaaacttaaccttagcataaggatcatcggacacacgattattattattaccttgttggtggcgagtgccacccatacctatgcagtttgtgcgtaggcgacgtcgtagctgtgcttgccttgtagccggtgcgtcaatatagccactggaatcatacaccgtgtcttccggatgagcatcgtcatcaccactcaccacttcctcattggaaggtgtctccaacgcggcgacccgatcagttagcgtggatatccgcttgtccaacctctccatgtggttcaggaagccgattttagtgaaggcatcttggacagactttgcaacggcctccgtgatgtccttttgagtattttgttggagagttcgtagttgctcttggctgacacagtcagcaaaatcctagggactcttctcaccttcgttacctgacattgaaacaccaaaacagaaacaaaacggtgaaggttatccctaataatccactacgcaggtgtagtggtgcctttcaacgattctcagcaatatggagttcctaaccaagctcttataaggttcttaccagcaaagcaaaggatacctggaaggcgtagtcagtgattgcagggatcaagaacctgtgctgtccagaagtaataagtggagctaggaaggccaaatatacgaatatgagtggtacacaatccaatgacagatagtaatgctgaataaaaatcccaagtcacttgcccttagttactggactactcgtgtcctagacagtagtgataacaaagatggctcaaagaatatgacactagtaaacagcaaagaaggactggcaggcaagcttcggcgagtttcagcaaaaagtacaaaaccgaactggcagataagctcaatggagcgcgtcgtgagctcaatgcactagtggaaatcaacttttcttttttttcttttattttttttgatatttttttcttttttcagaacacgaaaataggcacacctccaagttacagctcaatcggagtagatatgtggcctatggatttttctgaaacctctataaacaaggtgcaggaacttgtgagctcgaacagacaattttgcaagccaaatttcgaaattttggattcgccaatccgccaaaggcggggagaaacagatgtaaattttttttctcttatccgaaaagttaaagtttgcctgattccaagtccgtatgcaaaagttatggctgtttgaagtttcggcttccgactaggttttccagaggggatataacctagtctattatgcggtggaattggaatgtggtggcagcggagttgtagggtgttttggtgatgcatggtgatctggatgggtgtttatgatggtggaaacggctctcaaaggatgaaccctaacacacggtgaaaggtggcggctagggttacaaaggacaaacacatgactagactaaaacacgcactagaccagcaacaggaacttaaactaggactcaaactcaacactacggactctgaaaaagaatcatgtaaaggctaaacacggtctaggttaaggtaactaacaactaaaattttttttggcttttctgtagactctaggttaaggaaactgagcgaacatgacggtgaaccaagagctctgataccacttgatgtgcactagggttcccgatcttccgaaaggttctaataaacaacgatttgggcggagtcgcgacacaaatcgatccggcttcttgaacgcgcacgctcttgagccccgcaatcgcagcactatgtctcctctggttatcacccgtgtccaaacgcggatgacctcgccaagaaggccaatccttgtttgccaatcgaagaacaataacaagaacgagatagaaaaacaaccaaaattgcagatgaatgattaagctcacgagttggggtcttacaaaccgatctagcggccaaactgttctcgacagattaatctaagcaaaacccaaaaagctaaagatggcagcgggtactgataaatagagtttagggtcgtgcaaacccctctcgacgcaaccctaatgggttccaacacgatacacgggccaaaggcccaaatacggtgacgcaacaccgggacagattttggccgtcaacttgttcggtcaattcccattggaaaggttatcttcttagctttccatctgtataaagaacgccccaatctgagcacgtatgcgacctgggcgcccgttttagtgtagactggtcctggactccgaattgcacccgacgttgacttggtttgggcctccaccttgacttggacgtccccgatggtcctccatgggtctaagtccttctccaagtgtctccttgtcccctccattgttcctaatcacaatataatcattaggtagcaatctattctcgaattcatacaaagaagaacataggaacgagctcacctctaaatttaattgtcgcgcacgagctcttgttatcggtccttgaatgaccgttggaggattgttgtgtgtatccgagatagtgatgtccgcatcatggttgcccttatgaaagggacatttacatgggtacataatgtaataaggactcatgggcccctgatgggccatcgggcgatcgtcggccttacggtccctggggttgatgggacggaaaggcttcttcggccctcgcgggggcgaacttgctgtggcgaagtcatcttcctccggtatatactcttcgccctgcacccttcgcccaagaggcctctggcttgacaaggtactcgcacgatctctcgcccctcgccgttcatgttccatagtcttcgccatggggggacttcgccccgtctaacgtcgatgtctcgggctcgaatctccactattcacatggtttcggtagatttggtcgaagggcttcatgccacaccgccaacaacttgctattacaattatgcagccaataccccctaactatgcctacctgatatatcaagaaaccacccctaattgccgagttccttatgacaacccgttatgaccatccaacccgtaatgaataccgagaaatacccacaccaaaaaattctcttagtattatatacgcacatgggaggaatatccgtactgagctgtcaccatcagcggcctacctctacagacccatggcatataacaccattttctttagataatggaatataataccatttaataatactactctacatctcagcagatgacatagagcaatcatatagatgagcattaaagcaataccattgcagatctccagtaagctagctacgtaactattacgagacaagtatgaactaaagtcggtactcgaataattatataagtaaagtaaaggaccgaaactataataagaagaatattgagaaaattccctatgtaccttgaaagttcatccaatccttattataccctgagattttctcattcccttccatagccctaaatttcagtttggatcccttctgtaccccttccgtcagttggacgttaagttgaccgttaaattcatatcataaactctattttaccctttggtatcaagaaaatataaatttatgaattatattaatggagtgtataaatttagtgtatacgactattatatttataagtttattttgtgagatattatttagcaaaaataattttaatctcgcataacaagatttatcttataaaaaattcatactactataacaaaatatgcagtttttaatggtcaaaaatatttctttgttttatctaaaatattgccatagataaaaattattttgtttccccttcgcgaggcgaaactaaaatattacatttgttaaaaatatctcacaaaataaactcataaatatgatagtcacatacaataaatttatacagtccatcaatatacttcataattttatattttcttgataccaaagggttgccatagataaaaattatttttgttttcccttcgcgaggcgaaactaaaatattacttttgttaaataatatctcacaaaataaactcatacatataatagtcacaaacaataaatttatacgcttcatcaatatagttcataaatttatattttcttgatagcaaaggacaaaatggactctatgatagaaatttagtggtcaactaatggaaagggtatagaagggatccaaactgaaatttaggggtatcgaagggaatgagcaaatctcaggggcatagaatggattgggtgaagtttcatgggtgcataggaaattttctcaagaatatttcattaatgaattaagtcttacaaaagagagagaagctactaaagctatatccgaattctcctaaagacttgaagaactaagaaaaaaattctattcctacaccactagcactagaacaatataaataaactggagagagctcttgacttcttcttggcgccctttggaatagagagtgaactcctcaaataggctggcaatggcggttgtggcggttggaattgtcggaaacgcgcaggaggggtttcagccgaattagccctggtctggcccaattagcctgtgccttttctagtgcgttgcttgatggatcttaagtccagcggcatggtggtttggcccaattgcagatattttaatggggaataagatcactttgactccctcaactgactaccgaacctaaatcgtatccctcaatcgcaatagcagaaatcttgacccccaaacttgcaaaaccggtgcaattagactcccttggtggttttggagggccgtttcgctgacgtggcgcacacgtggcagtgttgacctggtcttcaccccacgtggcattgacgtggcactaatgtggcattaaaataaataatatatgtggggcctatttgtcattcaaaaaaaattgtgggacccactgacgtcatcttctctctcactacccttctgcttcctcctctctcccttatttctctctctctctctctctctctccccccttgacatgagccggtggtaggcggtggacctcgggcaacgggcatgggagcagctcctccttaaggatgcagagcgggcgctcaaggttgtgcaccacctccgattttgcggcggcggtgggtgcgtctcggcctcgaggtggcgacgcgaagcaatgagtggtctccggcgacgccttccaccgacgatgaaggccgacgccttccaccgagcctttactgtctctgccactgtgaccacatcaagccgccgccgccgccctgctgctgcagcttgtcctctagtcgcccgtcgtggccgattcggagctctggatctaggttgatggagctcggtgctacgccgcggagtcgccatgcattcctgagctcctcgtgcatggctgcgcgacaccgtcgagggcaccaccaccatcgtggtccaccgtgagaagccaccaccgccaccgtcactcctgcacccgcttgccccacacggcctaagaggtcaccagcgacggtcggtggcgcaacggcggccacggtgtggtctatcgggaggaggaaggaagctaggggtatatccggcctccgggtccgcaactccaacacccggccgcctacccttcacccatagctgccgctccatccatcgcccgccgttgctgccgccgatccggacgccgctccccacgcacgaggagaaagagggagagatagagaagggaggagagggaggaggaagaagggataagagaggatgacatgtgggacccactgacacaattgtttttaattgacaaatgggccccgcatatatttttttattttaatgccacataagcgccacgtcaatgccacgtgggacaaaggccaggtcaacactgccacgtgtccgccacgtcagcgaaactgtcctctaaaaccactaagggagccaaattgcaccagttttgcaggttcgggggtcaagatttctggtattgtggctgagggatacgatttagattcggtggtcagttgagggagtcaaagtgatcttattccttttaatgggtttgtaagcccatccatccataagtgtgccactcgtcggacttcgattgattattcagttattttccatcatctcctccatttatgtgaagatctcccgcatacaaataaagttccaagtacaagtgaaaatagattattcttaaacaaatatgtatgcaggcattactagttcttatttattttagatatattgacaatcaaaattggtctataatgaccctcaacaataatttaatggatattagacatcacgtataacaattttatatgatgaaatagctcttgtaaaccgaaaacccactcgccatagcggtgtcgccgaatctacaaacactaaccacgccacaaatttctgaagaaaccttggcacccctaatgttcgagttcaatgatttgccatcgacatggtctctttctataatataccggtgactttaacaattgttctacgatataccattaggccggaccttcttttcaaaaaatacccaaaatacccttagagatatacaagataaacaattgatttatctcattagaagtttcaaaaaaaatatgaaaatttttacgtggcctccttacacaatatggaagtttctatacaagttgtaattttttttctggtatatttagtttttttaaaaaagtgtttttacgtggtatatgagagagagtttgcttatccaggagatgatagcataaaactatcttatgtagtgtgtgaaagatgatttatattaaaaactaataaaaaggtatttttatataccatataacagataagttatattttttttaaaaaaataaatgtaaaaaacttaaaactcctatagaaatttccatgttatgtaataaggaggccacataaaagttttcatattttttttggaacttctaataagataaatcaattgctaagcttctatgttcataagggtattttgggtatttttaaaaagaatgtcaatggcaaatcgttaaactcgaacaaacccagtagtatacaatagattatctcaactcgctggtagtacggtacataacccattaatatttctataagtacaaaaggctgtgatttacacgaaggcctaagtcaaggtctcctcgttcccctgaatttctctttcaaagcatgaaaggctaccgattcaatgaaactgtgaaacatcacaaaaaggaggctatatatataagaagagaagttgtaagcaagctatataattaagcaaactacaaagccgattagctaaatttctccagtccaaccagcttccatacatggccacttcgatcatgattacgctgctactgtacctctggtttttagcatctattgccattgcttctattgccattgcttcgaccccagacagtgtcaccgccggcaacggcagtgacacagacgttaccgcgctgctggctttcaaagcccagctcgccgaccctcgcggcgttctatccaactggactactgccacatctttctgtcattggttcggcgtgtcatgtagtcgccgccgggcacgggttgttgcccttgtgctgcacgatgtgccactccagggaagcatctcgcctcatcttggtaacctctctttcctcactgtcctcaacctcactagcacgggactcaccggcgccatcccagccgatctcggaaagctgcatcgtcttgaagttctcgttttccgccggaatagcttgtcaggcgtcattccaccagtggtaggaaacctcacaaggcttgaggttgttgacatggggcacaacagcatatcagggcagattccacttgagctgcaaaaactgcacaatcttacgcacatagatttcataacgaattacttaactggaccactaccgaatgatctcttcagcaacaattctaagctacaatatctagactttgggaacaacagtttgacaggaacacttccgtattctgtgggttccttaggcatgctccaacacctcgattttcaggctaaccacttctctggcccagttccaacaactatactcaacatgtccaagctgcaaatattatctcttggaggcaactggggcctaactggaactatcccaggtaacaataataccttcaacctccccatgctgcaaatgatctctctatttgcgaatagattcacgggacagataccattagggcttgcaaactgcaaatacatccaaataatttccattggagagaactcattcgagggccctgtgccaacatggctgagcaaactgccagacctccttttacttgatctaggttacaataatcttatcggtcaaatcccatctgcactgggtaatattactaatcttgtctcccttggtcttcaatcgtgtaccttatcagggctaattccacaagaacttggacagcttcagcaactcaatgcattgtatctggaccataatcattttactggatccatccctaccttttttgctaacttttctgaactacaagtctttctaatcggtgctaatagttttactgggtcagtaccaactgcacttggtagctcaagatcaattgagtggtttaatattggagggaactaccaagaagggagcctcgacttcttggctacactttcaaactgtcaaaatatctgggaagttggcttcgacttgaatgattttacagggaagctccctgactatgtcggaaacttctcaagtactctgataaatttctttgcagaaggaaacaagttatccggtgagcttccttctaccctgtcgaatttaagcaatctcgtttggttggacatttcaaacaaccaactgactggtactattccagaatcaatcaagctaatggacaagctccaacttcttaatctctccggaaatagcttgtctggttcaatcccaaggcagataggtcaactctggaacctacaaacactaatactcaataacaacaacttctctggtacgctaccaaacgatcttggaaacctcggtaatctacaatatcttgttctatctaaaaagagtttttttacagtccatcatgactggtggtacctcccagtacctgtaatcagagccatccattgagtccgatctaacggatgagaatcctcggtactgtccggtaccaaaatctcctcaatggtacctccccttcgccgaacaggtggaagggcaaagctgggttttcgcatggtccgctcctccccaacaccacaatccacacctcccggaggcttgttccggtccagcgaaatgtaccgcccggtacaagtacctgtagataccagttgtaatctgaccgttcaatacatgggggtacgatggggtcgacatagttcttcctcgtggtcgtggccattccatcccctccagctgcagacatcctccatctcttccctgcgggtgtaacttttcttcttccatcccctccggcgcagccggcttttgcgcagctgtgacgtcgcaaagctacgcggcggcgtcgtggaggtctcacccctctcgatccaaggctgcgcgccggcggcggtggccagggcaagcatggtcacaaaggatgcgcccgactgtgtcgccgctgcggcggcgtagtctcctctcccaaaacgtagggtataacagcctctctgggcaaataccacgtgagctgcagaatcttcgcaaccttaggtacatagatttgctagtgaattatttgactggaccactacccaatgatctgttcaacaacacccctaagctaaaatatctaaacttccggaataacagtttgtcagggacaataccagttggtatcggcactttgcccatccttcaacacttggaaatagcatataaccacttttctggaccagtacctgagttaattttcaacatgtccaaactagaaatgttgcatctcggaggcaacgggtacctagatggatctatccctggtaacaagagcttcaacctccccatgctgcaaaagatctgcttgtatgaaaacagattcatgggacagattccgttggggcttgcagactgcaaatacctccaatggattttcattggacataatttattcgagggcccagttccagcatggttgggaaaactgccagacctcgtattacttgatttagagagtaataaccttgttggtccgatcccatctgcattgggtaatcttagtaatcttgacacccttggccttcaatcctgcaatttaacaggacagattccacaagaacttgcacagctcaggaaaatcaaagggctattcctcgaccataatcattttacaggatccatccctaccttttttgccaacttttcggaactagctgtattcttaattggtgctaatagttttaccggagcagtaccaactgcaatcggtagcacaggatcagttgaatggttcaatattggagacaactacctacaagggagcctcgacttcttggctacactttcaaactgtcaaaatatctgggaagttggcttcgacttgaattatttcacaggggagctccctaactatgtcggaaacttctcaagtactctaataaatttctttgcagtaggaaacaggttatccggtgatcttccttctaccctgttgaatttaagcaatctcgtttggttggacctttcaaacaaccaactgactggtactattccagaatcaatcatgctaatggacaagctccaagttcttaatctctctggaaatatcatgtctggcacaatcccaagacaaataggtcatctaaggaacctacaaacactaatactcaataacaacaacttctcaggtgtgctaccaaacgatcttggaaacctcagtaatctacaatatcttgttctatctaaaaatcatatgtcatcaaccataccagcaagcctattccatatgaatagcttgataaccgttgatctgtctcagaactccttggaaggtgcattgccagtagatatagggcagctaaatcatattgacaggattgatctctcttccaaccggttgtttggtaggatccctgaatcctttggacagtttctaatgacaacatacctgaacctgtcacacaactcactaaatggttcatttccaaactcttttgacaagttgatcaacttgaaatcactggatgtttcatacaatgatctgtcggggacaattccacaatatttagcaaattttactgatctctctagcttgaacctttcattcaataacctacatggtccaataccagaaggtggcatctttgcaaacatcaccctgcaatctttgatgggcaaccccgccctttgtggtggtgttccacgtttggggtttatgccatgtaagagcaacaataatagtaataaaaggcaaatactaaaattcttgctccccagtgttattattgttgtcggagttatagccacatgcatgtacatgatgatgaggaagaaagccaagcaacaagatagaatcatttctcctgatatggaagatgtgctcaacaataggttgatctcttaccatgacattgtccgagccacggataattttagtgagactaaattgttgggggctggaagctttggaaaagttttcaagggccaactgaacgacggtactatggtggcaataaaagttctcaacatggagctggaacaagctattagaagcttcgattcagagtgtcatgccctgcgcatggcccggcatcgcaacttgattaggatactcaccacttgttccaacctggacttctttttttcgccgggaaggccgaaggaggccaaccgagtatattaagaaggaataaaagttacaagagaaaaaacaacaaaatgcaccaaggtgcattgcaacacaccacgcgctaccacccaagcacaaaccgctgagggtgaaacctagcaccaaacgacccccgctgagcgtggccgaacgccgctaggcctacagcaacaccacagagacgaggctccgaaaacgatgccaccatggtggtcacgacatccaagatgccgccatcgcccataaaaaaagatgtggttttcacccagagaagctcgccaagaaagggagagggtaaccctcgacaacgctccaaggagattacgacgcccgaagacgtagccgctgacggcccggtgaaccaccggactaggctttcgcctgggtccctacaaccttgactgcagatcgccatccaccaactcagaaccaccacacagacaaatggcagcacgtggcatccaccacaccgcaccgacgcccctccgtcggtcgacttcaacgaaccaccacccctgaaagctggcctaggactcctccgttccaccacccgccggccgcctcgccagatttggccgaaggagaacccgggactaggtggcattgcttcggcagcctgagcttcccccattgatgagctgccgcctcaatccaacctagaaactccccgcaaagaaggggaggagctccacgaaggccgagggtgccgaccggcaacgaggaagacggcccatcgccgccagctccctttgcactgccatctggccgccggtggtgctgctgctccggaccggcgccacccgccggcgcccctgaagtccggccgctgcgcctcacctagccaccgcgacggcatcccggctgcccggccaccacgccgagccaccaccgaggcctggacgacccaccgcgccatgggctggcgctgggtggccagggcgagcgagtgagcaggggcaccgctgccgctctgggcaggcttagctgcccgccgcctccgcgcggccaccgcctctgcgacccagccggccacgacgagccgcggccatccgctgcccgcgcccgccgctgacgagccgcctccacgccttgccgcagccgtccgccacctccgcgccagtgccgggccggcctagccgcagccggccgccgcctcgccgccttgcagccagccgccaccatgaccgcatgccgtcgcgccgccccaggcctcctcgcgccgccgccacgcagatccaggcgagggagggccggatccggccatgggggctccggatccgccgcttctccacacctcgccgccgtagccgctatggaccacgccggtggggagcttcgtcgtcttcgtccttcgcgccgaggagggagacgctacgaagagaagaaggcctcgccgctgccttccctgcccgctgccggcttcgccgccggcgggctccagcggcggcgaggtggggggagggagggagagaaagc

SEQ ID NO: 5341 - DNA, 67216 bp, Oryza sativa
tgcaattcggagtccaggaccagtctgcactaaaacatgcgcccaggtcgcatacgtgctcggattggggcgttctttatatggatggaaagctaagaagatatcatttccaatggttttggtcccacgtccaaattatttccgagtcaatgggaattgaccgaacaatttgatggccagaatctgtcccggtattacgtcaccgtatttgggcctttggcccgtgtatcgtgttggaacccattagggttgcgtcgagaggggtttgtacgaccctaaactctatttatcagtacccgcagacatctttagctttttgggttttgcttagattaatctgtcgagaacagtttggccgctagatcggtttgtaagaccccaactcgtgagcttaatcattcatctgcaattttggttgtttttctatctcgttcttgttattgttcttcgattggcaaacaaggattggccttctcagcgaggtcatccgcgttttgacacaggtgataaccagaggagacgtagtgctgcgattgcggggctcaagagcgtgcgcgttcaagaagcaagatcgatttgtgtcgcgactccgcccaaatcgttgtttatcagaacctttcgggagatcgggaaccctagtgcacatgtaaattcccctgtataaccaaaaccctagtggtaagaacctttaatgggggctataaatagtcccatagggggatccaagtaaaaatttctcaaattaatacactatagagtaaccacgtctttcgacgtatgcggttgtcgtttcgacaacagctggcgccgaccgtggggacctccgagcgaaaccactgacagcgaatgccaccgaagaaggtcgtgaaggaaaaggttacgaggcgaaaggaaagcgacgccggggcggacatggccgccgaagagggagcagagccttcggtgcccgttgccgaagatggaggagcgccatctgcttccgcacctgtgctatcactaccgccttcggcccctaccacctctgtgcaggtgccgaacgcggccgacatgacgaaggctgctgcggcggcaagggcactccagaccagggcggagatcctttcgacaagccaattgttggtgccacaagacgctccatcgcagccggcagcggccccaaccgcactcgccgccgtgcaggccgtcaaccatgaccccgaaacacaaaccgaagccgacatggaagccatgcgacagaacatgacacgtctccaggacatgcttcgccagatgcaagagtaacagtaagcatacgaggcggcgaggcggaccaagatcacttcggccccaatcctccagtattcggtaggctatgttccacctcaggtttatccacaagtgacgacccagccccttccgccacaagtcgcgcaggcgccaatgtacttcgtcgggcagccgtcgactgcagcagcgcatccggcccctcacgtgcaactgcaacctcaaccggtcgctgcccaagtacaccctcaaccacttggccaagtgccgcaagcaatggcagaaggggcttcggccctgcaggcgcagttccaagctccttcagcagctcaaccaaccccacatttcaagtacaaccccatcggctcgcccggaggggaatacaagtcaaggtgcgcccagttgtttgccatcaaatcagccaagaatgggggcttcgctgtagagtcaaggaccgcagttcgactttatcaatgctgctcaggcgccaaccgtttggccgcaagcaccaacgccaggcttcggagcaagccacgcaccaacccaggtcgccatgacatggtcgcagccaatttttgacccatccatggcggctcagcaagcgtaaccaattggagctaggcagccgaatgccatggcccaacctcacgcgcaagccgtgatttcgcccttcgccacgccgtacccacagcaaggtgtcgtgaaaagggcggggggcaaaaaggggctaccgctgagtgggggaatcaagacccgtccaatcccaccccaattcaagttcccacccgtcccacgctactcaggagaaaactaacccaaaagaattcctctccatttacgagtccgcgatcgaagcggctcatggcgacgaaaataccaaggcaaaggtaatacatctcgctctggacggcatcgcctgctcgtggtatttcaatttgctagcctatagcatttactcatgggagcaattgtgcaatgtctttgtccttaactttcgaggtacctatgaagagccgaaaacgcagcagcacctacttggtattcgccagaggccgggggagtcaataagggagtacatgcgtcgcttctcgcaggcccgatgccaagttcaagacataaccgaggcgtctgtcataaacgctgcttcggctggcctgctcgagggcgaactcacaagaaaaatcgccaacaaggagccacagacgcttgagcacctacttcgcttcattgacaggttcgcaaggggcgaggacgattccaagcgacggcaagctattcaagctgagtacgatatggcttccgtcgccgctgctcaagcccaagcacaaagtttaagttgccgaaccacctcccctcgctgttcgccaaccccagccggcaatccaaggacaaccgccaaggcaaggtcaagcccccatgacctggaggaagttcagaaccgaccgtgcgggcaaggatgtgatggctgtcgaagaagtgcacgccctccgcaaggagttcgacgctcagcaagcaagcaaccatctactgcccgtccgcaagaaggtctgaaaagacctctactgcgccttccacagacgctcttcgcacaccacggagcaatgccgaaacattcggcaacgtggtaacgcacaagattcaaggtcacagcagggagcagcggtcgaagcacctcgcgaggtagctcaagaacaagcacccccggccgaacagcgccaagatgcacagcgcagaataatccaagtgattacaagggctgacccgctaacccaactgttgaagcgacaaaagaagatgcagctacgaacgatccacaacatcacttcggcaggcgaaggggctccgcagtatctgaaccaccaaatctcttttgggcctgaatatgccgaaggagtaatgttcccgcaccaagatggggttgactacccaagcccttaccccagcaccagcatcacttcgaggcttcggcggagaagcagttcaagttcttggccaagcacagttgatgatagccttcggcacaggggaaaacagatgcaaagagcaagtattgttcgacgttgtcgacatcccgtacaactacaatgccatcttcggccgtgcaaccctgaacaagttcgaagccatttcccaccacaattatctcaagctcaagatgcccggcccaacaggagtgatcgtggttaaggggcttcagccttcggctgcctcaaaaggtgatctgaccataatcaacagagcagtgcacaatgttgaggccgaaccgcatgaccgggcgaagcacgtgccaaagcccgcccctcacggcaagatagccaagatacaaatcgatgatgccgaccccacaaagctcgtatcgctggggcgacatgggcgaagaagaagccaagaaaatcctagaggtactcaagaagaacattgatatcttcgcctggagccccgatgaagtgggaggtgtttcaacaaaatctcatcatgcatcacatagtagtcaagccggatgccaagccaaggaaatagaagctgcgcaagatgtccgctgatcgccaagaggcagcaaaagccgaagttcaaaaattactcaaagctggggtcattcaagagatcgaccacccagaatggctggcgaatccagtgctggtgcggaagccaaatggcaaatggcgcatgtgtgtcgatttcacagacttaaacaaggcatgtccgaaggacgatttccccttgccacgaatagaccagctagtggattcgacggctggctgtgaactcttgagttttctagatgcatattccggctatcaccagatccacatgaacccggccgacatccccaaaacagccttcatcactccatttggcaccttttgtcaccttaggatgcctttcggcttgagtaatgccggagcaaccttcgccaagttggtgtacaaggtcctttgcaagcagttggggcgaaatgtggaagcttatattgacgacaccgtcttaaaaagccgcaaggctttcgaccacgcgtccgaccatcaggaaaccttcgacaacctgcgcgcagcgggcatgaaactgaatcctgagaagtgcattttcggcgttcgtgcaggcaagttgttgggtttccttgtttctgaaagaggcatcgaggcgaatcccgagaaaatcgatgccattcagcaaatgaagcctccgtcgagcgtacgtgaagtacaaaagctcgcaggccgaattgtggcactcagtcgattcctctcaaaggtagccgaaagaggtttgcccttcttcaaaaccctccggagcacgggaaaattcaattggacacccgaatgccaagcagcgttcgacgagttaaagcaatacctgtaaagcccgccagctttgatcagcctagcaccaggaagcgaactgctattatacctagcagcttcgatagtggcagtcagtgctgccctcgtccaagaaacagattcaggccagaaaccggtctatttcgtctccgaagcattgcaaggagcgaagacaaggtacattgaaatagaaaagctcgtctacgccctggtgatggcttcgcgcaaactcaagcattactttcaggcccacaaagttatagtgccatcgcagtaccctttgggagaaatactccgaggcaaggaagtcactggccggctcagcaagtgggcggcagagctatcccctttcgacttgtattttgtcgcccgcactgctgtcaagtctcaggtgctggttgacttcgtagccgagtggacaccagcattcgcccccaaacccgagccggtcgaatagccttgggtgatgtactccgacggttcgtggtcgcacaggggggcaggcattgcagtagtactcacttcgccgaatggtgtgccgattcggtatgctgcaaggctacagttcgaaactaccaacaacgcaacagaatacgaagctattcttccgggcctaagaaaggcaaaagcactggggttcggcccttactaatccgaaccgactccaaactgttgcaggacatgttgacaaatcctttgaggcaaaagaagaaggaatgaagaggtatttggaggccgttcggtctatggaaaaaatgcttcaccggcataacggtcgaacatttgcctagaggccagaacaaggaagcagacgccttggcgaaatctgctgcttgtggcggcccacattctcctggcatcttttttgaagtcctgtatgcaccaagtgtgcccacggacatcttggaggtcacgacaatcgaccaagtgaaactgggcgaagacccatacaactggcgtaccccatttgtgaaacaccttgaaaccggatggcttccggaagacgaagcagaagcaaaatgcttgcagcacagagctacaaagtacaagatggtctcgggccagctctatcactccggggtacttcaacccttgcttcgctgcatctctttcgccgaaggcgaggaaatggcgaaggagatacaccaggggctatgtggcgcgcaccaagttgcaagaacagttgcctccaaagtgtttagacaaggagtttactggcccactgtgttgaaagtctgcgttgagcaaatcaagaaatgcgaaagttgccagcgtcatggccgaagccaaaccgcgcccaagtatgagttgcagcccattgcaccaatctggcctttcgccagatggggactggacatcattggaccgttcccggtggcgcgaaacgggtacatgttcgcaattgtggcggccgtcgaatacttctctcgatggattgaggccgagcccctcggagcgatcacttcgacagcagtacaaaagttcgtatggaaaaacattgtttgccgtttcggagtgccaaaagagttcatcacttacaacggcaagcagttcgactctgacaagttcagggaaatgtgcgaagggcttaacctggaaatcaggttcgcatcggtcgcacacccacaatcaaacggggcggccgaacgcacaaacggcaaaatcctagaagcactaaagaaaaggctcgagggggcagcgaagggcaaatggccagaggaaatgctgtctgttctctgggcccttcgaacgacccgtacaagaccaaccaagttcagcccgttcatgctactttttggcgatgaagcaatgaccccaacaaagctaggggctaactcaccaagggtgacgttctccggggacgaaggggggcgtgaggtgtcgctcgaactcttggaaggggtaagagtcgaagcactcgaacacatgcgcaagtatgacacaggcacttcggcaacttacaacaaaaaagttcgaccgacagagctgttgcctggccgatcgttgtaggcaagcttgaatcaaattgggaaggaccataccttatcaagcacaagtccaggacaggatcttttcgattggcgacactagaaggtgacgagttcaaccattcctggaatgctgcctctctcaagcgcttctatgtctagaacgggtggcacccaaatcgccaacttgtaaaaatgtacatattgtcatattagcccctcggcactacgtaacccccttggcactatgtaagcctttcggcaagaaaaaaaaagaaaaaaagaggaaaatgagaaaagacaaaaaaaaactggatgtagggctattatccactacggaggcccgaaccagtataaaacctctgtgtcctccgccttctttttatttttgtgtgattgacagtttgtcgaaaaaccccaaggcaaacgcctgatcagcgaaaaaggccagtgggcgaaacgaatcggccgaagcatcgctcgccgaacgttgaaaccgtaacagcttgtttcgggaaacaactaaccgaacaccgttacactccatcaaaaggaaagcacaaaaagctccttacaacgtggagcgaaactgatcgaaaacggaagccgaaagctgaaaagtcaaaacccatttcgctaatatatgcaaaggggccgacacattccgacccaacgaaaagcacacgaagtgacaatgcaaaaatagcgaaaagaaaataaaaaacacctttattgatttcaagtaaaaatcaaagtatacaaacctatcacaatggtacaagtgaaaaagaaaagggcaatggtgtcacggcccagctcacagataaattacatcttcgcccccgcaacctctctctctctctctctaaggagtggttagacgaactaggttcgtcatcactactaatatcatacgcaaccctaagatgagtagggggcgaaacacagactagactgtaacgacgctgggagatcgcctcctgctgatcagtcttctgatgatttcgccaaaagcgagccatatcctccaaacgtcttgagcgaacaaaatcgtagtcttctaaggttcgcccggggtgcgcccgcagccagccggcaaccttaaaaacattatagctgcgaccgtttatcaccatctcacggtaaacaggccgaaatgggcatcgcaccttcggcagacccttcaatgccacaaatttctcgtttgactccaccaactcccagaagggggccgaatgcacaactttcggcgaacaccctggtagacagtgcaaaaagagcaaaacacaatttacatagtaagaataggcgaaaaaagggaaagtattgtataatgcgaaacaggcgaaatcataatacgccaaagacttcaaccaccaaaaagtggctaaggttgagttgtacattccaaatatccaaggggcccttttttggctacaataagggggattagcggcagcctgccgaatatacatcgttcgcctctccaggcaaacacaaaaagaaggaaaactacaaaaatctaaggaaagggcggagggcctcacacctctgggtgatcctgggcatcgcctccaccctctttgtctgccgcgtcctcttcctcgcaccggactgccgcccccgccttcgccagttgctccaaaaggcgtgccttggcagtggaccggccttccttctgccagaaatgttttcgccatgcacgaaacgcgggtgaaatgttctgcgcactaatctcccagtcccctttcgcatagttagggaactcagcgacgtgctcacagccgaactgttgcaaaaggcccatagtgaaggccgccgatacgcgcgagcagcaatcgccgtacgtagtggcgcagtccgaaaccgaaccaccaacctgctaggtccactcggagaagtctaaagctgaggcatcttcagcagggacccctcacaccttcgcacccatgtcagtaagggcgaggcgcagcgtttggcacgccgttttcccggactcggttgtttttgccatctctcgagaaaaccgctgcgactcctccacagcgcttgcttcagccttgctgaccttcaggcgaagagcctccatcttcggctcagtgaggttataatagtcggtcagcgcagcggaatgggccttttctttctccagttcagccttgaggcgatcgacctcggccctagcctcgtttcctttctcaaactcggattggaggcgcctgttttcggttttcgcctctttgagggtgttggcgagggcctccatctccaagttcttgcggcctatttcgtcatccttggcccgaagacggttcttaaatccgtcaagacgggcgcgcacgattcgttctgtcgaacagtgagccgcaagaatctggatgcaagataggagcaggcgaagagaacaaaatgtcaattatgagacatgtaaaaaaaagaggagtggaaaatcaagaagagagaagaagcatacccgaaccgccaagcttttaatagcggaacacccctcatcaaactcattcagttcggtgaataggcttagggtgctggcaggcaagacaagattgcttactccctcgacaaagggaataagtcgcccgggtctcgaaatcgccaggggcgaagtggggcgccgcaagggaatattccgaggcggatgtttcggcggccgcacccttccccttcgttttgaccagaggcgaaacaaccggttgacgcgaagggctgccgaagaccctcgtcgcagccgtcacgatccattctgcggaagctgaaacctcggcagcggcgctaccgcctgccccatcggcaccgagtgaaagaatgggggcggtcgaaaggtccaggctgcggccagcgggcgaagtcggagtctcgtcagaagactcgtcgtcgctgaaaacgcgagcgacatcgacgagtcctctccttttggagatcttcttgaccggacctcccttcgccgccttgcctgacgaaaacgcaactagcgtcttcgccccctccaaatcctttcgtcgaaggggggagctgttcgactccaccccggtctcgttgtgacctggacttggagtaggagtgtagccaggggtgtcgacacggtcttcggccgcctcgttcgtgaccttttcggcaacggcctccgcttcttcttcttcctctccttcctcctcgccgtcaggctcttcgacatcgtcctcatcgtcggcgtcagaatcggaggaagcaggaacccttcgcttcctgggggcaagcttcacttgtccgcgtgttcactttcgcgaaggtcctgtatcgtcgtcagctttgtgggggttcgcccggggaggcaattcgccgttgtaaacccggttcgcccggccggctgcttgtcgtgtcagcaactggctgtactcgacgaccgacacgtcgccgatcatcctacgggcttcggcttcaacttggtcaagtgtcaacactgcaaaagtaaagggtgtagccacattaagcgtcaaacaaagcaaaataacaaagcgcaggagtgcatagcgaaagagcagtcttactattcgttccctcagggagaaccaatttcggcaaaccatcacactcttcgccttgatcaactacgacttgccacgattgggagaggggaaagatgcgaagcatgaaaattcctccaccaagtcgcggcagctaaggcgggagcaaaccttacgtagcagagcaaaccgtgcctccatagcgtcgtccatggcgatcttgggtttccggttcgatgcaatcgccctggcgccggcacaggagggctttcgctgagtcggagccagcctcgaaggggatggtgtggtagaaccacctcgccatccaatatccatcccacttcgacatggcggcgttcaccggccagagatcggatcgctcggggcgaacattaaagttaatgctcccgaacactgtcttcttcgtccctgccagggtaatcaccgtcttcgagttcacggtggcagaaaatattgcaccgaaaagttcggcgctaggctcaaatccggaagtccgtgtcacgtcctaaatatcctaaatatataaactgtggtttaaatggaatttttagaaattattttaaaagcctacaagctaaactctaattttctaggaaaattttcaacataaaaatgagctacataaaattttattaaatactatgcttgttcctctattttctagatttttctgggaattatttgagcaagggaagtatttttaataattgaaacaacatttcacaaattgttttatttgaaaaagttcaaaaacctctcctttaggttattgggccgattttggcccaatactccctctttcccgcgcggccgagccggcccaagccggcccaaaccgtcgccgccgccccctcctctcgggagaccgacatgtgggccccacatgtcggatccatccctaacctccagccgccggctcaagccgcccgagccgcctccttctccctccaaatccgcctcaatccggcctccttgagtccgattgattgaggggttttgatcctctcgttctcctctatcttttcccccaagtttcggagcaaatcgttgaggattttatccgaatcgagttcgtttcgattttatccctaaaaccgagtttggatttttcccgagtcgattcctctcgtttggagtccgatctcttcaatccaaggctataaataggaccacctcgtcgtcctctttcgtttgccccctatcccgagctctctagtgccccgtagcgtcgccgcatcgagctccaagtcgccgccgtcgccggccatcttccggcgtcgtcgcgccgtcgattccgccgtcgccgccgccttttctcgtcgccgttaggtgcgccgtggtgaggagaacctcggccgcccgtcccccttcgccgccgaccaccggagctccgccgtcgccgttaacccgagccgccgccgccgtcttcctcgtcgccggccgtcgtcgttcgtcgtttgccgttgtggtgagtaccatcgggttcgtctcgtcgtcctctacgcgtagatgtcctccaaatccccggccgaccgtcctatctccggcgagcttgctaaccctagccggccggccatggatgacgtcagcatgacgtcatcatctccttttttctttcttttttccaattttctaatagattaaaacttcggaaaatcataactaaataaccgtagatccgtttcaggtggttcaagttgctaaatttttctaaaatcaagatctacatgttaaaaatatccacatgtactgtttatgcttgtttttgtactgttttgttgatttttgtttaattgctttagtttccgacgttccggaggagagcgtttccgttgaggaaggttccgaagcgtttgcggaagcccaaggcaagtcacacagatcccaaacaaccctttgagcatgttgaacccgtttaaagctattattttatttcaactatgcattgttttcgaatgtcatcgggtggtgaacctttcccagttaatttatggctgaagatgactttattttcctatgggttataattggattagcatgaaccttatatattggattggttcagctaaatgctatatgtaagtttgcttagccatgcttagaaacattagctaactaaagggattaattataaactatgttacattattattattaattatggttacattaaatggtagctcacgatggtaaatcgtgtgatgttaattaattgataattaaaacctggttaaggtgggttgtgagcatatggttttgatggttgtgctcatgacaattaagaccggttcgcgagctactgttgtgaaacatttatcgtgccaaccacaagccagcgtgggcaacggctttatcttttgtatagcgtgattctttatagtgcgccagactgagaagtggcgagaagtccacgggggtcgctggggagtccatgccttgtttataagggggtgattatgatccaggaaaggtgtgctgtaatgggttatgttgtgcaaggggtattgtcacaactcctttccgaggtaccgtggtggtattgaggcacatggtaacatgatgtggggttgtgtcttgtgggtacagtggtacacctctgatcagagtttaatctattcgaatagccgtacccgcggttatgggtgagttgagcaatgtttttcgtgattagtctcacactactcattagtggtaataatgtggtaattaatttgactcctggtttggaatggataattcctggtttggaggtttaatttgttcaaccggggttggttgttcaaatgtggttgggcctatgcaacatgggtgtgttgtatagtgtttatttaatattgattaattatacaactgttttactattctcttaaaatatttactaaatgctgtttctgcaaatgagctatattatgccatcctttgttatcctgtgcacttgcatttttgctgtgtgacttgttgagtatgtcatatgctcattcttgcaatattcattcatcagaagaggagtatctcagtgaaggtgatgatctggaggattaggcttgttcttggttaagatgcctgtggagtagagtcgccatagctgttccgtagtttgttttagttttaattttccactgcgtagaatgttatttttttgagaggaactatccacctctgtaatattttattatttgcgaatgttaaatagttatttattcgtactctattattaatttgtcattgtgtgcctcggttgattcctggacgagggtttaacacacatgtaagcgtttggaattttggatagaaattccgggcgtgacaagttggtatcagagccaccttgaccttaggataagccaaatggtaaaccttaagtagccttcaaaatatttttgaaaaaaaaatagaactgctcttctctattctcttataaattaaataagttggcagcacatgcaaggttatgcacaaaatttatttaaatcaatttcttttcttttaaaagcaaaaggttgttcttctcaaaatgtttctttttctctttaccaaatcttattgattagtcggcactgtacatctattatggtatcgatttaatcatgctggcaccagtactactcatcccctttaatggtgacattgtaccgtgcttatagtaggtcttaagtattctggttttattttattcacttgtccaaactgatttttctctgttcaaaagttaaattcaaaaagaaaaatatataaaatagttttgtatgtgtcttttcctttattttcttttcgtttattttcttcctttttggtcaaaatcaattaagtctagttggtgcagctaacttaaaaatatgcattaattcttctcttctatgtttctttagatgccgccccattcaccgagaaatttgatcaaggtgttaggattcgtcagggagctgaggttgatggcttttgaggtaggctatgaagttgctcctgagtatcgccggatttcccatgaccccgacgaggagaagtgtcgtgttcgtgtaacgttggctagtgatcgtgaagaccttccgtccattaagttcgaagctggaggaagatcgtacagccaggcttgtcaagaagcagctctggtggccattggagagttgcgtcaacgctttgaagaagagttggattcatcagctttccagtatcatcctcacaagcctcatggtcaagactatggaacctatacctgtcctgatggtgaagagagtgccactctgatgcatgcggtgcatatgcttagtgctatggatgcagtaagtgtggagcgagacaaagcagctcatgacagggaaaattggaatcgaggcaagatttgcaagttggagagcaaggtgtatcgtctacagaaggaattagctgaacttaaaggagaaacgccgcctccaacacccaagcttcacctcatcgcaagaaagagaacctgtccgccacctcgtctccagttagcttcgaagattcgcgtgatgggtgaagctgtgcccgatcgtgctgaacctgtcatcgacatcataagtgatgaggaagaagaggaagaccctgaagaaagagagccagctactccagaggaagaagatccatcgcttcgttccgacgcaaggcggaattagtcgcttagattagatcgttgccgtagttcgctgtgttagattgcttgtttaagtttgcttgtgagtgtgtgggtttttagttgttgcttacatcatgggtgggatgtaacagcatgagtctagttcttttgcttgtcagagtgtaagatagttggtgagatagtgttaatgcaacttaaatgtaatcatatacagtaaagagcaatatagaatttaaattaattaaataactccgctctaagggtgtctctctgtcgtttctttcctgttgtctctgcttatcgtcagatggtgaacacgcgcactggaactggaagtggaagtggaagtggaagtggagctactaacaatggaggagatcccacgctagctcagattctggcccaacaaacacaactgatcaatctgttagtgcagcaggcacagaatcagcaggcaaacaatcagaaccagaatccacccccacctccccaaaacaagctggcagatttcttacgtgtgagaccccctaccttttcaagcaccaccaatcccgtagaagcaggagattggctgcatgcggtggagaagaagttggacttgatccagtgtactgagcaggagaaagtttcttttgcttcgcatcaactgcatggacctgctgctgaatggtgggatcattttcgccaaggcagggctgaaggagagcctattacgtggcaggaattcacggccgctttcaagaagacgcacataccagcgggtgttgtagctctaaagaagagagaatttagagcactcaaccagggatctcgttcggtcaccgagtacctccatgatttcaaccgtttagctcgctatgctccagaagatgttcgttcagatgaagaacgtcaggagaagtttttagagggactgaatgatgagttgtcttatgctttgatgtctacggattttcgggatttccagcagttggtggacaaggcgattcgtcaggaagacaagtataaccggatggagcagaagaaacgcagggctgcccaattcaaggcacaacagggcagtaaccagaggccgcgtctcgttactggacctcaagctccatcgtaccctcaaggaggatcttcatcagttgtccgctcccaacgccagttctacaacaacaatactggtaatcgtggcaatgacaaccgcaacatggttgttcgtcctgcagcaactccagttcagaaccagcccgttaggaaggaacagggaagcaagccaggggtgtgcttcaattgtggtgatccaggacattatgctgataagtgtcctaagcctcggcgcgtgaagaacgttccagccccgaacaactccaatgctccagcaccaaaggcacgtgttaatcatgttgcagcagtagaagctcagaatgcaccagatgtggttttgggtacgtttcctgttaactctatacccgcaactgtgctttttgattccggtgctacacattcctttttgtctaaaagttttgcgagcaatcatgggatggaagttattagtcttgggagacctttactagttaataccccaggcaatcaagtgttttcgacacagtattgtccttccgttattataggaatagaagaagttcttttcccgtcctcccttatcttgctagaatccaaagatctagatgttatcttagggatggattggttatctcgtcacagaggagttatagattgtgccaaccgtaaggtgactttaaccagtagcaatggggaaacagtttctttctttgtgtcctctcctaaatctcatggggtgatcttaaaccaagttgctctacaagagatccccatagtacaagactacccagacgtgtttcccgaggatttgccaggtatgccacctaagagagacatagagtttcggatagacttggtacctggaaccaaccctatccataagagaccatacagaatggcagcaaatgagttagctgaggtgaagagacaggtggatgatttgcttcagaaaggatatatcagacccagtacttcgccatggggagcaccagtcatctttgtggagaagaaagatcatactcagagaatgtgtgtggattatcgagcgttgaatgaggttaccatcaagaataagtatcctctacccagaattgatgacctgtttgatcaactggaaggtgctacagttttctccaagatagatctccgttctggatatcatcaacttcgaatccatgaggaagatataccaaagaccgccttcacaactcggtatgatttattcgaatgtaccgttatgtcatttggactcactaatgccccagcctttttcatgaatctgatgaacaaggtgtttatggaatatctggataagtttgtcgtggtgtttattgatgacattcttatttactccaagacgaaggaagaacatgaagagcatcttcgtctagctttagagaaactacgtgagcatcaggtttatgccaagttcagtaaatgtgaattttggttgtccgaagtgaagtttcttggtcatgtcatctcgtctggaggagtggcagtagatccaagcaatgtggagtcagtgttaagttggaagcaacccaagacggtttcagaaattcgtagtttccttggacttgcggggtattaccgcaggtttattgagaacttttcaaagatcgccagaccaatgactcgtctgcttcagaaggaagtgaagtacaagtggacggagggttgtgaacaaagtttccaagaactgaagaaaaggctagtgactgcgcctgtgttagttttgcctgattcgaggaaaggtttccaagtgtattgtgatgcgtcccgacacggtttgggttgtgtgttgatgcaagaaggaaaggtggttgcctatgcatctaggcaattacgtcctcatgagaataactacccaacgcatgacctagagttggcagctgtggtgcatgcattgaagatttggcgtcattatcttttcggtaaccgtacagagatatatacggatcataaaagtttgaagtacattttcactcaacctgatttgaacatgcgtcagcgaagatggttagagttgattaaagactatgatatggaaatccactatcacccggggaaagcaaatgttgtagccgatgctcttagcaggaaaagctactgtaatatgtcagaaggtcgacgtttaccttgggagttatgccaagaatttgaaaagatgaacttgggaatagtcagcaaaggttttgtggctactttggaagctcaacctactctgtttgatcaagttagagaagctcaagtgaatgatcctgatatccaagaaataaagaacatcagaagccagccggtctgttacaaccattgaagattccagagtggaagtgggaagaaataggaatggattttataaccggtctacccagaacgtcggcaggacatgattctatttgggtagtggttgataggttgacaaaagtcgctcacttcataccggtcaaaacaacctatacagggaataagcttgcagagttatacatggccagagtggtatgtttgcatggcgttcctaagaagatagtgtcagatagaggtagccagtttacttcgaagttttggcagaaattacaagtagagatgggtaaccgtttgaatttcagtaccgcttatcaccctcaaacagatggacagacggaaagagtaaaccaaattttagaagatatgttgagagcttgtgttctagattttggtggaagttgggataagaatttgccgtacgcggaattctcatataacaacagttatcaagctagtttgcaaatggctccgtatgaagcattatatggccgaaagtgccgtacgccgctcctttgggatcaaaccggtgaacgtcaagtttttgggacagacatattgcgagaggcagaagaaaaagtaaagattatccaagaaaggttgcgcgttgctcagtcgcgtcagaagagctatgccgacaatcgtcgcagagatttggctttcgaagaaggagattatgtataccttcgggttacgccgttacgaggtgttcatcgtttccaaaccaaagggaaattggcaccgcgttttgtgggaccttttaagatcgtgagtcgaagaggtgaagtagcttatcagttagagttgcctccgtcaatggcgggaatacatgacgtgttccatgtgtctcagttgaagaaatgtttacgtgtacctacggaggaagcagatcctgatcgtatagagcttcaagaagatttaacttatgttgagaagccagtcagaattttggaagtaagtgagaggaataccaggaatcgcgttatacggttttgcaaggttcagtggagcaatcattcagaagaagaagccacttgggagcgagaagatgaattgaagtcagctcatccttatatgttcaccagttcttctgaatctcgaggacgagattccgtttaacgggggtaggtttgtcacgtcctaaaaatcctaaatatataaactgtggtttaaatggaatttttagaaattattttaaaagcctacaagctaaactctaattttctaggaaaattttcaacataaaaatgagctacataaaattttattaaatactatgcttgttcctctattttctagatttttctgggaattatttgagcaagggaagtatttttaataattgaaacaacatttcacaaattgttttatttgaaaaagttcaaaaacctctcctttaggttattgggccgattttggcccaatactccctctttcccgcacggccgagccggcccaagccggcccaaaccgtcgccgccgccccctcctctcgggagaccgacatgtgggccccacatgtcggatccatccctaacctccagccgccggctcaagccgcccgagccgcctccttctccctccaaatccgcctcaatccggcctccttgagtccgattgattgaggggttttgatcctctcgttctcctctatcttttcccccaagtttcggagcaaatcgttgaggattttatccgaatcgagttcgtttcgattttatccctaaaaccgagtttggatttttcccgagtcgattcctctcgtttggagtccgatctcttcaatccaaggctataaataggaccacctcgtcgtcctctttcgtttgccccctatcccgagctctctagtgccccgtagcgtcgccgcatcgagctccaagtcgccgccgtcgccggccatcttccggcgtcgtcgcgccgtcgattccgccgtcgccgccgccttttctcgtcgccgttaggtgcgccgtggtgaggagaacctcggccgcccgtcccccttcgccgccgaccaccggagctccgccgtcgccgttaacccgagccgccgccgccgtcttcctcgtcgccggccgtcgtcgttcgtcgtttgccgttgtggtgagtaccatcgggttcgtctcgtcgtcctctacgcgtagatgtcctccaaatccccggccgaccgtcctatctccggcgagcttgctaaccctagccggccggccatggatgacgtcagcatgacgtcatcatctccttttttctttcttttttccaattttctaatagattaaaacttcggaaaatcataactaaataaccgtagatccgtttcaggtggttcaagttgctaaatttttctaaaatcaagatctacatgttaaaaatatccacatgtactgtttatgcttgtttttgtactgttttgttgatttttgtttaattgctttagtttccgacgttccggaggagagcgtttccgttgaggaaggttccgaagcgtttgcggaagcccaaggcaagtcacacagatcccaaacaaccctttgagcatgttgaacccgtttaaagctattattttatttcaactatgcattgttttcgaatgtcatcgggtggtgaacctttcccagttaatttatggctgaagatgactttattttcctatgggttataattggattagcatgaaccttatatattggattggttcagctaaatgctatatgtaagtttgcttagccatgcttagaaacattagctaactaaagggattaattataaactatgttacattattattattaattatggttacattaaatggtagctcacgatggtaaatcgtgtgatgttaattaattgataattaaaacctggttaaggtgggttgtgagcatatggttttgatggttgtgctcatgacaattaagaccggttcgcgagctactgttgtgaaacatttatcgtgccaaccacaagccagcgtgggcaacggctttatcttttgtatagcgtgattcgttatagtgcgccagactgagaagtggcgagaagtccacgggggtcgctggggagtccatgccttgtttataagggggtgattatgatccaggaaaggtgtgctgtaatgggttatgttgtgcaaggggtattgtcacaactcctttccgaggtaccgtggtggtattgaggcacatggtaacatgatgtggggttgtgtcttgtgggtacagtggtacacctctgatcagagtttaatctattcgaatagccgtacccgcggttatgggtgagttgagcaatgtttttcgtgattagtctcacactactcattagtggtaataatgtggtaattaatttgactcctggtttggaatggataattcctagtttggaggtttaatttgttcaaccggggttggttgttcaaatgtggttgggcctatgcaacatgggtgtgttgtatagtgtttatttaatattgattaattatacaactgttttactattctcttaaaatatttactaaatgttgtttctgcaaatgagctatattatgccatcctttgttatcctgtgcacttgcatttttgctgtgtgacttgttgagtatgtcatatgctcattcttgcaatattcattcatcagaagaggagtatctcagtgaaggtgatgatctggaggattaggcttgttcttggttaagatgcctgtggagtggagtcgccatagctgttccgtagtttgttttagttttaattttccgctgcgtagaatgttatttttttgagaggaactatccacctctgtaatattttattatttgcgaatgttaaatagttatttattcgtactctattattaatttgtcattgtgtgcctcggttgattcctggacgagggtttaacacacatgtaagcgtttggaattttggatagaaattccgggcgtgacagtccggcacgcccagttgaagatagcgatccggaccagcgccgatgggctcaattgtgggagctccacctagaaaaggcgaaggatctccggcaacaacgcgctgcacggaaaccggagccccgcctcaaaaaacacggcgaacaccaccgttcggttgtcgacgggcttcggtacaacggctttccccggggcgaaagcctgtccttcgactagcgccccagagctgaccaacttcgccaattcaccgtcgtctatgagagagatccccaaataagcggtggagtcgtcgttgatccgttcaagatcgggccctttcgccgaagaggggttaggcttgcggggagccatgacgaagggtgtatacagtggcgaacagtgtgtgcagtggcgaacaaagggagcgaacgaaaggactgaagagccgaggagcgccgagagaagaacggaggaagagcgcgtgcgcagtgaaagtgactagtctggcagtaaaaagagaatgggagggggaatatataactcacctgagcgacggttcgcctacccaccagtaataaagcgccacgtgtcgcgagggtaggcgaaacggtaaattaccatcgaccgagctacacagtaaaaagcccgcaaagggaaggcccattactgttcctttctgcccaggaaaaataaaaaatatatatgccaccctccgaaggaggcgaagagcagcaaaataatatcagccgcacagataacaaactttatttgtaggaacaatgtaggtttcggcaggagcatcggtcgaaagggggcgccacataccataccacatggtttgcacggtctcggccgaagctccgatctcacccttgcccgtgaggggcttgttggcagtgtggcatgaagcccttcgaccaaatctaccaaaaccatgcgaacagtggagattcgagcccgagacatcgacgttagacagggcgaagttcccccatggcgaagactatggaacaggaacggcgaggggcgagagatcgtgcgagtaccttgtcaagccagaggcctcttgggcgaagggtgcaaggcgaagagtatataccggaggaagatgacttcgccacagcaagttcgcccccgcgagtgccgaagaagcctttccgacccatcaagcccagggaccgtaaggccggcgatcgcccgacggcccaccaggggccatgagtccctattacattatgcacccatgtaaatgtcccttttataagggcaaccatgtaaattcccctgtataaccaaaaccctagtggtaagaacctgtaatgggggctataaatagtcccatagggggatccaagtaaaaatttctcaaattaatacactttattttccaaccactgttgagtaaccacgtctttcgacgtatgcggttgttgtttcgacaacacaagtgtagactaaaatgactatatactagaaaaacataaatgattcttttcttattctttctccacttagtttagattattattttaatgagagtagtttggttagtttcttctgtgtgtcagcctaccctatattcgaattgattaacccctgtattagactttgatctatacaagtgatataaattattagcatagtactcgcttatcatatcttcccttgagattaaataaatacgatactttgaaatacttccgggtgaaatgctacagtgatatatccgtgtgcttgcggattatatatgtaatcgttaagacataccaacaattataatattccattgaattaaagatccattggagagagatttggtctatgagagctattttataaaaaagaaatgtagtttgatacattaaaatgaagacacaatgggtaaagcgagtgtagcacaactagttatttttcttgtggtggaaccagtccacccgggtaagtactagatttgacgttggcgctcgtatttacggctaattattcttttactaataggcgatgaacccatcaacaacaaggtgctcgtggtgacttcgtctatctcaagatatgtcggtacagtcttccagaagtgatcataggcatagggtgtgctgtgtgcgttcataggtgagtgtaagcgcgttgtaagtgcctgagtttgtaatgtgtttcttaaaaaaaaatgaagacacaatggagtttgcgctcggcgctcctactctgactcaggctcccaatttcaaatcttcccactgcaagctgttgaagttcacctcagaggagggtagttcggcattcttcctatggagaagcgactgctctttcctcagttcctcacagcttggcatcatcgtcgcacaagactcctcgcggcgaggaaaggcgaacagatcttggctgaagagcaaaggcgaccggatcaggaacaccgacgtcgccttctccatcacacattggccttcctcttccccatctctgccttgccagccgtggagaaggatcaggggagggaggagagatgccgatggcggcgacgaccaatggccccacggtgacgccatcgtcagcatggaggaggccggtgatggtgcaaggtagagggagacacggacgtcctagtcaaatgagtgccgatcgaagagggaggaggcggtgacgacccagggaacacagggaagtcgtaaagaacatgcacaaacttctctcgcttttccacttctgatttttttgtgctctttttcttcttttttcgtagggcgctctctctctctctctaaacacctttctgtatttcttttttttttcctagttttagtttttttttcttcaacataaactgaccaaggacccaaacaaaatattacaagctggacttcagaattaaaatataaaagttacacaagctcaaatataaaagtgcaaaccaaaaaattagtggattacaaaatagttttgctaaaatactgtcaccacatttttggcttgcttatagtcgatttctagatcatttgatctcctctaagattcgtgctgtggaaaattatgggatataaaccaaacaatgatgcaagacgttagcagctataaaaatatggtgacaaatttttaggtaaaaatacatcaaatgtaattagtagtacaaatttacacagctattacattgcacttacacaccacttacaaatataatatataattagtatgtaattttgggacttacatatgtaattgtaggatttacatatgtaattttgagacttatacattataaatacactaaaattatatatgtaattaaaggacttacaatgtaaatacatcccaactattttttggtgaaaaatatggtgccataaatataactccctagaatcgctatatttgtggcgacatatttcttccctcatcccagttagatttctaatcgttggattggctttgcggtttatgctgacctagaccggaacccatctcatcatgtcccttgtcacgttgacaggtaaattaaaatggggaggcccaaaatttttgaacaatagcatttctcaacttaaaataacagtacgtgaaactaaaatgatatatataattttaaaactcatattgtaaatatactaaaattacgtatgtaatttataaattacaatgtaaatatatgctaactattttttcatgaaaaatatgtcagcataaatataggtagtcacttacaaaaatgaaaatccctcgtcgcatatgttccttttttgcattcagaactcgattccaaaatcgaaatattttaggtcacggtatgagttggaaccggattcgggagtaagagtaaactcctgaacgtggaaagggggatcaattaacttgggtcttgacgtgagtgggattgtggactcggtctcatatggaaaccggcatgccaagatggatctgagaggttgacatgctttggaaacatcgcaccaaaacatctccagtaggttcaatctgttagttcttgccgaaccaaactgatccagtcgttttttcatatcctcttcaaattctactgaattcaaaatcagcctatcaattcaagctggctctaatcgctttggttttagtcacattctgaaacctaccatgcacgctcacacatgcatgtgctccagttacatcgtaattgtagttacatgacaaatatgtactccagttatattagttacatcgtaattatatacatttaatttgacaatttgaccttttcaaaaactaatttcgcaaatgaaccgcggccaaaacttagttcaaaagtaacccttttgttcagcgccaaatcttatggcgctgaaaagggttacttttgaaataagttttggtcgcggttcatttgtaaaattagttttcgaatgggtcaaattgtcaaattaaatgtaattatatatgcagatcctgtgtatgaatgaattgagtggataattgcacatgacatgatgcatgcataatgccaaaacttgggagactcgacctgataaagtctcgcaaactagtcccgattaaaaggcattatacatgacaacaaccgcccgaccagccgcatagtgttgtttctatttcaaatttatcatcatatatgtttattgtttaattatgcaccaaggccaatgatactttaaatcacatcaatcaaaacaccatgcgtatatttcccacgatacatgcatcgattaaaatatcatgacaattacatcattagcatgcacacgttctcctttgatatattaattatatttcgatgaaatccgtgtccatacggttatataaggatcaatttaagaaattttggattttattatattacgatcaatttggaaaaagggagtatcgatggaacagcacgcggatatacatgcaccaggacggatcaagaccttagctggatataaactgcgacaatgatagcgcaacaaccatccataattaagcggtcaactggacagataagagcaggtacaatagtaggctataagccagctataaacatattttaaagagataaaagaagagagagaaaagcagcgggctacagatcatgtagctagctgcagcacgggctccaagacgtaatgtatgtatgacaggtgggaccagttatttatagtatagcaagtaactattgtatgaattagctattacatttgttatagataatttgaagctggtagtgggctatactattaaacttgctccaacgaaaataaccaaggcgttctgagcaatttacttggcagcttgacctttggtttcttgggcgtgctggagttggagagcgcgcgcgtggtgataagcacaagtacacgataaatgagatccggaaaggaaattaacccaaacttccacctatgtggagattatgggtaccacatacccacatgacgattgacgagtatatccgactggttataggggataatttatacagatagaatatatttaggaaaagactcgggaattatgttaacttgtatatcaaggaaatatctcgtagtcttaattggttgcaattgtaatatatttgttagcctagttcgtaatgcatatgggctgcacattgtaatctcggctcatccccttatataaggaggggttggagtgctcctaggggcgtaacttttctcccggatcatcatatcaataatatactcggcaaaataattccccggacaggagtagagtattatatcttctaacacatccacttttttagcttgattgctatcccttttagtgttgccgaaattttgtttcgacaatctacatcataaattctctattcccggtgtagttccatccgtaggatgctttccatcattttcagtttcgcaaaatacagtctaaaaagaagagaaatttatttctagagctgtgctataaatttaataattagttcatcctctcaactaccaaccctataaattcccctccccaactcccgcgttcgccggtggctccggcccatgttcttttttttttttttagaattacacagtacaacgcagacactcacaacgcacgcgcactcacccctacaaacacacgcacgcaaaccctacccctatgagcatcttcgaagactgtgccggcaaatcctgtagagattgacgaagtcaccacaggcgactcgctgtcgacgggtacgtcgcctaccacaataaagcctactctagggaacggcaatgtatgtcctcggtagtcagtagctaggacggcatcaatgcagctcaatctcatgcagaaacattctagcagaaacattctagccgagtttagttccaaactttttcttcaaactttcaacttttccatcatattaaaactttcctacatacacaaacttttaacttttccgtcacatcgttccaatttcaaccaaactttcaattttgacgtgaactaaacacaccctctcatattcttttttgaagtagaagcacacgaactgctgtgaacatgatgctatgtttgaaacctcatattcttttccgcacacgaaaataagaaattccattagcatataattaattaaatatttacggttgtaaatttcaaaaataggtttatttgatttttaaaaggacttctatataaaatactttgcaaataatgtatcgtttaatagttaaagtgtgctagtgctaaacgagggagttgtaaaagataaatgagctttcaaatgcagccaattccgaatccacttaggtgtactccctctatttcatattgtagtgtgttttattgttgtttcaaaagcaaaataccttttcatcaagtttgtggaaaaatacatcaagataacgtcaagagtaaaaatacatggctggtggttgaagttgtattgtagtgtcacttatatccctatattgtaaaaatgcatatttagctccatgacctaacacagtaggtccaaacctcttttgaccatgtacaattgtcaacgtggtgttccatgctagcacatatttttgcaatcagccctctcagagggaggacaggttgcacaagagggcgagcaatgaacaccagcggtgaagccaatggaggaagatatacattggggtgaaacagatagaggtgtgcacaaaagaggaaccagtgcagtgatgaagacctcgagctctgccatcagcgaatcccatgacaccaaactacattgccgcttgatctagagggaaggagatcgaggggacaactaacatcgatgtggatccatggtgcctgaccgccggccctgccgacgagcttcaacagtgtgggatgaacatgaagtcgcctctgcatcgcacaagccgtcgacgggtccaccatgcctgagcaccagccacactagacatggtgctagcgaccatcggcgttgcctctgcgctgtcggacaggtggaggtgtgcactggtggctacatcaggaggggggaggagagaagggggcgatatacgtgaagaggaggaggttcacaccaccactacgctgccccacccatccctggcctccaagctctgcactagccaccctatgcatcggtggtgatggaacctccattaccttgctcatccgccgcacctgaccaccaccggcatcgctaagagtggacatggctggatccacacttgtgttcactgtctagcgtctactctcttgtgcaacccatcctattgttggggggaggggggtaaatgcaaaatgtgtgccagtggagcgccacatcagtagtgcagtcatacatggtcaaacgaggtttgggcctattgtgatacatcaaaccaaaattatgaatctaattatgtattttacacgatgtgggacctaggtgataccaccgtgtaactataagaaccgaccatgcatttcactccaacatcaaactagtttaattaaaatccaccataaaataagtcttgacagtgcatttatttagtattgtagatgtgaactatttttctataaattttctataaattgctagttgagattgtagtttgaactaagataaaaaaggagtaaattgcagtttgggtcatgtattttttacccttgttgcagcttggacaggatcttagtcatgattttcactttggactacataaccttgccatttgtttcactcttcaccacaccctcatcgtctccaagtcaggcagcccatcaccgttgcccctctctttgctgctattatcatctctcctaacatgttctcgttatgctatcaatgatcattagtatgctaatgaccaaattaaactaatcgtatcacctcacctagcatgctaattttagctatcaatacaagggaggacatggtagtgctcaaactcaagctcacgtatagtggcttcagctcaacgagctcaacgaggaagagaagagaagggagattgaggaaacactggtccaatctgaaacttgtgtgaagttgtctagtgcaaagtgcaaatattactttgcccctagtccaatgtgtaactctggtaataagaggtagcccaatgtgtaattcactcagaaaggagtaaatgagaagtagtaccctatgaattctgtgaatggtaggtagtactctataaattcttatatttgtggataaattttaatatctttacctggaacggacttgttgctgcttccatacagtcactagtttctgaaccgttgaataggcaaaagatttttaggacgacgattgctacagtgttagtgaaacaaacgttagttttaggagcatttttgcctcaagcatgtcgttgtagtatagtggtgagtattcccgcctgtcacgcgggtgacccgggttcgatccccggcaacggcgtttctttttcggcctttttaagtgtgttttcagcccatactgatttatggcccatgtatatacaatctaaaggtataattgcacttcaataagattacttgggtcccttaatttgttatcgagtctgagattcgtcggtacagctcatctcacaactcaaaataacatcttgaaccaaatataatataatggtcagttttggttgacacaagtgggacctactgagtctcggactcagtaacaaattgaggaacctaaagcgaacttataatattgcactttaacttactagtccaatctggtttgtatccatcaactgcaataccggatatcttgactcccaactattaggatatcttgactcccaactattaaaactggtgtaaaatgactctctcagtgaatataggcagcgtggtcggtaagcttctatcatcgatgcttcgccgttgccttctctccacttcccatgacatggcggtgggcgaggttgctgtgggcgacaagctccgagtctccttgaccctcttcttctcacaccttggcaacggccgaagaggctgcaggtagtgatctctatccatctcaaagtagggggtggtggcgagcagcgagtaacaacgaccggtgtaggcgatgacgagcgataaccataatcctacccaggcgatgagaggatagagtagagaagatgagtgattgaaatgtggtccccatacgttgacttagctagttggattgatcaacgaaccacgctaacgaaaatcacaccctcaaaactaacgagaaagtaattctacaccaattttaatagtttagattcatattatggttgagggatatatttgacctatacttgagggagttaaaatggacttatttctaatctaaacgaacaaatattgtgatccaacgcgattaagctaactaggggattgaaactaggccatgttacatatctattaccctaatacaacaaggcacaacatcgtcaattttgtgagcaactctaatggcttcggcttcgatgtattatgcatgtccggcttcggcttcaatatattgtgtatgtcttttttttttaacgcctacacggtagacatccaacatattcccaaaaaccaaacgcccctctagcacttctagcactctctctctctctctctctcaatgttgcatgcatgcacaccacttatttttttcaaactataaatgattttatctaataaattgtttatccaatctacggttaaatcattatatttgttacaattaaatgtttgcaataagatcccatgtggttatattttgacaaaaaaaaatcaaacgttgtttcaccgtttataaaagaattatttcatcatttgatcaaattagtttcaaagagctgcaccacagaaaatactgattacaactagtcccaactagtgaaacacaaaatatattcacaataataagtaattttgctaaaacatttttagacagtatgagacctattaaaacatagcatgcaccatttataaatgaaatagtgaaacattaagaaaatataacatctaaataaaactgtatatgtttaaaaaataatttggatacaattaagtaaaatcttgttgtaaagatttaattataacaaatacatcagtatgattatattgttaattggataagtaaaatagaagaaaaaaaaattgaagtttaaaaacgaagttgctcgttataagcatatacatcgtataggagcatctgaacacataggagcatccaagcaggcagcaggagatgagaaaaaaagaagggagaacgaaaaagaagggagtaaacatctacgggcatggagtggagacgcctgattttttttcttttctttttcatttattttacttgcctaacattttattctttccacggattcatcagtgctttagaggctgtttagatgggactatgtctaataaaaccaattccataaatatggactaatttgtgagacgaatttattgagcataattaatccatgattagcctatgtgatgctgaaataaacatgtactaattatgtattaattagggttaaaaaattatcacgctaattacctctcatttatgtaattagttttgtaagtactctatgtttaatactccaatttaatgtccaaacatccgatgtgatagagactaaagtttaatccgtgaatccaaaacaccaccttagttgggtattatgtgagtacgtttctaataagcactacgtatttgtaactattttagcattggagatgtgtactttcctttttcccagcgtcgacctagcaacgaaaatcatgcccacaaccagttgtattttacggggcaagcaaaactatgttccttttttttcaaaatataaccgttctatgcccttcttttccagcgaaatctgcggttaatagtcaagtcatggtccaaaacgcctttgagggacttttggtacaaatcaagctgcaaaatgtgtctagaacagatagtgccgtattacagaaatgaattgtccgatgacaaaacgcacagatgcaaaatacagtggatttgaaagagaaataactggtgtcgttcaagtttgcacattcaacaagaggtagaaaaggaaaatgaaaacgggcaatagagaactgaaatgccaaactagaatgcggaattttaatctagaaagatctacagatgttaaaatatatacactcagtttgagaacatacaagggagccgtaacaactatgagaaccaagtggagctcgggtgtgtgagagtacaatcagaaaagaaaaggatgtgcagcaaaagattatttactctatatcatcacctctttgctattggttataattggcctgagtattgtgttcccattgacaacctttgtggtcgcaacaaggaagtcatagcccatcccttcctgcgagtagatagaagtcacaaaaataaggaacttccatttttccctgatcaggagctctatttcattattcatgaggggcattaaacttccatagacaaccgaaaagaaaatcaagagccttattacgtcagatactacattgttcatcattagcagcttgattaccctccatatgtgcatactctaataaaagatcaattaacctaccgcgaagctcctgaatgacaatgaatgctgaaatatcttacgcacgatgccggtgtactaaataaagcataagcgagtagtaattcctccacataagggccgccgccagggtgtgggaagcaacctaacagacaatactcgtagccttgcagactggttcagttagtgagtaatttaggcttataaaaagccacaatgcgaatcaaggatatatttaacctataattactaattgttactatttgaaggagcgtaccaaaaagatattcccaggaacacaagtagaacagatgttaatgtgaatttcaaaatatcccaacttgacaatatcttggtgtcgaactgtcgatttgaggagaacatctaaaacacataaattattttggcaaaggatacctgagaactaaggaatcgaagagcagcaatctctgcaaaagtaaccccaccaataaagacaaccaaaaccagagaacgatgtccaaccctagaacaaacacacgttagaataaaaacagatgaagagaagaaacatgctacgaagtattaggaatttgacaagaacagtattttccatgtaaatgcaaaaacaaaaccaaaattcaacaatgtagtatctgacgttataaggctcatgaatttcttttcgattgtctatggaagttccaaaacaattgtgtactattctaacatgttaattcttaaggttctagaggtctaacagacctttgaggaccatgtatggagaacaatatggggatgacttgtagctaggagtgaaagtccaaccaagattagatatagctggttttcagcgaaatctattttagtggagcagatgatgtcaaattgatgatgacccaaggcgatagaagagctatggatcaatatagataacctccttattctgaatttctgatgggctctggagtacttgctggtaggcaacacagtatcaagtgatgaaataaagtcaagatgatccattaactactctagtctagagtttgaattgacaataacacaaacaatgaagcttagatctcagaccctgtttctggtttgctctcataagtttgtatcagatctctcataaatccctcatcaccactgagagcaaataatcttaaatagaagaaaccagcaagaaaatgattacacagatagcctgacattcagcataaattatacaaatacaaaagaaacatgaaggagatctcgtgcacaaagttaccatgcccatcagcatcaactggagccctaaacaggacactgaaggattgattttggctgtggctggcagtgagcactagataacacagagagaaagagtgggagcagcagcttttgtatgtgtaattatgcaggcagaacagaggatcagggaaggcagtagcaatgggcaagatagcacctaacaaacataataggctgtttcaaaaaaaataataataataataggccctattgggttaaaatttactaaatcaatcgctgggtagtcctcacaattgtacattcatgaggtctagggaaattgggaaacacaaatacttaactcacgtcacccaactcatctcaacatggcaagtagctgagctgcataaactagaaacttataactactaaacaacaaaagaatttcatgaatagaatacagaatttaaatctgaaaccaccttttttgtgtaaactttaaataaaccaacacaattctcttctaccacttctatcatttttggaaatcagaaaaacaattccatgtaactaaacgaaaatttacctgtcaatactctgttgaagccccaaaccttggtgtacatccaatgaagaattaatggccgaactaccctacagaaataaaagaaattctttttaaaaaaaattctacaaaagtaagcttttcataaagacaatatgcactcactcttttcaaatccagatgaggacctggcaatagtttcaacagttcttcaatagatcgcctgcatggcaacaagaaaaaaaaggtcactcaagcaaatcacttgcttaacacaactagacaacttacatactagttatgtgaggaagttcaaaagcaggctaatcaatatgcagcaatacattttgctcaggtgttgtggtaagagaagtaaacaataaggtctgtaaaaaatgcagtccataagggaaaggcaagaaagaagaaaattacaagccgatttcctagaaaatgggagaggtgaaatcttatgcaagagaaaagaacaattatttcccactaaaagttgaatttttttttcctctaacgttttaggatagaagcatatatgtaatagtgactatattactcccagacagagtaggagttttttcccttttattctctttgattttacctgaaattatgtttccaggacaacaaattcccagaaaaagatagcttctatgaaattgaacacatttctcattgtgtgaatctatgtttggccatgaactcttctctaagtccatttttcacactgaacatccaaatcattccatcctatttttgttgatacagtcatatggcagtggttttagttagtgcagagtcctttcatgcatgctttattgaaatggataccacttagttgggtccacatcaaagaaactcaatagaaggtcatgacaacgaaaaccaccaccatatcaacataaaccatggaataaggtttcatgtgttattttgactggatttcaaagttgagattgaagaataactggcttattagttaaggatgcgaattggaatccaagaagatttcaagagcccaagtcaccgtttttcatttctctacatggaactgttgaagacacaagaaaaaagctttctcaatgaaaaaggaagattaggacaataaacttaccatccagatctcacagcatgctgaacaaggcgaatactgagaggggcgtatccagaaaatatgtatgatatatcactagggctgagaacggaaacaagaacatgtaagtagtagttgttatcgtgaccaagataacaattataaatgacaagaaaattagtcactaaagattgcccagcaagcagtaggaatgattatactatatgtcagataataatatcaaagaatgacacagcaagaggcaatgcagagctttctgaataatctaagccaaacactctagttgctttctgtaacagaatgatcctatttttccagttgtgagttatctacaattcttattagttccagctcatactgccttatgcaacatattaaacaacatacccccagtttcagtatttgtagtgttcccactgcccccaatttggagcatatttattttgaagccaaaatttgcactaccaaaatttttgcattttaaatagaactttgggaatgcttcgctgtctaccaaaatttgtcaaccacacacacatgtggccaaaaaaatattggtaatacaaaaacttgcttaggttttgtcattaccaatattttggtagggtagcaaacgaaacaacattggttaccctgctgtaatagttgttttataatgtaaccaagacactagaaactaggaaagatgattggcaatgatctgtttgttttttataaatgcgtcaacaaaaatttcagacaccaagcaacaagcatgcatatctgtactcctttaaaaagaccgcaatagtggtggcagtgaatctgccaccccacctactcccattgcaatttttacatattaccccatgaacttcttaaatacataactaaatcgaaatggacagccacatataaaattaatgtggatagccacattttaggaaaatgtgggtaacatatttcatggaaaatatgatttatttattttagaaatattgtgatattttccttttatccgtagcaaagcaagggcatttatctagtgtgaaaccaaatagtaacagcattagcaaatggaacaaaaatgaatgcgtaggaaatgtaaagtttccagaagctaatactttgcagtatcatttacatcaactataagctgtagagcccttgtaataccaatccagttacttcttgattcctgcatagtagaacagcatactgtagaaagttagatgagaacaccatttaagggtctggaaaggactaaaacaagaaatctcgttgtagagacaatctgactaacctggcgcttaaataggccagccttttccagattgtataacaagggcatgtgctcaaagccataactgtgcagtatttcccgcctggccagggtcacaaaaacagatagaagacaatgttgaggacttattgtaagattgatgttgctggcatggcacaattaaattccaagagacgtgtacatgtcctaaatcacatatacccaaatagcatttatagcagtcaatcaataacttgatatacacagaattagtggttctagtaagtgaacataaaaaagcagtaaaccttcttcttttttgcgtgcgtaaaatatgccatattttacctaatgacgccaaacatgttatttctccctgtgtcccataaaaaaaccaacttctggctacaaactgagcatagcctatgtccagattcatagctagaagtagttttgttatgggacagaggtagtacttcctataaagcataccatgatttcctgtagatcccaatgactactagagctgaataaaatagtatcttagaaccctcgacccagtaattgcaagagatgtttatgcacgcatgcttccagcagcagtatcgcacttgtgcagaaaaattaaccaagacagtgcttagcaaaacaagataattcagttttcaacaccctacttatgatagccctgttcatatgggcaattgtacttcatattatactagttaaatgcacgtattaacaaaaaattcttacacaatgaatttgattggtacatcaaacatgtctttgcctctgtttaacatgtaagtacatataaatgcatgataatttggccaccttcgaatctttcacattgaattaaaattctgttctaagggaatattagaagaaaaaaaggatagcctattgtgtaatattgaagaacaccaggggacaaaaaagctgtgtagataggtgggtgacagtttgagagagatgtattcatcgatactgtacagattttgcatacaaaattgttttaaaatatctatgtcttaaaaggatatggatactagtgccagcaaaacctctacctttcacataggaaagaatgcatcatactactcaattcaatattacaataggttaactcaaacaatagcctatgattattatcttattctacatgattttctcacatgaaaaaaattcaattttcattaggcacaggacaaaatttcaacatttctaaagggcctttcacaacctctacgctttcacataggaaataatgcatcatactactcaattcaatattataatagattaactcaaacaatagcctatgattattatcttattatacataattttctcacatcaaaacaattcaatttgcattaggcacaggacaaaatttcaacatttctaaagggcctttcaaaagtaaccaaatcatgttacgacttacaaacactggcacataatgaagttaaatatatgatacattaaacaattgctccatgtgctcaagttttcttggattgtaaaataaataaataaataaatcattttggtcattaggagtagtattatggaaagaaatcataaatatagccctgttatgttataacttaataagattgcacacattagcttgtcaattgtccacatcagacatcaaaaacaacatattattgccaatagttagctacatggttaagtaggtaatgctgggtgaatccaccagttgctgtggtgataatgctcaggtggttttctaatagttaagattgctagaagacacagctatagatcggatagctacaaaaatatatgttcaaggctaaacgattggccaacacatttaggctgtgttcggcacccccttttcccaacccctctccctcgttttccacgcgcatgtttttcaaactgctaaacggtgcgtcttttgtaaaaagtttctatacgaaagttgtttaaaaaaatcaaattagtccatttttgaaaaaaaaatagctaatacttcattaatcacgcgctaatggatcgctctgttttccatgcgtactgttccggttggtaacaaggaatggcgaacacagccttaattgtcagcataaggctactatatcctcctagatgcaaaaatatgaactgataatggtcataaaatttaatacaaacaaaagcaatacacaaaaagtaacataaacatacctcaagtagtcaaaattcttctttggcaacccagcatttgtaagtgaaagtaacactagaaggcgaagaacattttcaataggctcctgcttatgtatcatctcttcaatgtattcaaaacatctggggatgagttagatattattgttacatgaattcaggggaaataaataaaaaaaatgatggcagttattttatctaaaatgacgtaaaagcaggactcagatctcataacaatccacagtttggctcaaaggaagactgttaacaagaaatttccgcgtgttaaagttgcaataagaacaatagctgagaagtacggaagattgttttggtctgcccaagctgacgtagacacaaaacaaaccttagtcacctttactatcaatttatgaaatctgaataacacgagcaggagagatggattccagaagaattcagagctcaatatatctcttgacaaagaatggtttgcattttgatggtcaattgtggcagtgagccaacccaaactgactggctggagaaaaatgggggggagggggggtagatctagggactagggagaagtaaaatataaatgaatgagctaatttacagggttgacagaaaatcttgatatgttgcccacgtcacaagaattgcattataaagtaaataaacatgaactacagagtagtagaaagataaactcacatttcaaagttttgcacctccaatattgtttgttcaatgtctaatcgggcatgaaaggaaggttttccagtaaatgattgcaagtgttgtgccaaatgaacatgcctctgcatcaatgcagggtgttagttaatttacacaaaacaagtgaccaactgacagcacttaattaactcacagctatctctggcagtgaatgtaacctcttcacaaagtccttcagctccgaaaccgattgagtctgttttcaaacaataaaattatttacataagttcctgattcacagattattctaacaaaaaagatagctgcctgatcgaatggacaggagagaattaaacaaactggaaaaaaaaatgcagataacaaaaaattcgctatagtacttcagaagaaaatgtatttttgtgaaaagggcaaaccgatgattttatctcaatatttatgtgcattttacccaaattgcctcagcaaacaccacctataacttcacatatagtagtcatattttgaccaacagaattacctactcttatgttaagcgcaccaacagatatgccccctaaattgacaaatcaaataattgacttttgattcagtatgtagtatatttccttcccttgtaaatgttaaactatagacattcagtaaaactattttcaaacatgctgcataaaaaggacaaaataatttaatcatgaattctaattttcaaaatcaatttacaaactgatatttgtatgagtttgacagtaaaatagcagaaaaagttgttccctcttagtagtatatgactgcactactaagagggccaataaatactaaagaataaacagaattatctatatcttacattggtggattttacttcggcgtaatcttgctgaatagatgttgccttttggcgcaagacctgcagcacagtttgcaatattactaaatgatggctgctacagaagattcaaattattagtaagctataatgatattggatgataaacagaaccaagaacagattagtataaaaactcctttacaaaagataaagaaaaaaacagaaggcaagcttagctaacctgaactacaacttcaaaattgagatctcgaatttccttgtacaacttatcactgaaaaggacagagtattaacacatatgtataaatccatattagcataaagaaactgatagttaagagtgaagaccatactgtaaaatgtgagttaaataaaaatgtacagaatttgagaaggaaaatagattcaaatatgctttcaagaaaaaaaaaaagagcatctgctgggctgcacagtgcatacactaccactacccaccgttctacactaccactaaggatattgcttccttagtggattccagtgacaagaaaaataactcagagttaccaagattctccagcgcctataaaatgtataaaaagttgctgcgcactgtgattggtacaaagactttaacttgttattatggtacaagtaatcatgaagacattcaaattttcaaaagattgactatacaaagtcaatgaaactaggacaccatttatttttcattagaggatagtcataaacaattatcacatgcatttgacatggtttctgagatataacttcaccaaccgacttttatcaaaatgaatttataagaatgtttatcaaagtggcaaggcaatgtaaggcatcagtccagcagatagcaggtatttgaagtaaaatacagtcactacattatcagaaatcacacaaaaataggaatgaggggttagttacaaataagtgaatactagtaggtagataagtgccacaaaatagttgtatgggggaatcaaactaactagtgatacactgataccctgcgcgttgcagcagggaatttagaaatacttccaaaaaaactcaatgaaaacaatatgtaaattgtgtactcgtaatatctaaatggacaatatctgttctatagtagttgatgtgaaagtgcatttctatatgacacttgacgcattgttaagtatcaaacattagagggatccgatgtttattagttttctaggtgtcatggttcaatgcatattgacctttatagcaataactacacttagtgggttgtaaatccatatgacaaatggatggttgagatcaaagcatgagagggatccaaaggctattattttctagatgattggctcgatgcatgtcaagtttttggttccaactatataggatatatagattacggagttccggatgtgtataagaaaactttgacaaatttcaggacatgtgttctaggagaacactcactttagcctagagggagtagaagaaactatgcaattattttcaaaaacaaaatataaaactcctgcatctaaagaataagttccctaagggacgacattaatagtagtgaagcaggaagtttcaaaatatatgcaaagcattgaaagatcaatttcttgcaggaaaatggcacgcagcgacacaacacaatggtaatgttatttcccatcctgggacgttttatacctacccaccacttgaaaagcaagagatgtaagcctgatcagaacaaaagggaatggtcaacaatgtgaagttttttctctggtccttggggagcattgaggtatatatacctcacagtattgatcaggaaactcctactcacactaaatacctataccaccagagaaaaactcaggagcagatggaaaggtgaatttccaatcctacccccacttgtgggatcagttttagcacctccctttctgaagaggtaccttccaagtagtgggaggcagaatacctcccaaagatgggagaaagagaaaccttaaaaagtttacacatatttacagactggaaatatgcatgcatatactaagaacacttgccttgaattcagtggaactttaacttttttaccatcttgttgggctcccataatagtggcatcaacctccacagatccattgtttatttgcaacatctgcagaataatgatcaaatagttcatgtgaatcgattgtaaaatttaaaccatgggaatgcagcattggaatagcagacattctattaaattggattgcattttatttagggcatatcacacacctaacagtaacatccatgcagacacaatatggaattgggtcgtgcactcctatctaatgatatgactgtacttgttgagagataattataacatactcacatataaacccaataggtggggaggagaataaatcaaaattcttaagacttatactggcatttcacatttcctatttgggacaacaaagaaaatcatagctcatggagtatgaaacattctgcatacaacagaaaggacattttaactttgttttttttattatttttgtaactttatttacagaaaaaaaagcagagggtgagggggtaacctagtgcacaatggtataatataagataattcatacccaagaatagagtttgctcactactaccacaaagggaattataattaaatgttagaatgtgatagacatgctaaattgtaaatttgtacagtgagaaccataatggcatgtagtcatccaatataaaaaggctaaaaaccaaatactaatgagttgccggccagaatggaaatttggcaatatttagtctacctcatctaataaaccttcatatgtcaactgagagcacatcggtgtcactaaatccacctgcatagaaaaaaatagatacattacaaatgtgtaacaaatcaaaggggttatcttccctaagtgtaatgtaatgagttgatatttggaaacatagagaaccatagatgcaaaggctcatataaatgccaaaaagaacaagaaatcaaaatagagtgtgacagtagttttcagagctgaaagtaccatataaaatgaaaaatatattttacctctctgtctaacaaaataacagtgtttatctccggagtccccatctaaatcaccaaaaagaaataaatgatcagcgaaactgaaagatctgagtcaaaaaagcttatcagtcggcattacatcatccatgttgacaggatcttcctgttgcatactattcagcaactctgcggctttggtggatgcaacacccttggcccgaacattgggaattactccaaaggcaaactggggaaagaaaggaatttgcataagtgcagtactataatatttctatagtgtatagatatttacgtgtgacggaattaaaagatgataaggttgcagatttgtagcactgaaaagtactctttaaactacagtatggtatagatgataaaaatttagtctgtccatagaatgcttctgctataaacaaatataattgaacttttgtagtacaccctctggtcttttgcatttgtcatcctagagtatgggccacaaattatgtgaatcttttaccacaagaaagttaggtattcacatgaaaacggtacagctagatttttcattataatactttgatatgattatgctttttgatgggaaatttgatatgattatgttactagaaaaggtgatggtgatggtcaaacactagttgttacgacagcacgaggggtcgcctagtcaactctaggacagcgcatcagccagaggcagaaaacagagatcaatgccgagatgaccaggattagaaaagtgtacagccctccagtgtctgacaagcttttcaccatcaccagcttcaccagattcctgtttatttcttacctctttgcttctagtgcgagtttaggatcagtgatgtgaggaggaagatgtgaaatgcagaacaggagagaaaactgagaatcttatgtttactgagaaataagagcatcctagtagggaggttagaactgggaagggataagttaagaaatcgtgaaggagggaggtagcgcaggtggacattgtgcagcttaagtggtcactcctgtacaaacatgtattgcatacatataatcttgcataggtgccttggaggcctggcacccagacttgctacgacttgcgagagtaccattacaaccttagtaaaaacaagtaaaaagaatggaaaaggtaaatgccaaaatacatgaaaggaagacacatacctctaacttatggatagcttttgcaacatgccaaacagaactagtatccccttcaataaggcattcctgaaaatcatgctccagtaagatttatatcaatattatgaatatactacctccgtcccaaaatataacaacttttagctatgaatctggacacatagttctctagattcatagcaaaaaatgcttatattttgggacggagggaatatgcactagtatggattagtacctgcagagaatgatcaagttcaaaacatatcacatcttcatccaatggaactagatacaaggggtactctccgagtgtcaatttctgatgaactttttcctcctccagaatctgcagtgcagaataaaatacagatcacaattcttcttgtcatagttcaactttggagatgcctcactgacattcatctttatgtttagtcgtaaaaggaggaattcaggtacaacaaatctcactccaaaggatgatctgtggttgcatatacatacataggtgtcttttgatggcttttttaaaaaaaaaaaaaagaattttattccttgcaaatgcacatctgtaggtggctaattttctcatgttgtcacgtacataaagtttgaggtaattattattttttttattttgtatatttttatgatcagtagcaaaatgtggaccactaagtaacatacaaataggaatttatgaagggcatttgacgaagtcttacagctataattcaagggttcaaagaggatgtgattactcataaagtactgttgcaatagctaagcctgtatagaagaaccaagcatcaagataggtcagcaagaaaaacacactacaatcaggctctagtcgctctactgataacaaaacaattaagttctccataacggcacgacacggcaactgatattgatccctaattcattcctccaactgtcagaataaggaaaacagcttcgctaattttggcacatgagcatgaacattgcgtatggcctgtttgccagtagattaatctactctgcgtactggtggatctcaggtgagctgattttaccgcattccattcaaaaactaatacatatgatcatttttgtagggagttttgtacccatcaatcaaatcagaaattttatgacaatataattgaagcaataataaaacatttctagagtatttggctattcgcactttaactacatatattttgtagattaggcaaaaactagtaaaagcattcttggatcctcaattgtcttgtcacatatttttctttattaataccaatatctgatatgtggcgttaagtcccaggaaatactaataaaagaagactgaattcctgaaaagggcttttataaatactgtgcatatggctcatgcttcccaagttgaattactgaaaagggcttttctttctgttttccttttttgggaggtgagtgacaggaattactggaaggtgacatatcctagaaagggttgttcacgatatgaagaacatattagtagactatgaattatctgagacatgattcaacctacactaactacaacacataccagttttgggcaaaattgtatttacatgtaaataagcatataaacgaaggcatttacaaagatggtacatggactataagataattgtactaaaattggaaagcatcattgggatgaaaggatcttaaatagttgcattcaatgttctctgatcaggcgatcagccctgctctcctaggcaccgatcaggatgatcaggacgattaatcgagggtggtcgattagtatatagcaggagtgtccagctggccatatatgctatatattactctctccgtcccagaatatagcaacctaggatgggatgagacccatcctaggacaatgtatgtcatgaatatagcaacctaggatgggatgagacccatcctaggacaatgtatgtggacatgacatacattgtcctaggatgggacccatcctaggttgctatattctaggacggaggtagtatgtactcaataatatataatctgtagtatatggtaaaaagcaagcatcatctggtcaaagaagaagcatcatttgctgcccatcatctgcccaaaatggaacatgggctgggctggcaggcccaaaattatattttctcagggaggcagcccatgaacgaaaactgctcgttttccaccctgatcggacgattaattgcgactaatcatcgattaatcggacgatcagctctctgatcgtctgatcgacttacctgtgcctgatcggaggtaggggagcgatcaggacaattaatcgcgattaatcggatgaacaaataacaatggttatattgcaagccttctttatcttccaaaataggtcactatctaagcatacattatgcggtatggcctatacgactcattcaatcttaattatcctgatttaaggcctgtaaggtggactttctttctatatggtatctcagtaacatataagtaacaatacattatactacacaaatttacatgtatccatgttgggagcgatgattgcataagttgtcattcttactacaatcagactaagaataattgaattgtgtctgaggctagcaaattattctaatataattgaatcctaagccacagatagaacaatagaaccagcaaagtacgaaaacaatagtcaccttttcgcaggcaactgtgcgccgtggcacaaagtaaagaaagaattccctctgaagccctttaggctcatcgttcttaatctggcttgcaattaatttcatgaacttcagctcagagcgtacgagatataggatcttagcgcactcagtttggaggggttcagcagagagaagccgcaactctgcaccatattcctgacaagcacaaaaaaccatgcatgagctgtgtgcatgtccaaaaatctatatatgttaactgcaacagtcgcttaattgtccatacatgaaatgcagtgtaagcatactattgatacaatgctaaattttacagaagctactaagttattatttaagatgaaaacagttgactgttaacatatacatactgtatgatcagctcatcgcacctttagtagaccatatatgttaactgtgagagtagcttaattgtccatacatgaaatgcaatgtaagcatactattgatacaatgctaaatttcacagaagctgctaagtcatttaagatgaaaacaattgactgttaacatttccatactgtatgatcagctcatcgcacctttagcagtgaggtctgcagaatcagagacagggtacccgcgagcttgggatcaataactacacacttcttccccctaatctgatacacaggaaaagaatacaaacttttcagtttccaccgtcaataacacgagtatgaaaaattgaaaatgggatgttgagaaacgcacactcttgaggatgtttagcaggtccttctgcgactgctccctgcatgccaccagtcgaagcacatcaaacatacatgttgaaattcacagtcgaagcacatcaaacatacaggttaaaattcacaggaacaaacacaagggtaagcagatgagtggggatcatcacgagatacctgagggccgcgagattgagaggagcattgtcgagattggggatctgagccatagtcccccaatccaactcctcgttctcagattcagaatcctgcttacttcagagccgggccaaacctgcggcatgcggtttcagctaagggttaaggcgaagagaaaaggtgcggggtagagaggggatggaagagaggatgctgcgtacgggtgctcaccggcgacgaggatgcgggcggaagcagcaggtcggcggcgcccgctgctgcccccgggacggagatcggcgctgggcggcgccggcggggaacgagctggcgcggagagacgggggagtcgaggccgaggggaaggaaagggggagagagaacgagtctactagagaagagagaacgctgggctgtccagcgccgggtgctttctatagcccagtgcgtgatcacagtctgaatccattacaggccgaaataagtctatttggagtccctccttttccttctcatgattgaatgcgcctccccatctttgaaacccggtgtaaatcaactccttcaataatttgggaagcggtttctgctgacgtgataagttggctgtggttgactcactgattcaataggacccacatgtcagccaatcagcgaacatcatctctctctatatattcccctcctctcttttccatctcaccccgaggccggtagcacaaatcattctgaaaagaccacgagcaatcgatgttacatgcctcgccagtagtgacatggtcgtggatcccttggatgcgtgcggtaagcttgcagtgcacgtgtgcacagtctcacggtacaggacatcgtccatagttgccacctacgaccgggaagctttccgtaccggagcatgatgtcgtagagtagctttagatggtcaaggtcacatagacatagcgctagagctatcgtcgcggatggagtctgcactagagcttcgggcttgcgtgctcctcatgctgcagctttaccaggatgtggtggtaatgctccatgattacatccccaagttgtgcctagacgtgctccggcgacctcggcacagtatcctgtaccaaactcctctcacttgaccaccatcacttcgacacggctaaaccaggcaccactgcttctcgctcaatcagcctcatcaacatttcacaactcaagcgctgcattctcgccagcctatccaagaatgccaacacgaacacctaatgaaggtataatcttgaccattactatctagattcatttacattcattttattcttgatgtggaaatcaccaatgtgcttgcttgcttgcttcctcctcaggctgatcgaggacgccatggtgcttctccatacttttagggattgggtgccaagggacaccacaagcttaccgcgcaagccaaggggcctccacggccatgttgtagccagcgaggtgtgtaacatcgattacttgtggtctctttggcacaatttgtgccgctagcctcagggagagatagaaaagagagtagaaaggaataaaggagagtcactactgtaggatcgaatcacaacaactaagccaaccagaggggggtgaatggttggtatcatagtagaaaaacccggaccggtcatcgaaccgcttggacccttggttcatcggttcaccggttggaccgctgggtcaaccggtctaatgctgaaccggaaccatcatatattatgcataactcccttcaaacagggagctcatgttagcctagtggtgaggatcacattcttgctcctcgccagccagagttcaaacccccaaagtagcactttttctcatttttaggcaataaaacgaacatgggccgccggaagtgaagtgggccttggaaggccggcccatctcctagctgacctgccggtttagtatagcctggtcgccggttttaagcaaaaaatcgtccggttcaccgggtttataccggttcaattgcacgggcggtctttagagcaaaccgagccggtgagagtgctggttccggttttttccggttcaaccgccggtccggtccggttttttgtactatggttggtatacccattaccaaccattcaaattcgaatttttagcggaaataaaagttaccctcaaattcaacgaatcgcggtctgaccgaaggtgttgcgccggtctaaccgaaagtgttgcgccggtctgaccgcctaatgaacgtcggtctgaccgatgaagattgactggtcgaaccgctgagattgcatgccactccctgtcgccgtggccggtctgaccgccgtgtgcccgccggtctgaccgaccgccgaaacctggtgaaacaccaatcgaataactcttaaagtggatgacaactttattgattatctctgtgtttacaaagtgcaccaacagcactccttacaaaaaatttcgactaaactcgaaaccctaactcaactctcaactccattgctctcaaaagtgataccgggaagcctcacgcttcccctctatttatacccgaggtaggcagcctaaagtcctaaacaccttaggaaaccctctagtataagaaacaaactttacataactaatcataccaaatttggactctttccaaattcgactccgcattccatacgcacacaatacctccatcgtatgccatatggaatcttcaccaaccacgtgcatcaactctagcctaagtatctcgcatgatctctgaccaccacgaacgtcgtcttatccccaagccgactcccggtccatcaccgtaaatactctcccgaggtatcgagtcacctacacatgaaataaacaaagaaaccatattccgagaccaagctatctccaacttgactcattgttagtaaacaacagtattgcatacgcatagtatccatctagaagccataatcatgaaactatcacggatatccaaacaaaaaacccgaaaccgaaaccgacacagagtcggcccgtcagaccgcgggctgcgctagtctgaccgcgcgatatacgccggtctgaccggtcccaacagacagcagtacctgtagatcacctgtaaaatccaatcatctccaaaaccacttcgcaaataaatttcaaataacaaaaccaataatctcctatgataattgttcatcacagaataataatcaaaaacacctttgattttacaatctcccctttgatgaacacattggcaaacccataaaaaatattttggtgtttggaaaaataaaaacaaaagtggtaaaaagcacacttcgtacaaacgtacacatcgtgctcgaaaatccaaaagaaaatttctctcacttttgaaaagaaagaaattcccaatcgaatcaaaaacaacatgcaaaaacaacatgctctccaaaaattttcaccttgcttctcccccttttgacaatgatttattcaagcataggaattatgttcattaatgacatatagcatatcatgtcatgtgttgcaataaaaagaagatgaacacatctataacataacaaacatgaattaaagtataaccatgaaccaaagattttacaattaagcttgaatcaacaatcaaaattcatgatttcatacgatttataatgcaacatcttaacaagcacataggttgaagaatggacactaaacacatatacctattgcatttatcactctttctcaaataacctttagcacaaaacaaccaagagaattttttactttttctttttcttgagcatttttgctcatatttttctcttttattccgggtgcgtccctgtcgtcaggattgtttctagggattcggcacccattattttgcttacatcgaatacgtccttgtcgtcaagactgtttccaaggattcggtattcattttttttcgtagttttattctcttttcacaatgagcaattaaagctatttgaggaataataattcaataaagcatatatatagagcatttagaaatcaaaccacatgctagcatcaacattgcatatttaagtgtcatgcatcatctcccttaaaagcaaaatctaaatctcatgaaaatactagaatacatacaagctatgctagagacaaataaaccttcaaagtattgttagcatgcacaagaaaataccatatgtataaacaaagctctcttttctcaatttttctcattgtcatatttttgcttgataaaaccatgaggtacaaactccccttcaaaacatgccaaaaggatgaattatttccaattcaccacaaagaaaagcaaagcgattagaatccaaaggtttagtgaaaatatcagcaagttgtaattttgtttccaaaaactgcaattcaacatctcccttctcaacatgatccctcaaaaagtgaaaacgaatatcaatgtgatttatgcgtgagtgttgaataggattcttagcaatgttaatagcactagtattatcacaaaagagaggtattttctcaaaagtaagaccataatctttcaaagtagataaaagccaaagaatctgtgaacaacaactagcagcagcaatatattcagattcaacagttgattgagaaatactagattgtttcctagaagactatgcaattaatgatgtaccaagaaaatgacatgttccattagtacttttcttatcaattctacaacctccaaaatcagcatcggaatatccacttaagcatatagaagatgaagtagaatacaaaattccaaactcaagtgtatgattcaaatacctcattattcgcttgaccgcttgacgatgtgaaacacgacgagaagcttgaaagcgtgcacacaaacacacagcaaaatgtatgtctggcctagaagcagttagatacaacaaagatccaatcatacttctatactccttttgatcaacagcttcaccatcttcatcaggatccaacacagctgtagaaccaattggtgttgaaattggtttgcaattctccatcttgaaccgtctcaaaagatccttcgtgtacttcgtttgatgcacaaatgtacgttgaggtgtttgcttaatttgtaatcccaaaaagtacgataactcacccatcatgctcatctcaaattccctgcacatagtcttagcaaactccacaaccaaagcgtgagtcgaacaaccaaagatgatatcatccacataaatctgaacaaatagttgattatcaccatgcttaagaataaaaagcgttttgtcaacttttcccattgtaaaacctttcgcaagcaaaaagttcttaagtctatcataccatgctctaggtgcttgtttcaagccatacaaagttttagacaatttaaaaacatggttgggaaaatcagaattttcaaaacctggtagttgtttgacataaacttcctcctgtataaaaccatttagaaaagcactttttacatccatttgatacaatttaaaaccttttgaagcagcaaaagccaacaaaagtctaattgcctcaattctagcaacatgagcaaaagtttcatcaaaatccaaaccctccacctgagtaaaaccttgagcaacaagtctagctttatttctcacaatcaaaccatcctcattttgtttatttttgaaaacccacttggttccaataatattttgtccagaaggtggttcaactaaagtccaaactttgtttctctccaaatattcaagttcttcatgcataggcacaaagtggtttgaacaagggaaaactaaaactagatgaacatggtagtattttttttagccttttctggactctaggtaatggaaatgaaaattaacacttggaaaacagatgatacctatcggtcaacctaatgctctaataacacttgatgtgcctaggtacccgatcttccaataggttcgacttggcgacatgaagacgttcacgttatcatctcggaacagctacacccacacatttagttgttatcaaccatgctctcacgtagttgacctcaccatgaaagtttatccctacaagcaattgaagaaactcaaagaataaggaagaacacaatctaaatttctaatgaatgattagcacttaaagttggggttccataaactggacttgttgatgacgaaactattgcatatattggcggattgactaatctaagaaaaacccgactctaacgatgacgactactaaataaatatagcatcctaaggttagctctagggcacaaaccttgttgggcagagatcaggatttgccgctgacaaccgtctcttacagcatgttaggaggcagattcgcaggtgtacgcgcgcatcttgtgtaatcgagtaaaataacgctcacaatctaactacaaccattggctgttgttttatttcattctttgtacaccgttacaacatagcagacttagcagcactcacatatatataccaacaaacacatatacatcatccaaatgttccaatcgagtaccttctttttgtacagccattagtggttgagacgaaataacgatcattgtgatcgatgcaaattaaattagccaagcctcttgttggattcacagaggtaagcccatgcgacaactgcagcagcaactgcaaccccagctgcagtttgcatcaacagggactttggtttctggcatgatttgtagatgaatgcagagcgaggaggcgtgaaccccagctcagatagcttcttgtgcgactctgcatagtccctgaaaaatgcatcttcgtcctacaaagaaaaatacaaattattgttagcaaatcaagaactcattaactactaactagagaatgctcaattgctcattgcacacatcattctggttaggtttctatttgtgcaatactaatgcaatctatcagaaagtttatagtttacaaactattgtgattaccataacaaaggaaaacatgacatttacagaagcactacgattttcagaaaagaaaaaaaattaattaccatcctgataagctacctgaaatgttacagtgaatagaaaagatttgggatataaatgcgatgtaccttggcatatagttcgacatagcggcggaatgtaggatcttcaacaagagccttgtcagtaggcaacttcagaagcccttctgaattctctttcagaagctcactgcattgaagcaaatggtgatatttaattaattctatagatggataagtcatatttaatattacatgaaataggagttatcaaatttcggaggattctttgtccaagcaccatcaataattaattctgtggagggacaagtcatatttaatcttacatgaaataggagttgtcaaatttcagtggatcctttgtccaggcaccatcaaatcctgatctttcgggacgagctttcccctgaaaatgaactattcagaacatgatctctaatttagctggaaaatagtagttgatatattatatacaccagtagaaagatgatgttgcatacgagagtatggccgcctgagagtgctactatgtccttgtctgataagcccatcctgtagaagacttccctcagatgcgcagcaccttttcaaaaaagtaaaatatagtacaagaaactaaatacctttgacatttttgaagcaaattatccagaaaaacaaaatttcgaatttaattgtatcatctgaactttgtgcatacaacatattggaaggtttcagcgctcatttcatttaatcatttataattagcaaaattaacccaagaaatcacagaaaaaagtatcaatgcattggagctgatattttattttagattagtagataggagcagagataacgggtcatgaatcaacctttcttagcatctggcaaacggccttcctctggggaatctgaagaatcctgtagataaatgagaaaaaaaaaaggagaactcaagatggtttcataagatattcagtctggaaaaaaaatcaatgtcgatgcatcaactcaccctcctgccaggaacataatctatagttggcccaccggtgacttcaacggcaacaactccggcaagctgaaattagaggtgatgagatttataattggtatgtgattggtgaagtttaccagcaggaaagtaggattgggcttgttcggatgagattgctgctgcagcgctgcagctgcacggcagcagcagctacagtgctacagcagctagctaacagcggctgtagaggctgcaggcagccaacagccaggccgctgccagccaacaggcagacgaacggctgggctgtacagcacagccaaaacagctgcgtaatcgagctgccgaacaggcccattgtaaggttacttgttagtgttcaaatatgcagctgagttacctgatacaggtcagcataggtaatcttgggatgcttctgtttcatcggttctgcaccacatgaaagaaccatatatatcatctcaaatcaaacttgttaaggtcagaacaaaattaacaacaacagcatcaaaaaacaagttcacatcctgaacaagaatctgacagaaacatgcacagacctagcagatcaatagcaatcttgatgcccgcattcgcggcgtggctgtactcctgcgggaacctgatggagccgttgggccctcccgtcttcgtcgccttgtcgtacgtgccggcgtcgtgccacctgcgcaaaaacagcggcggccggcggcggcggcggcgccagagcagacgacatcagcggcgagctagacatacacgatcgtggagcatagcaaggacagcagagacaaaggaagaagaagaagaagatgaaacggcaacgcacgccaggcggagcatgatgggagcgcagctcttgctggcgatgagggcgcgcaggtcgcggcgcgccctctcgacctccgccatgtactccgcgtccactaccggcgccgccgacatcgccgccgctgttgctgacgatccgaggagaggtgataggtggagaagggaacagaacagaggagctcaggttttggagcgacacaggggtttttgtaggaaaagcggggaggaaagggcgggaggaatcgaatggagtggaggtgtggagaaggcaagggatgtctccagaggaaggcaacgtgcccaggaatctgtgggagatttctctggtatgcacatcactgggcctacacacagccacggtggaaaatctcttgatttctgacgagattactgattcaggcctgggttagttactcgaaaatgtttccaaaaaattttagacacattaaatctttagacatatgcatgaagcattaaatatagattaaacaaactaattgcatagttagggagaaaatcacgagacgaatcttttgagcctaattagtccatgattaaccataagtgatacagtaacccacatgtactaattacggattaataaggctcaaaagattcgtctcacggttttcagacgagttatgaaattaattttttcattagtgtacgaaaaccccttccgacatccggtcaaacatccgatgtgacagccaaaatttttttttcgtgaactaaacaaaccctcaggtgaggaagtttttcgctggctctgtcctaggccctgtttagttcccaaaacaaaaatttttcacccatcacatgaatgtttgatacatgcatggagtatttaatgtggaaaaaaaccaattacacagtttgcgtgtaaattgcgagacgaatcttctgagcctaattgcgtcatgatttgacaatgtggtgctacagtaaacatttgctaatgatggattacttaggattaataaattcgtctcacagtttctaggcggaaactgtaatttattttgttattagacaacgtttaatactttaaatgtgtatccatatatctgatgtgacaccttaaaacaaatatttttttgccaactaaaccgggcctaaatatagaaaactagtactacattctagatctggataggggtcttattcagccctactcggctactccccctcctaaatgattcacaattttctccaatttaattccacctacttttttaatacatgcatcaaatttataagttaatttgaaagaagagtactaggaataaaatacacaatttgttttatttcgaaataaggacttacaggacgtttcaagaatgttgggtatgaaatatagcataatacatatccctcaataaatcagaaaaactaaatcatactactaaaagtgagacctctcttgaattggactaataattttatcttatatgttgtgcatggatacagagtgttttgtttttattttttgaaatatccaaatacctcctacaagtcactagtgttttcaaacttcctttgcaacttaattccatacaaaacactcataataagtttgttttttttccatcttcccacctctatccatttctagctatttctcacaccctatgaccctccatcactgtgagggtagttgctcctttccaccaaaggtgtgtgtaccatagcattattttacctttcacttttacacactttaattccaccaactatgtgacggtaagacatgataattatctcatttcataaaaatgtgtattgaatcttatgcccaacaagagaagacaaaagcaacttcactagccatgctgagatctacaaagatgtgagaaattgctaagcgcggccagaaatcagtgaaaactagacagaggtgggaagttagaagaagaaaatggacttgtagggagcatatgttgcacaaaattaagttattgggagagattgaaaagaccagttacttataggggttatttggattttttttcctttttgttatttaaggcacatgcccgtagatagattaaaatccatctccttatattacacaactgtaccttacacttcacacggtttactgaatttgcactatgcaaaacagcagaaatccaagaaaccaggtagtgacaaccttaaaacaagcatgatcaggcgataaatttattccacacgactccgagtcgaaagtactactctttcttggggaaaagatcaatataatcactagggccataaacgtcgaataaatcagcccagaatccgttcttcctcctcggattgcaccccatgtcccggcatagctgatcattgtaccagatgtgaaggattccgatgcaggatctgcgaaagtaaccacgagaatagcgcttcatgaacttctcccattccaggacatcattctgcatcacactgatgcttggcaacctgaagccaccatccatgaaatgtgccagccacttggcccgtaattctgatgtgtagagatttgccaagctctctgaatagccgataaccgcgagctgcgggatctttgggtgaatgatctccctgtgttcatgcagcaaattaagttcaacagtccaagatagaatttggaaattgtactaattaaatatttgttccttgcaaaaaacaattgttgagttgacctgtagagaggtacagttgtagatgcagagcctactgcaatgctctgaaagtattcagaagtgaacatctccttgatcttctgatcccctctgaacccagttccaaagatcactatatcgctctttatcggcgaagattggccttcgacaagcacaccttccttgcaaaagctaaatgtctttgatttcttcagaacaatgctgccttcttctaatctcttgtaatggtctttgggtgtaatggcaaccaagcatgtaatcaaagcctcaaataggctatggtcaggcaccatgtcatacttcttcattggaatggaataatagctttctgcaaacttcgaaaatatccatctctgaacatgtgcaaagaggaaaaacatgcatggatcagtcttgcttcaatttaaccagagaaagcaaattttagcagtataattaaaacagaattgccataccaatggagtcaagagggtggccaagatgctaaggagtaagccttcaccaggcttgtgaataagaagctcagaaaaccgattaagatacagctttgagatgtggacgccccatgcaaaatagtctggtatgatccaatgctttgttcggaccaccattgtacatggaatctcagtacctacacgaagaagaaacacttagtaagtggggaaaatttaattcagcatctaaagttgcacaagagaaaaaatactgaaaaaaatggttggaggaaatcagattgttaatttgtcagtaccatttacttctgcacattctgcagcaatgtcaagtgctgatttgaggtagccaacgatcgtgacacgcttgcccttgatcatttccttagaattcttggtgcccatcttggagtaatccatggagtggatcacctggccatcaaatgcttctggacctttgcctggaggaaatgttggtatgttgggcactccactgaacctcccaatacaaagtatgacaaaatccgccttgtgtgtctggaatatgagaagtttgagtaacaaatgtgtgactaaattaatttagggataactatgatgaattatattacttcctttgttttaaaatatggtgcatattttgttttatattaggacaagattttgaccaagaattactgtattagaatatcatttatgtgatacaaaagtataatcaagatcgagtaaatattagtggatatgaatataataaatttaatttttatgtaaaaaaaaggcaaaacaaagaaaaataaacacattagccaatggatctctctcggcatggatgctgcgatttgtgcaattggatgtctcgcgctagacagcgatgcccccgctgtgcgccacaaattgcacggttgcctctttcgcaaccagcagagctagcccattccaggatctttgttgatggtgaacaccttgttttttttctttggatggtgaccaccaggttataaaggaatgatctatatcgaagaaaagcactgagactgctcaatgtcagagaggataagacatcagaaatattgccgtgactttgggctaggaatcaagttgcgatcgacggactctggtcgtagaatcgcaggacacagcgaactgtttagggtgtgttcggacctctaggttcccaacccaaatccctagttttttcacgcgcacgcttttcaaactgctaaacggtgtgttttttgcaaaaaaaatttatacgaaagttgcttaaaaaaatcaaattaatctattttttttaaaaaaattagctaatacttaattaatcacgtgctaatggatcgctccgttttccatgcggaggcagtatgttcccatcatccacatgcgaacatactttaaacacttcaaaccacttccatatcaatagaaagcatattgaaatatgtttcagggtatagtaaatgttagtaggttttaaaagtttgaaggtgaaaaccactggaaccttgatcaaaccacgttaacgttgatcaacgttgaaatatgttttatggtgtcatgtgcttttgtttcttaaaagttgaaagcgagagagaactggttttgtaacttaggatgaaaaaatagatttcgaaggaagttacggcttttacttttttcttaaggaaagtagctgcatcaattactattaccacttaatttctttaattaacttgtctcaaaatgtaacaacttttagcaatgaatctggattagctaaaaatgcttatattttggccagattcataactaaaaatgcttatattttgggatggagggagtacgtttgatggcctatatacctaggggatatatttgttgaagctttaggttatttcattttctatattgcggtttcactagtaggatatataatagtgccaaactgccgtaaaaaccatataagtacatgtcaactttcttatgtatcgcactgatggtttctaacctaataaaacgataacaacgagacaagatcactactaggaaaaagattttttccaggcggtccaaaacagttttcgcaggcggggcttcaccctccggccacggctctcctccatccactgctcccacataggagagggaggagccgagccgctgcataagtgccgtcgtcatcgtcgttgcatcgacgaggagagccggcggccggatgcgagccgtcgtcgtcgcccgtcgtggccggtggcgtaggcggtgaggagggaagcgggcggcagaggaggcgagccattgtcgtcgctcgtcgtggccggcagcggagggggcgaggaggagaagcggacggcggaggcggcgaggagggatgccagcggcggcgggggagagccgttgtcgtcgctcgtcatggccggcgacggagggggcgaggagggaagctagcggaggaggagagccgttgtcgtcgctcggcgtggccggcggcggaaggagccgtcggcgcgcggaggcggtgtcgcagtcgtcgtcgtcgtcgaggaaggagcacgccggcggcgaggaggggagccggcggcgcgcggaggcggcatcgtgatcgtcgtcatcgtcgagaagggagcccgccggtggcgaggagggagccgacggtggaggcggggaggagggaggctgctgggaggatttttttctgagtgagagagagaggagggggagggaaatgagtggtggagaggagaggataaggatgactagattttttatgggtaggtacgatttttgcaggcggatcatataagttgcgcttatgaaaatagattttcgcaggcgtcgctgaagtggtccgcctgcgaaaatcattttcacaggcgccgcttaagtggtccaactttaccccgatttatatttttgtagacggtcatttggctccaagggtcatgttcgactgcgaaaaaaagacccgcacatcaggaaaaatgctttttttctaacagtggatgtaacctataaaccaaagcactgtgcgtctgtgccacacaatgatatttatatgtactccctacatccgcgaatataaatattttgaacagataagaaactactctaatatctgttattaaataaaggatgaatataagtggaagatggatgggataaagatgactggttgataaataatagttttaggtaattatacatattaatgaataaattttaaatgctagctgcaacatttatattaatagttttagggtataagtaggtcgatccgtgaactgcttataggttaaataaatggtaatccatcatgctgcttattatttatttaacatataaataaattcatgagccgatatatttattccctccatttcaataaaaaaggttactataagatgtgtcatataatgtttctttattagggtgcagatgtcatactagcctggcccaggcctgcatttcatgcccatgcacaaagggtgccacctagctagtctagattagggggtgtttagatttagggggtaaagttttactgtatcacgtcaggtattatatagggtgttgcatagggtgttctgatactaacaaatcaactaattacagtatccgtcagtaatctagcagatgaatttattaaacataattaatttatcattagcacatgtttgctgtagactgtagcaccacgttggattgaggtgagatctaagcatgcccttactgtgtttctgtgtaagattgctcgtctgattgaatcacatcggattctgcctctgtccatgcctatccaaaatgatatgatgcggcgccccgacctttttcccttgttcctggcgctatgcgtctcttttctcctagtagaaacacaaattgttccatactgataaatatctcctactagcgacgcgaacattctctgctgacatatgattttgattgctcgcggtaaaataaattaattaaagtgtccgcctacatgttttaaataataagtgtagctttcgaactgttgataaaatcgtaacttattttgacagaacttcaaatatcaaagacaaaattctatgcctacataaaaagtttgaaatacaaatttaggaaaattcctttgcacaagagtatttattttaataattatttacatataatttttgacaaaatgaaaataaatattattttattcagctttattgaccgtacccttttccagatttttattacagtctatttttattactattggcttttagatcgttaatgacgcaggtataaagcttccacttataaattatttttttccaataagtttgttatgtgtcataaatgtaggccaaacaatatgataaatgcaaatttggaaacttcctccatgcaaagtactccctcctttttttaatagatgacgccgttgactttttctcacatatttgaccattcgtcttgttcaaaaaatttacgtaattataatttattttgttatgggttgctttatcactcatagttctttaaatgtgatttatatcttatacatttgcataaaatttttaaataagacgaatggtaaaacatatgagaaaaagtcaacggcgtcgtctgtttaaaaaatggatgtagtagtagcgaaattctcacctcaatatggccctcaccgtcgaccacctctagccgccactcgccggagccggagccgaaagcgtcgccgttcccagcccactcatcccacgccgccacagcctcctcgccgacgccgacgtactccatccccgccacccggtggccgaacctgatgcagtcgagcacgccgaagcggcgagcgtaggcgccgaggtagtccatcacctggcggtggtccgggaacacctccgtcaccgtctccggccacgggaagtcggagtactggtacatgggccgcggcgtctgcagcgcggtgcactccggcgtccgcgcccacacgccgccgaggccggtgtccgcctcgaacaccaccggccggcagccgcgctccagcagttgcttgcacgccgccaggccgctcacgccggcgccgacgatgaccacccgcttcttctccatgccggctagtgggctactgggctaggaaaatacgagctgtgtgtgagttgtgtttggactctgaggagcgaggtgtatttatagttggtcagaggtatagctcattagctcagaatgtcagagatatgttattaactgtgtaattatatagtttttgataatgatgcatcatgcactaaattgtttatggagcatgatttgcttgatgtgatgcttttttttttggatcatggcggtactgagtattaaatgataatagcatgtttgatatatatatacttaccaatcattcttattatttttaatttgttaaacttattcaagataatgtattgaaaacactaaataatttagagtcaaaacttccaggttggagctcactactactactactacacaacaacacatatgagatatttctcatctgcc

SEQ ID NO: 5342 - DNA, 5932 bp, Oryza sativa
caattaagcatgtttctgttatagtagaaacacagtgaatcttctaaaatcatatctaattcatccgagctcagtttaagcccattcaagtctcaataaatcaagaaaaaatgcatagaatccattaaaaatggttttgttctctgtttcagtagtcttattgcctgtttgtattgttttctttgtatgtcgcttagattccggctctcccaccgctccggtgtactttgaaatagtcgccgaggttcctccagcagcagagcaaggtaagtcatgcttgtcacttgaacatgttgatcctatattacaaatgctctatcgttttcctttaaatactgcatcgttttataatgttactatgggatgtttacctactgttacagccacactaatttttgtaccatgctcctttgttagctttgggtataacatgactagagattggattagggattgcttagccatgcttagttcaactagcacacaatgggggaaatacattaatacatagatatcagattctagtaatgatgggttaataccaccgctccggtgttggtgaattaaaattaactaaattgtgagctatgggtgcatggttttgatggtcgcgcccatggcatttaaggaccggttcgcgggatgccctggaagaacttatcatacttaccacaagccagcgtgggcaacggctgggcttgtagtgtacctttcctctagttgacgcatcaggcaagggtgagcgtgatggagtttggatgggccctgcgacggcctatgcggcttccggattcatctaggcacgagaggggactgcccgctgccttgcgaggagtgggggtgaaacctgaggtgtggtgtgcttggttagagggggttatgcgaagggtcctgtcacggtctctatccggtatgtcgtggtggcatgtcggcgcacggaaacgtatcgtggggctgtgtcttgtgggtacagttgtacacctctgatcagagtaaaactattcgaatagccgtgcccgcggttatgggcggtcaaccagattcaccgtgattattctcagccaagtctagtctaatggaattgaatagcctaggtggatggttgggcctgttgcaacgtggggtagcgttggacagtgggtggttaatattgatttattattacaactggtttactgctttcaactactatttataaatgctcgctctatgcaaacgaacctctatagctatccctagttaattccgtgcatcatacccctattccggtatgacttgctgagtacagtgggtagtactcagtcttgctctattttccccaaaccccagagtttgagtatgcgttagatggtggcttctccgaggagtaggcttcgtccgtgccgtcaaggatgcctgtggagtggtgttcccgctgcagtccaagtcaaggcttagctccagttatcttttaattttccgctgcatttatgtaagattttatgatgtttgtaagacgtggatctgtttgtcaactttgtcgtttgtgtacctcggccggtcctagacgggggttttaacgcacattctgtttggaatcctattcgggaatttctgggcgtgacaagttggtatcagagccgaccttgattgtagtacaagccaaatggaaaacctaagagtctgaatccttttcattgcacacgttctttgcaattggatttgttcctgtggttcaagggaaaaatcttggtcgcttgttcaagtgagatttgtcaaatcaggtcagtctagggttttagtaaaattatttgagatttatttaacagttagtcgggatttgatgggaggagtgcattaggtgctaactaagagatgtgggttgcaagttatttatgttcctattgttattgttattattagtatgtatctaatttctcattattttatcgctatgtaagtccgtctcacttattcgctctcatgcaaaaatgatctatgcataaaattccgctcttattcgcttattttatttgtgtcctttattgctttatttaaattggatttgagcatgcattgatcctacccctttgccttctctagatggccgaccacccacccaaccaccgtggagaaggcatggatgattttgtggctgaattggcttgcatgaccttggtggtgggctaccccaacgcgccagagtactcaactgttccaccgctcagtggcgagcttcctcaccgtgttcgtctggaggttcatggctatgtggacacctgccttgctaatatggtggttcaggcatctggaggcaccgcagatcacgcctgtcaggaggcagcatatctggtgatggccaggcttcgtgatcgccacaactacactttctgcaacacggcgtaccgcttccaccctcgccgagcaagcggtgatgacgtcagcacctttcgcccgacggccggcgagaacgacaccaccttcggccacatgtgcgccgtgatgaggggaagggacaggatgcactctgacctgcacaaggcgtccaaggccttgaatgatgggaagctcgtgaggatcatagctctgaaggatgagatagcacgcctgaagaaggaaaacgctcagttgaagggtttcccagcgccaggaggagtccggatccgcaccacgcccctcaagttgacgactgtacccatgcgcattcagcttgcgcctaggaacccacctcctcccgcagctcctccagtacctccagcagttcttgcagtgcccgcagctccagctccagccccagctccagtcccagtgtcagctcctgcgtctgctctctcctttgctccagcgtcagccgctaggggtccagccagtggcaacggaggttggttgcctgctactcccagtggcagccgcgaccacagcagcagcagttctagtggcacagagccgggcaccggcgagacgtatctgccagactccaggagccgctcagagggacctggtgacgagcaggaggatgcctttgactccaccgaccgcaggagccgttcgaggcattaggcacgttttcccttagtttatcgactgtttagtttttgtctgttagtttgtgtgtttaggtttgttcgcttgtgggtcagtcgacggtcgatatcatgtgcctatgatatggctatcctaataagtattttgcttgctgttttaagtgttttaattctgatcagaacaattgcagtttaaattcctataaaataaagcttagttcctgagcatctgtttttcttcttttccaccccctccgtctgctcttccttcagatggtcaacaccaggaatggcagccgtgcagcaggtgagggcagcaacggcgaagaacgcaccgacggtgggcatcccaacagcgactccgtcaatggtccgccaccgctccccgagaatccgactctggcccaagtaatggctcatcagactcagatgatggcagccatgatgcagcagatgcagcagcagcaccagcagatgcaccagaggatgtagcagcaaaccaagtagcagcagcagcagtttggtccccctccccctctatccaagttgccggagtttctacgcgtcaggccacccaccttctccagcaccaacaacctcatggaggcaaatgactagctccatgccatagagaagaagctcaaccttctgcagtgcaatgatcaggagaaagtcgccttcgccacacatcagctccagggtcccgcgtcagcttggtgggacaaccacatggctacccgtccgccaggtatggaggtcacttgggcagaattctatcgcagctttaggaaggctcaggtgccagacggggttgtggcatagaagaagagggaattccgagcactccactagggcaacaggacagtgactgagtacctgcatgagttcaatcgcctagcgcggtatgcaccagagaatgttcgcactgacgcagagaagcaggagaagttcctagcaggcctggatgacgaactgaccatccagttgatctccagggattacgcagacttcgagaagctggtagacaacgcaatccgtcaggaggatcaatgtaacaaaatggacaggaagagaaaggtagctcagttccggtccaaccaaggaagccatcagcgaccgcgcttcacacccggacagcagggtggacctaccaccatgattgtccgccagcatcgcccgttaaactcaagcagtttccaccagggcgcaagtggcagccagagccaccagggaggtcagcccaaccgcagtgcagctccgcgcccaccaatggcaccagcacagtcagctccattagcccaagccaagaaggagattggaacaaagccagggtcctattacaactgtggcgagcatggccactttgttgacaagtgtccgaagccaaggcgtgccgggccaaggtttgcttaagcccgtgttaaccacgcgtccacagaagaggcgcaagcagcaccagaggccatactgggtacgtttcctgttaactcaatccctgcaacagtacttttcgattctggtgcaacgcattcgttcatttcaaagaagtttgttgggatgcatgggttaagaaaagaagagcttagtacaccaatgagggttcataccccgggaaatagttcaacctcggtcagttatagcccttcagtgctaataggaatacaccgatcataatttctagccaacctcatccttcttgaatccaaagacctagatgtcattcttgggatggattggctgaccaagttcaagggagtcattgattgtgcgaattgcatagtcaccttgaccaatgagaagggagaaaccgtggtgtacaagtcaccagtctcaccgaagcagggaatctccttaaatcagattgaggtggaaaaccctgtggccaccgaggagaagagttcgaggaaattggaagatatccccatagtctgcgagtatccagaggtgttccccgaagacctcactaccatgccacccaagagagagattgaattccggattgatttggcaccggggactgctccaatttacaaaagaccgtacaggatggcagccaaagagctagcaaaggtcaagaagcaggttgatgagcaactgcagaaagggtacattcgaccaagtacttcaccttggggtgctccggtcatttttgtggagaagaaggacaagacgaagagaatgtgtgttgattatcgcgcgctcaatgaggtcacaatcaagaacaaataccctttaccgtggattgatgatctgtttgatcagctgaaaggagctaaagtgttttctaagatagacctgcgatcaggctatcaccagttgagaattcgggaagaggatatttccaagacagccttcaccactcggtatgggttgtatgagtgcactgtcatgtcttttggacttaccaatgcacctgcattcttcatgaacctgatgaacaaggtgttcatggaatttctggataagtttgttgtggtataaattgatgacatactcatctattcaaagtctgaagaagaacatgagcaacatcttcgtctggtactcgagaagttgaaggagcaccagttatatgccaagttcagtaaatgcgacttttggttatcggaggtcaaattcttgggtcacgtcattacagctcagggcgtggcagtcgatccgtcgaatgtggagtcagttaccaagtggaccccgcctaaggcaatgtcacagattcggagtttccttggacttgcgggttattaccgtcggttcattgaaaatttctctaggattgccagacctatgactcagttgcttaagaaagaagaaaagttcaagtggacggccgagtgtgacaagagttttgaggagctcaagaagaaattagtgtctgctccagttctgattctgcctgatcagatgaagga

SEQ ID NO: 5343 - DNA, 8055 bp, Oryza sativa
ggttgctcatttcataccagtgcacactacttatacaggcaaagggtggcagagttctatctctcaagaatcatgtgtttgcatggagtacccaagaagattgtatccgatcgagggaatcagttcacctcaaaattttggcaaaaactgcaggaagaattggggacccgtttgaatttcagtacagcttaccatccgcagacagatggccaaaccgagagggtcaatcagatcttggaagacatgttgcgagcgtgtgcgctcgatttggtggggcatgggataaaagtctgccttatgctgaattctcgtacaacaacagctatcaggccagtctacaaatggcaccgttcgaagcgttgtatggccggaagtgccgcacgcctctcttctgggatcaaacaggcgaacatcaaatgttcggaacggaagtgctaacggaagcagaagagaaagtcagaaccgtcagagagagactgagaattgcccagtctcgacagaaaagctacgcggacaaccgccgaagggagctcacttttgaagcaggggattatgtgtacctccgtgttactctgctccggggagtgcatcgtttccagacgaaaggcaagttggcaccacgcttcgtgggaccgtacaaaatcttggaacgaagaggagaagttgcctatcagctagaacttccatccaacatgatcggcattcatgacgtgttccatgtgtcccagttaaagaagtgcttgagggtacccgaagaacaagccgattcggagcacattgacatccaagaagatctgacttatgtggaaaagccagttcgtatccttgagaccagtgaaagaaggactagaaacaaggtcaccaggttctacagggttcagtggagccatcactcagaaaaaaaagcaacctgggaaagggaagatgagttaaaggccgcccatccgcacctcttcgccagctcttccgaatctcggggtcgagattccgtttaagggaggtaggtttgtcaaaccctgaagttctttcccaagcctaaattgaatttataaattacctagaggaaatatcggtgtaaaagtaagagagaaaccctaataaattaatgcaaataataattgggattggcatgtggaatttttcttgagttctacatgtcgaaatatgctaacaagatttttagtggaattttcagagctctagaaataattttaaccaactaaaaatgagcacaagcattatttaatctctggaaattcaattctttctttttcttttcttattcccttgtcacgcccggaatttctatccaaaattccaaacgcttacatgtgtgtgaaccctcgtccaggaatcagccgaggcacacaataacaaattgataatagagttcaattattactctaaataataagcgaataaaatgtcattacagaggtagatagttcctctcaatcaataaagatctaagtagcggaaaaataagataaacggcacagacgactccactctacaggcagcttgaccagggttacacctaatcctccacaccaacagcttcactgtagaactcttcctctgatgaacgattgcaaggtgagtatatgacatactcagcaagtcacgcagcaaatatgcaagtgcacaggataacaaaggatggcatagtagggtttcatttgcataaacagcatttaataaacatttgagaatttaataaaacagttaagtaataattaaacaatattaatccaacgctatacaatataccctgttgtataagcccaaccattctgaacaaccacacccggctgtacagatctatctccaaaccaggaatataccattccaaaccaggagctaatcaaattattaccagttatagcatcttttattatgatgagaggtgtgagactaatcacgaaagacattgttagacccgcccataaccgcgggcacggctattcgaatagttttactctgatcagaggtgtaccactgtacccacaagacacagccccacatcatgtcaccatgtgcctcaataccaccacggtacctcggaaaggagctgtgacaataccccttgcataacacaatccaccgcaacgcaccattcctggatcataatcacccccttataaacaaggcatggactccccagcgacccctgtgggcttatctccgccacttctcagtctggtgccccgcaataaaccatgctatacaaaaggtaaagccgttgcccacgctggcttgtggttggcacggttaatgtttcacaaccaaaactcgtgaaccggtccttaattgtcatgagcacgactctcaaaaccacgtgctcacaacccaccattatcaggttttaattggcacattaattaattaaccaatcacgattgaccatcgtgagctatcattaagccatcattaaataatagtgagtcataagttatcccagtaatgtgctaatgtttctaagcatggctaagcaatcatatctaatatatctagttgaaccaatatataaagcccaactagtcaagttataataacccaaggtatcaaggaataaagtagacaagaacaaaagggctataacaaacaataggttaattccacccaatgacattcgaaaataaatgcaatagttgaatagaaacagtagctttaaacaggatcaacatgctcaaagggttatttgggatctgtgtgacttgccttgctggccttggaactcttcaaattcttctcctgcgaaaacggactctccggaaacgtcggaatctaaacagaaaagagcaaaaacaccaaaacagcacataaacaagcatgaacagtacatgtggatatttttaacatgtagatctcaattttagaaaaatttagaaacttgaaccaactaaatccgagctaagatgaattaggtatgaatttttaaagattaaaccggattaaaacacttatatggattttaattgaattatgacgcaataatgaattatttttgaaaaggaaaagggaattattgcgttagcggctagggtttgcggtggaccaggtgcatggcaacggttcacgggaacgaacggccgagatcaatccatccaaaacggacggccgagatcgatcgggtctacggcggctcacggcagacggccccgatgacgtcggcgatgacgtcaccaccggcggcggctcggcagctcggacggcgcacactcaccggcgaacgacggcgcttcggcatgaacggaaggcaccaggacgtagagcgcgacgcggcgaactcaccggtgaccaaagaagcggcggagaaacaacggacggcggcgacgacgaggaagaagcggcgacggtcttcggcttgacgacgacggcggtgctccggcggtcttcagcgacggtgaagtggcagacgaggacggcgacgcgacggcaaccacgatggcgatctccccgagcgacggcgacggctgaagcgacggcgaagcacggctggagcgacggcgacgacggcggcgctaggtcacacggcgctagagctcttccgacggcgagagacgaaggcgagggtggcggcgggtagaggagacaccgggggtccttatataggggttggagggcggcggcgaaggcccacggcggccggcgacgcgaaggaaacttcgggttcgggagagagagaggaatccgattcgacctcaaatccatgaacttccaaagcgagttagacgatgattccaaaagagaaaaggtagaggagatcccaaagattgtttcccctcaaatgatttcaccggatcgggaaagacgcggccgaatttggaaggagacggcggcgctagggtttcgggcggcggcggccagaggtagacgaagactgacaggtgggccccacctgtcagcgggcggacgcgcgcgcgagcggcggctgcggctggactgggccgactgggccgaaggagagagagagagaaggttttcggccgactttcggcccaaagccaaaagagacttttaaaatcctttttcaatttaaattattcatgaaatgcaattccatttaataaaaatacttccttagctcatataaatcccagaaaaatctaggaattatagaattaagcacagtatttaatgaaattttatctggccccattttatattggaatttattaattaaaattagatcttctcttctagactttttaaaataaattctaataattccaattaaacaacaatttatatatttaggatttttagggtgtgacaaacctacccccttaaacagaatctcgtcctcgagattcggaagaactggcgaacagatgcggatgagctgacttcaattcatcttctcgttcccaagttgattcttcttccgaatgattactccattggactttacaaaaacggataactggattcctggttcttctctcatctatttccaaaatacggattggtctctcaacataggtcagatcctcttggacttctatttgttcaagattagcttcttcgataggtacccttaaacactttttcaattgcgacacatggaacacattatggactcctgccaaagattgaggtaactccaactgataagcaacctctcctcttctactgacaatcttataaggtcccacaaaacgcggtgccaattttcctttggtgtgaaaacgatgaactcctcgaagaggcgtgacacgaagatacacataatctccttcttcaaaactcaaatctctgcggcgattgtcggcataactcttatgacgagactgggccactcgcaatctttcttgaatgattttcaccttttcttctacttccctcaggatatccgtcccgaaaacctgacgttctcccgtttgatcccacaaaagcggagtgcggcacttccgaatatacagtgcttcgtaaggagccatctgaagactagcttgataactgttgttatacgagaattccgcataaggtaaattcttatcccaacttccaccgaagtctaaagtacaagctctcaacatgtcttccaaaatctgattcaccctttcggtttgtccgtctgtctgcggatgataagcagtactaaagttcagcttagaacccatctcttcctgaagtttcttccaaaaatttgaagtaaactgactgcctcgatcagacactattttcttagggacgccatgcaaacacacaatccttgccatatacaattccgccaaccgacttccggaatatgttgtgtttactgggatgaaatgagccactttggtaagtctgtcaactatcacccaaatagagtcatggcctgatgacgttctgggtaaaccagtgatgaaatccataccgatttcctcccatttccattcaggaatcttcaaaggctgcaacaaaccggcaggtttttgatgttctgccttgactcgctgacaaacatcacatactgctacgtactctgcgatttcacgcttcatacttgcccaccaaaatctttccttgagatcctggtacattttggtactaccaaggtgaatggaatataaagtatcatgagcttctttcagaattgcatcttttaaatctttgttatcggggacacagattttctcgcccaaccatacagttccttgctcatccctcaagaaaccgatagcttttcctcttctcatattctttttgatttctagaatatcaggatcattaatttgggcttctctaacttgatcaattagaatgggctttgcttctaaggctgcaacgaaacctctactggcaattcccaaattaaatctttcaaattccttgcataattccaatggcaactgtcgtcctttcgtagcattgcaatagcctttcctgctaagagcgtctgctacaacattagcctttcccgggtgataatgaattcccatatcataatccttaattaattccaaccatctccgttgtctcatgttcagatccggctgagtaaagatatactttaaactcttgtgatcggtatacacctctgtacgagtaccgaaaagataatgacgctaaattttcaacgcatgaaccactgcggctaacttaagatcatgagtagggtagttctcctcatgcggacgtaactgacgagatgcataggcaaccaccttcccatcttgcatcaaaacacaacctaacccaagcttggatgcatcacaatacacttgaaaacccttctttggatcaggcaaaatcaaaataggagctgatattaagcgatccttcaactcttgaaaactctgctcacattcttctgaccacttgtacttcacatctttctgaagcagtcgtgtcatgggcttagcaatcttggaaaaattctctataaacctccgataatatcctgcgaggcctaggaaactgcgaatctctgaaactgtctttggttgtttccagttggttacggattccacattactaggatcgacggcaactcctcctgctgagatgacgtgaccaaggaacttcacttccgacaaccaaaattcacacttgctaaacttagcatacagctgatgttctcgcagcttctccagtgcaaggcgaagatgttcttcatgctcttctttggttcgggagtagataagaatgtcatcaataaagactaccacgaacttgtctaggtattccataaacaccttattcatcaagttcatgaagaaagtgggggcattggtaagtccaaaagacataacagtacattcgaacaatccgtatctagtggtaaaagctgtcttaggtatatcttcctctttgattctcaactggtgataccctgatcgaagatctatcttggagaaaatggtggcacctttaagctgatcaaacaaatcatcaattctgggtagcggatacttattcttgatagtcacatcatttagagcacgatagtccacacacatcctctgggtatgatctttcttttccacaaaaataaccggagctccccatggagatgaactcggtctgatgtatcctttctgaagcaaatcgtctacttgcctcttgacttctgcaaactcattggttgccattctataaggtctcttgtggattggagttgttcctggtaccaaatctattctgaactctatatcccttttaggcggcataccaggtaaatcgtctgggaacacatcaggatactcccggactataggaatctcttccaacgttatttggttcagtcttgaccttaaagactcagaagacaatgcatgaacagttacaactcgaccatcattactggtaagagttacttttctgttagcacagtctatcacacctttatatctggctaaccagtccatccctaggatgacatcaaggtctttggattctaacaggataagattggccagaaatggtactccctgaatttctattctgacagaggggctacgttgcaaagagagtgcttgattacttggggcactaaccatcaaaggacgtctaagatcttctacttccatcccatgatttcccgcaaaactcatagataagaatgaatgtgtagcaccagaatcgaaaagcactgttgcaggaactaagttaacaagaaacgtacccaaaatcacatctggagcatcttgagcttctgcagcagcaacatgattgacacgggcctttgatgctggtacggtagagttgctctgggtagggacaaccttcacacgtcggggcttcggacacatgtcagcgtaatgtcctgggtctccacagttgaaacacaccacgggcttgctgccttgctccctcttggcaggttgttgctgtgtcggagctgcaaacaggacgtggagcttgattgcggatgttgttgccagcattgttgttgaagaactgacgctgcggacgaacaacagacgaagaacctccctgtggcatggactggggtcctaaagtaagacgcggcttctgactattccccttgtgtgccatgaaatgagcaatctgacggttcttcttgtccatgcgggtgtactttgtcctccctgacgaatagct

SEQ ID NO: 5344 - DNA, 15908 bp, Oryza sativa
  unsure (1)..(15908): unsure at all n locations
ctgcgtgacttgctgagtatgtcatatactcaccttgcaatcattcatcagagaaagagttctacagaaatgctgatggtgtgaaggattatgcgtagccctggtcaagttgcctgtggagtggagtcgtctgcgccgtttatcttattttccgctgcttagatctttattgattgagaggaactatctacctctgtaatgacattttattcgcttattaattagagtaataatggtactctattatctttgttattgtgtgcctcggctgattcctggacgagggtttacacacatgtaagcgtttggaattttggatagaaattccgggcgtgacatgtacccacaagacacagccccacgacacgtttctgtgcaccgacatgccaccacgacataccggatagagaccgtgacaggacccttcgcataaccccctctaaccaagcacaccacaccacaggtttcacccccacccctcgcaaggcagcgggcagtcccctctcgtgcctaggtgaatccggaagccacataggccgtcgcaaggcccatccaaactccatcacgcccacccttgcctagatgcgtcaactagaggaaagctacactacaagcccagtcgttgcccacgctggcttgtggtaagtacgataagttcttccagggcatcccgcgaaccggtccttaaatgccatgggcacgaccatcaaaaccatgcacccatagctcaccatttagttaattttaattaaccaacaccggagcggtggtattaaccaacatcattactagaatctgatatctatgtattaatgtatttcccccattgtgtgctagttgaactaagcatggctaagcaatccctaatccaatctatagtcatgttatacccaaagctaacaaaggagcatggtacaaaaattagtgtggctgtaacagtaggtaaacatcccatagtaacattataaaacgatgcagtatttaaaagaaaacgatagagcatttgtaatataggatcaacatgttcaagtgacaagcatgacttaccttgctctgctgctggaggaacctccgcgattatttcaaagtacaccggagcggtgggagagcccgaatctaagcgacatacaaagaaaacaatacaaacaggccataagactactgaaacagagaacaaaaccatttttaatggattctatacatttttcttgatttactgagacttgaatgggcttaaacggaaacatccttaattgatttattgcgtaataaataaataccgggagagggaggggcggcgccgacatgcgggccccacaaggcagtgactcgggagggcggtccatggtggaccgggtccacggaccggggaggagcggcgcaccacgttgtgcacacgtggcgctgacgcggcgcacacgtggcggacacgtggcagccacgcgggcggcggggttggacggccccgatataccgcccggtagatcggacggcggaggcggctcgtggccgggcgcgcacgggcacggctcaagctgacccagcggccgtggcgcgctgcggcgcagcgcgccgcgacggcgatgcaagcgggcgaccggccggcggcggagggcggcggcgtcacggcgacacggacggcgacagtggcggctaggcggctaggccgcggcgcggcggctaatcggcgcgggagagagggaggaaggggaggaggggtctcaccgacgttgactgacgacggcgagcgacggagggcgatggcgacggcgagacgggctccggaaccacctaggggatcaaaagggatgagttagagagggaggggaaacaatggatggctagggcagcgaccgaaggcgcctgccatggcgaagctcatcggcgcgcggcgtggatgggactccggcggcggattgctacggaggaggggtggacgggacgacccgcacgacggtgaacgcgacgacgtcgacggcgcggctcggcacggtggctagcggctgcgaccggagcggcggcggcgggcggcggagagaaggacgacggcgctagggcggtggagtgcacgggagcgggcgattgcaaaatgaaaaagagagagaggagggaacgggggtgctttatttagacccacgagggtcgatcgtggtcatggagaccgcgatttcgccggtggagtgtggagaggtggggaggagagagaggcgggattcaaaaattgaatcccggccgtctcgagcgcgggcgcggccggaaaagaggggaaagtgggcgcgggaacgcgggcacgagggttacgtgggcgacgtggcccgggacacgcaggagcggggcgcggcgacggttgctgggcgcggcggcgccagctggaggaggcagacgggcccgacaggagggccccacctgtcggcgacccggggaaagaggagggggctcgggcggctggctagcccgtggcctgcggccggcccaacggggagggggagggggagagaatgggccagcggcccattcgaaaagaaaaaggagggaaaaagaaaagaaaaagaaagaattgaatttctagggattaaataatgcttgtgctcatttttagttggttaaaattatttctagggctctgaaaattccactaaaaatcttgttagcatatttcgacatgtagaactcaagaaaaattccacatgccaatcccgattattatttgcattaatttattagggtttctctcttgcttttacaccgatatttcctctaggtaatttataaattcaatttaggcttgggaaagaacttcagggtgtgacaccgagttccttacgacaatccgtcttgaccatccaaccggggctaaatatggaggagtaccctccccaggaaattaacttaggactatatacacacgcggaggaatacccgtactgagctgtcaccatcaacggcctacctcgcttccgtagcatataaccctaaataaagatatccagtaatctaaacaccacgcataaatcaccaaatactactctaatatcatcatcatgatatagagtcatcgtaaatatgattagtatgcccacaccattgcatctcccagataagctatcatcataatgaatataacatggatatataataaagttggtattcatactcggaaagtagttctataccaaagtagtataaagaagaatattctaaataaagtacaagtcttacaaaagaaggaaaagctactagagccatacccgaattcttccgaagactccgacgactgaaaactctattctatttctattccactataccctagagactatactaagcatgaggatgtatgaaacttcttgcttgaggtgtgtggaagaagtgatgagaagagttccctaaatagactgccaatgacggttgtggagttggaatggttggaattgccctccaaccatcattgggaagtgatccacactgtccagggagggttcgactgaaccatgggccggctcaatccagcctatcatcggctggtgacctcctctcttgatatattttgcaggcttgtgaattttggcccaattgtccattcattgataagtttgattctcgacatcgtccaattgatcgatcacctgttttgatgtcgtttctccttcattttatgtacattctctgcaaaaggttagaatcctagtgctagtggaatatttattatttaaacataaatatgcatttcaagcataactagttcttttttatttaggtaatattgacaggcaaaactggtcgctaatgaccgtcaacagcaagcgtagcctatgagggagggaggcgcggtgtattgcaaggctaggagggagggcgctaccaggccacaacacgtctcttccgcttcgtttctcctttttttcgcgaatcttgcgctactctcgactccacaacccaaccacgacgcgacacatctccttctctctaattctccctccgtgcagcgcagaccacagaggcgcaggtactttaccaccgagtggcaggcgcttggctggctggccgccggcacgccgggccagcctctgatcactgacacctcacgcttcttctcgtctcatgccggcggccagcctctgatcactgacacctcacgcctcttctcgtctccactccccagtacctttagctctaagccctaggaaaactgaggtgtttttttgttcttgtgttatttctttaatttttttctaagaaatttaggttcgcagcaggcggtgacgggaggagaggcggcagcggcgggcggccctctgctagatccggtgggaggggaggcagtggcagcggcggcggcccacgggcgacgtcggcgggctcacgtcttccagatccagcaacctctccgaccgcctctcctcctatcgcctacctcctccttcatccggtgagcagcggtggtcaacgctctgctgctttcaccctgccgattctctgatttggattggtttttaagatatctgatttaatgatgtgaagcactccatgaatttttgatcgtgtgatccaagaattgttgattgtgtgatggctgctgatatgcagttgtctttttggtagatttttggatgtttatatcggctcggctcaaatcgtatacgtcaattgctggcacctttgagtgttcttactagtgccgtcttcgtggtgccagttgggaaaaccgacatctttgtggtattcctaacaagcaccagtaaccctatctgggatagtgtattatgccaatttttgtttcgttggctcacaaaagtttattagatgttccatatcggctagaagtttaaataaaatacgtcagagaatctaccacgtctaataaactgaacccttattagagcggggcagctcaaattttaacattgacggtagaaacagtcagtaaaatgtagttcaatttttaagatgggactttacttttcagtgagattcgaataaacctgacggtgttaataacgtcaggaaaattcactgtgacggtcaaacctgtcagcactatttttcctgaagaatacacgtcaggcaaattaaaaatttcccaacaagccagttcggacagaattttcctgacagtttcacgtcaggagggttttggttgtcagggctagttgagtttttggcagtgttatacgcgtgattgcggaacatgaaagttcacacgtacaactcacagctatgcatttttgcatgtactatacctccaagtagattcatagtattggatatacctccaagtaaattcatagactggatatacctccaaatagattcatagtactggatatagtactggatagtctatttttatccatgttttaccattagacttatttaaaatgttttgtaaatataaaataaataatagctacataaacttttaataacatcgttgattttttatccatattttgccattagtcttatttaaaatattttgtaaatataaaataaataatataaatttctaataagacgaatgatcagttttataatacaatggtgtcatgcatcatgcattacaaaatgaatagagttagacggtgatcaaacataaaaaaaatcaatgattcatgcattagaaaacgaacgtcatgcattagaaaacgaatgggcggaaaaaaaagaacagaaaagagaggattgagcactccatcataaaagaacaacctaaagagcatgtgcaaatttacccctggttttttctaatttagctaaacataccactcgaatgacagtttggttgtaattttctagtggcagtactgtaataacgatcgtagaaaattataatcaagattcaaagcagtagaaaatttataattacccaaaaagagggggaatctgtaaataccaaaaagagagggaatttgtaattaacaaaaagaaggggaatctgtaattaccaaaaatttataattaccaaaaagagggggaatttgtaattaaaaaaaagagagtacgccttccgttccataaaaaacacaccataaaaaacacattataatactacgaatatgaacatacttataaaaagacacattgtaatactacgaatataaatataacacattataatactatgaatataaaaatacttcctagacttagcattgcccattgcccatattcatttagatattaatgaatcattagatattaataaatctagacatatacatgtaatactacgaatataaacatacttcctagacttagcattacccattgcccatatttatttagatattaataaatcattagatattaatgaatctagacatatacattagacatatacatgagtttagatatatgatgtttagattcattaacatctatatagactttttagcattgccatattaatgaatcatgtacatacatgtgtttaaattcattaacatctttttagcattgccatattaatgaatcatgtacatacatgtgtttaaattcattaacatctatatgtacgtggacacaatgctaaaaagtcttacattgtaaaacaatgtaaaacggagggagacggagggaataccttaaaaaaaatacattggaatactacgaatataaacatacctctattattcactcctatgttttttttaacctctattattcactcctatgtattattcactcctatgtagtatcatattcactcctatgtttttttttaagtcctattcactcctatggtttttttttaagtcccatgttgtttttaaggacggaagacgtaacattcagtcctacttcaaggacggaggagatactggataacaacattactagcaacattatggaaacattttaaaaggcaggcaggtacaaacttcataaatacaaggaaacattttaaaagacaggcaagtacaaacttcagaaatacaagaagctatgaccgatattaatattagcaacacattgaagcatgcaaccactcgtttttattcatccatacatcggagtattggttattctgaacagtgtacggccactccaaagctggagctaaactgaacctcaaaaagggctcagtgatggccaccaccggggagcttctccttgatcttctccatcatacccttcttctcgtgcgtcggctgcgtcgtcggtgtatacgccgtcccgccggcgtcggtggttgtaccagcggcggcggtgtgtcccgtgccggcaccatatccgccggtcgccgcagtggccgtcggctgctgctggccgcccttgttgccgccggggagcttctccttgatcttctccttgattcccttcttcctcctccctcccatcccgtcgtcctcagacgactgcacgtcatatataatacattgatgacacaggaagatacgtagacataatctagttacggttaatttacagtgtgttgagaaacgttaccgagcttgagcttgaactgccggagcggcggaggatgccaccggtcttgtgctcctctctcgccggctggaactggccgcctgcgtgcggatacgcgccggtgccggcggtggcgccgtgtggcgcccctgtgccggtggttccgtatgccatggtgtcgggtgttgtggtggctccgtgtccagccatgtgcctggtgcccaagccaccggcgccgtggtgggctccggtggttccgtacccggctgtgtgcccggttcctagtccaccagctccgtgctgagctccggtgacgccggttgttccgtacccggcggtctgccccgcgggtaaaccggcgccggcgccgtggtggactccggtgccggtggtaccatgcccggcagtgtgcccaggcattaaaccaccggcgtcatggacgccagtgccggtagcgccgtacgccggctgaccggaaccaccatagcccgcggcgtcgtgggtgccggtgccggtggcgccgtatccggcctgccggccataacccccggcgtcggtggcgccgccgaacgcatgctgaggctgcgcaacgntgccggcggcgccgtacccttcgcgcctgtctcttgcgtcccggtgatgccgtggccggccgccaccgggttgccgtactcgtcgacgcgcgccgccgggtggccgtgctgctgtccctggaagtgcgccatcttctcagcgtacgacgtcgctcgagcccgactcgatcacttgcgtgtgtgtgtgctcgcctgctcgagaggcgacgagttgatcaactgtttcagttggaaatgatctgtgtggtgggtgacgcgaggaggagaacgaggcaaagcgttggacttataggcgaggcgcgcgcggcgcgagcgcgacacgtcgagggggcacgtgtgagccgggtggatgcgcgacgcgtggagaacggtggggagccgacgcgtgcatgcgcggtgtgctgggatggggggtggagcggcatggaagccggtttgctttccacctggatgaggatgagtgcggacgtgggcttcggcggagattctgcgcgtcgggggtgtgcgtgggcgacgtcgagtagaacaggcgttctgccaggtggttaggttaggcatggatgcggctggtgacttgactcgactggaaacaaacagcctcggatatatatttcttttaaactgtcgaaaggtttggagttcaaatcttaacacaattctaataaataaacatagtctattttaaataaaatattaaaaatgataaacatttaaaatgtcataaatatagagaaaaaatagtagtaaactttatttttggtgttttgtactaattgagtttaaccataagttcggtctgcaataacacatctagaagattctacgactgaaacttaacccaaaatctattgtaagcggaatagtaaaatcgttttttgctaggtattgttttgtcaagaaattttcaagggaaaatcacatggatttttaaaaccaccctacacttggctattagaacaatataaagctcactaagaggataaagacgtacacaagtatcttagttagaaaatacaatataattgaattttgttttaaaatttctagatttaaaaagttacaagcatattaacaaggtacaatgtaattttatataaattacatcgtagcttaaaataacttacaacattctcattacactgtaatttgaaatgtggcttcaatttatttttctaataacgtcattaagctcatgtatacttataataccaaataggcatattgcatactttaatttgctggatcattttattacgtaactgtttcagctgggtctcacttattaaccagttgccagcctgattggccctgctctggttgctgcacgcacgccaggacatgacatggctctctatcagttgcagtctgtttgtgatcaaacgagaaaagcaaggatcttatacgtaaaatcaatggtgaaaattccgtctgattttaaagatgaaatctgttgaaagatatatagcaaaccagtaactgacatagtcccttggctcgtgagcttgtaactacatcgcatcccctagaagatagtatgctaatgggacgctatgaaattgcattgtcattcttagaaataaaatacacccgtccaaactcggataaaaatatatatttcttgctctgctaaaaaaagatcatggtaagaaatatggctctcatgaccgtgtaaaataaccaagtgttgaatatttcggaacggaggaaatatatatgttttgtggttagtctccatcttaaattaactatggggagaactgtgtaaaatataaggtaatctttatccatcaaacggtctcttggatatataggtcaaagataagttatgactccggttgagcctgtaatgaaacaggtcaaagataacttgggtggcctatcaatggtgggccaggctttacactatattttttccaaaaaaaaaatgatcaaacttaatgaaatttgacttagtacacaacaaaaacatctaaacctatgaaacggagggagtacagtggcatatgtacctagaaagttttatagatcatctctaaataaaaatggtgctgacagtagggtataatccatccaaaaaaaaagaaataattgtggggcatctttgctttgtgttgcgaagtttttttttcttgtaacaaggctgttttaaaaaatatattttttgaaaacgttggtactttttttagaacatgattttttttaattgtaattttgtttgttgacgtgcaatatatatgtacgcatatttttttattatcatctcatatgctccaatatgtttctaggaaatacatatggattggagcatacaaatcagttattcccagacactggatgtgattactaccaatcaaacactataacttcttatgtatccaattcaaccacaaaatggagcgcacttaattaatttgccaattagtccttcgctcgctttttagttgtaggtgcattttgctagacactcagaaattgttgaatagcacttcttgtcctttgaacagcaataggcaaagtccctctctttctgatagcaaacattcaagctcgcatggctgaccacgtttttcagtcccatcggaatattgcttccgatcttccttatggtttgacctagagatggaaggaatcatatgtactatatgttttaaaactgaaaaagaaatgatgaaatgacatataaatcaccaaaaaaaggaatttagttttcttattacctcttatttgtgcaggaagagcggagcacaccacaagaaccaagcaaaacaacatgagtccttggtaggcaggcttcatacatttcaccattgcgaaatatatatgacgctactatgttttacctgtcttattgtgatctatgtagggaatgttggtttgcgtgaacttgaggagccatggttcatatatatagaacaaatatggctgctatatatggaataaataaatgctagcttatctggaggattttaatcataatctaaaaggatctggaagattagcctgaattatgattaattgcctatttgatgacaataaattgttgctgtaaaatgaaatatcgtaaagcctaattttagctacatggacaaacttatcttctcggtcttgcccaaacgtctattgttgattaattccaccttaaaagagcgattttaaaaatatatcacccttattcttctgttttatgataatagattaatgtttatttttttttgtcaaatctactaacttgtccgaaagtctaattttagtttcactctaaaacatgtcaggctgtactatagatttcaccatcaaaaggttctaaatgtttcttacttaattgcatttttatgacaataaattagtgcctacttagcatcaaatctggtagattatcctaattaaaatatactttcaatagcatggctaaatctagcaggtgactctcccaacgtatgctaatagcaataggccccgttcactgtttccttgcggtgaattcacctattaggaggggatggttagaattaattctccatggggacataaatgagaggaggcatgtccccgttggtttcacggggggcggggattgttcttcattccacgtccccgctccccgcgaagacccgcgtaggggccgggtccaactttaatgtattttagttatcctgtgtgattatattgtttgtagtctttgataaatgataactttatgtttttatcatgtgaattagtagaaaatattagtagatgtatgctaatatattcatataaagtacgaatatatgttgtattgcatatataatttgacatgtgtatatttttttaagcaagggtgaaatcaccgcggggatttattccccgtgcggggatggggatggtaacaaagcttcccccgctgtgtttcgcggtgacggggatgtctcgcgggggcagggatggggatgcattccccgaggtgaattctccgttgccatctcttgcactactaaacatgcatgcgttttcaaattttcttttttgtttaattgctcggtttatggcacgatttcttcactgtacttatcagattttgttggtgtaaaccctaccttctttaaatattatgaatttaatttccactttgttgtacgtatgtcaaacatattcgagaggtgattgtagttgttttcttaggcgttcggttttctccgagattcaagctaggaatttcccacgtctctgggttgtcggtatgtggggtcaaaatagagttattgcttttgtcttatagttaaaaattttagcagtaaatctactttgtgttttctctactatattccattgaatttgatttgttctatagtaggtatgaaatcggttcagatagtttccatgtctattatatattttttggcatgtctattatattaattaattattaattttattgttatatagataacattgaaattgagattattatgtggatacaacacatatttataattctgtgtttttcttaaaaaaataaaaacctaaagagtctaattttcaatggtatattatatttaacacaatttagtatattcttaattttgtaagcacggtacaaggggttttcctgttcccatagatattcatgaccatatttgttccaatacatatttactcagtatctgtattcgataatattttgcttcatttccttttacgattctgattaaaaaaatgaaaataaaatgatagaggtagtttctgttaagaaaccagtctactctactgatcagcacatgagcagataaacacaaacttatgttccccaaagttctacatgtgctatacatgtcagacacttataagagacatataggagattacttcttcaataaggttgtcctcatcatcgtccatatggacatcttcaccatccttagtgttgacaaacatgtcatcatagttttcaatgtgagcttcaggctcagtggtgaagtatgactcatattggctcattttctcattagagctcaaccagatgcttgggaacatggcagttacgagaccaatgctcaatgcctccacatctatagcaattatcatgttttccccagatgttccacatgtaactttcttgcattcggcttttgcctttgggcttacccttcccttgccccttgaacatgatacttcccttacccttctatctcttctccctgtggccccatttatggtcacgtgagtcgccatcaacatcaacattggcttgtccttcagacattgccgtagacccagtgggtcgagcggaatgattgtttaaaataatctcattcggcctttttgcaactaaaaggactgaaataagctcagactactttgagttcttgtattgttgttgaagcaccatgcatgttgttggggtggtaggtggataactttttctcaatcatctcagtatcagtgatcttttggtcacataaacataaccaagcactgatccaatatagggcagagttatacgccactataaatttgtagtcttggaagcatagggtgattaggccatgttgtgcccatgggagcaaaattgacccttgatggtcgcagcgatccttcagggattgccataataccagtggatcttcctcggtcatatactcagacttcatctctgggtggagatggtggcacaagaatgcaattcctttgctttcttcgcctttgtaggatcctctgtgccagcttcgattagcacaatagtatgaccaagacccatggagtctagcttaatttcaacatccaatgcagtgaggtagttgctaccatccaacgcaagctcgatgaattacttctttgttctatctgacatgtcccatggcatcattttgtatttataacaggtaaataatatgtgcagggtcgatataaactggtcatgagtaatttttatgatcactagcatgtgtaatctttaggattaccacacagtttaccatagaaattaatttaagtaatccttaggattacagattgcgtgattaaatattatgaatcatgctaggaaattaattatataacattaaaataaaatgttacgaaagatcatgcaaacaatatagtaagcatgtaaacaaaacgaagagcatacatgggcacaaactccatgcatattgtgcaaactttaaaaaagaatagaaaccagtaaacacttctccactatgagcccacgagccttgacggcaaagttgaccttagtgacagcaaggccccatatgggtgatctccatagaaccaaaggacatccataacacttttagggtcgtgtagaaggtttgtttgcctccactatttgcgggcaacggcggtagagccatccattaagtttacataccgatgcttcaggaacctttcatcatctctagcattttaacgataatggtagcagagccgccatcatgtatcaactaatgctgagaggatgtatcatctcaagcctttggatggtaacggcggtagagccgccttcatgttactaggcattgctgagaggatgcatcatctctagcaattggacaataacagcgatagagccaccttcatgttatcatgtattgctgagagaatgtcagaggatggtacttcaggtgccatattgttcttctgctcatttcaactatagtagaatatanntntgcatattaagancnagatgatcattaggcattggtttctcagctgtttacctgtttagcttggtgaagactcgtgctggtacattnttaagaagccattctattctactgatcagcacaatagcagacaagcacagagttgtggacacagaaanatatggatgaatganagctttatttcatcggattgcgtacaagttacatgagnagattaagtatgaaaatataattcaaaatgatgttttagagaagattgagtatgaagatataattcaaaattttatttcaaagaatatcaaaaggattatgtttttcagtagaacatgaggtcaggtcaaactatttaagcattaatgttttatatgttcctaagaagaaccatatctaaaattttatgcttttgttatgctccgttttcatatttttggggcccattttacgttttgcacatgggccccaaaatcatagatacggccctattcatctgtaacaagacgcatcacctctagtacatgtgaagcctagattctggtttctctcttcacctctccctaccttttctctcccctttggaccacctatatacccatggttgatgttagcttcctccggtactaccccatttgagctgccaccgtattctttgaaagccattaattatctggaatttactattaatttggtaaagcgtgattttctctttatatatactaccgggagtagctactcctgcatcatctgctatacgtgctttcaagccgatcgctattttcgtgggatacaaacttttgaatgcattatgcacgtcagttgtttgcattatctgcctgacggccgcatatatatatagagagagaaaatcctctatgtacccatgaaagttcacctaatcccttctatacccctgaattttgctcaatcccttacatacccctgaattttagtttggatcccttccatgccctttccgctagttgaccgttagttgactgttaaattcttttgaaaaagtccattttgccctttgctataaagaaacataataaattaatgaagtatattgttggaatgtaaaaatttattggatgagactattatatttatgagaatgtgatgcaccatattatttgtgacaaatttacttttacatatgatataaaaagttaatacttatttattagttattaaaagttcttttatgtagcatatgtgttttcatagtaatacaacatat

SEQ ID NO: 5345 - DNA, 15016 bp, Oryza sativa
ggacgccatgcaaacacacaatccttgccatatacaattccgccaaccgacttccggaatatgttgtctttactgggatgaaatgagccacgttggtaagtctatcgactatcacccaaatagagtcatggcctgatgacgttctgggtagaccagtgatgaaatccataccgatttcctcccatttccattcaggaatcttcaaagactgcaacaaaccggcaggtttctgatgttcttccttgactcgctgacaaacatcacatactgctacgtactctgcgatttcacgcttcatacttacccaccaaaatctttccttgagatcctggtacattttggtactaccagggtgaatggaatataaagtatcatgagcttctttcagaattgcatcttttaaatctttgttatcggggacacagattctctcgcccaaccatacagttccttgctcatcctccaagaaaccgatagcttttcctcttctcatattctttttgatttctagaatatcaggatcattaatttgggcttctctaacttgatcaattagagtgagcttcgcttctaaagccgcaacaaaacctctactgacaattcccaaatttaatctttcaaattccttacataactccaatggcaactgtcgttctttcgtctacttgcctcttgacttttgccaattcattggctgccattctataaggtctcttatggatcggaattgttcctggtaccaaatctattctgaactctatatcccttttaggcggcataccacgtaaatcgtctgggaacacatcaggatactcccggactacaagaatttcttccaaagttatttggttcagtcttgaccttaaagactcagaagacaatgcatgaacagttacaactcgaccatcattgctggtgagagttacttttctgttagcacagtctatcacacccttatatctggctaaccagtccatccctaggatgacatcaaggtctttggattctaacaggataagattggccagaaatggtactccctgaatttctattctgacagaggggctacgttgcaaagagagtgcttgattacttggggtactaaccatcaaaggacgtctaagatcttctacttccatcccatgatttcccgcaaaactcatagataagaatgaatgtgtagcaccagaatcgaaaagcactgttgcaggaactaggttaacaaggaacgtacccaaaatcacatctggagcatcttgagcttctgcagcagcaacatggttgacacgggcctttgatgctggtgcggtagagttgctctgggcagggacaaccttcacgcgtcggggctttggacacatgtcagcgtaatgtcctgggtctccacagttgaaacacaccacgggcttgctgccttgctccctcttggcaggctgttgctgtgttggagctgcaacagggcgtggagcttgattacggaggttgttgccagcattgttgttgaagaactgacgctgcggacgaacaacagacgaagaacctccctgaggcatggactggggtcctaaagtaagacgcggcctctgactattcccctgttgtgccatgaattgagcaatctgacgtttcttctgttccatgcggttgtacttgtcctcctgacgaatagccttatccactaacttctggaaatcaggataatccccagtcatgagtgggtaagaaagctcatcattaagtccttccaagaacttctcctggcgctcttcatcagtgcgcacatcttccggagcataacgagccagacgattgaactcgtgcagatactccgtaacagagcgagacccttgagtgagcgacctgaattccttcttcttgagagacaccactcccgatggtatatgcgtcttccggaaagcagcggtgaactcaagccaagtgataggttcagtagtagtcctgttaaggcggaaatgatcccaccattcagaggcagggccatgcagctggtgtgatgcaaatgagaccttctcctgatcagtgcactgaagcaaatccaacttcttttctatggcgtgcagccagtcaccagcttcaacaggattagtggtgctagagaaagtgggcggcctcacacgaagaaattctgctaacttgttctggggaggtgcatggttatttccctggttctgctggttctggagttgctgcatcattatgttcataagctgtgtctgttgagccaggacttgggcaagtgtgggattctctccattgttgttgttgttattgttgttgttgttggggccattcccgttgctacgagtgagcaccatctggcatggacaggagcacaagaagagaaaccggggaaaactacttaagaccgagaattactttagcttttattgatcttaagtgagtttcattattacaaaactgaagattctcacaccactgaactcaccaactacctaacactcgaaagcaaacaaacgcacgcacttacatcccaccactgatgtaaatcacatgcgagacacacacaaccaaacttaaaacaagcaaactaacacaacgatctaagacaacgggttgacaaggcattctaagtcttccgggcatcggagttgattgaaggctcgttcggctcatcttcatcatcttgagttgctccccactcgatcttgtaatgggcgtgcttggattcttctacttcatcatcacttatgatgatgaccggaggatctgctagggctggggtaacttctttctccaccacacggacctttggcgccaattgataacgagggacaaataaagctctcttccttgcggtaagacgaatcctggccttctgcggtggtgcttctcccttcaacgcggctagttccttctccaaacgatccactttgtcttctagtttgcaaatcttaccacgattccggtcttcacgatcttgagctgctaacacagtctccgcacgggtttcatccatagcccacagcatctcaaccaaatgccttgtggtagcatcattctcaattccttcagtctcaaggtagctgccacgatcacttccctgtggttggcgaggatggtagcgatactcagtgtcggccaactgatcacaatagcgatcgcggagctctcctatggcgatccttgccacctcctgacacgcatggatgtagtttcttcctccagcttcgaacatcactgaggggatttcatcactattactgttcaaagtgactttgactcggcacttctcttcatgacgatcatgaggaatctgggcataaaaaggggcagtcccaaatcctatggcaaaggacatcgtacacaactcttggacaaatccctcaacaccaaacaagtactcaggcttgtagcgcggcatctaaagacaaatgaaaggagggagttaagacatttatccaattaatagcacaagtttttggattaatttgaataaagttggaaaatcaaagtaaaaagtaaaccaaacttgcaggataatttgaaacagttggaaacaaggccacaaattttgtacttttgaacaacaggttccaaaagaaataaaagaaagttataaattaacatgcgaaatttatttaattgcagcaagattaaataaagcaatattgtaaaacttttgctggtaaaatgagccattagtacagtaatagatgtacagtactaattacactggaataaattttgaatgagaaccattaaaagagattatgaagtgcatgtgccattagtttggtttaattaaaagagaaagggaggagaacagttctacttttccaatatttttagagggcttctatgggtaaccatttggcacaacctagggtcaaggaggctctgataccaacttgtcacgcccggaatttctatccaaaattccaaacgcttacatgtgtgtataccctcgtccaggaatcagccgaggcacacaataacaaattgataatagagtaccattattactctaattaataagcgaataaaatgtcattacagaggtagatagttcctctcaatcaataaagatctaagcagcggaaaataagataaacggcgcagacgactccactccacaggcaacttgaccagggctacgtctaatcctccacaccatcagcatctctgtagaactcttcctctgatgaatgattgcaaggtgagtatatgacatactcagcaagtcacacagcaaatatgcaaatgcacaaggataccaaaggatggcatagtagggtttcatttgcataaacagcatttaacaaatatttcagaaattgataaaacagttaagtattaattaaacagtattaatccaacgctacagaacataccctgttgcataggcccaaccgttctgaacaaccatcccggctgcacagttctatctccaaaccaggaatataccattccaaaccaggagctaatcaaattattaccagttataacatcttttattatgatgagaggtgtgagactaatcacgaaagacattgttagacccgcccataaccgcgggcacggctattcgaatagttttactctgatcagaggtgtaccactgtacccacaagacacagccccacatcatgtcaccatgtgcctcaataccaccacggtacctcggaaaggagctgtgacaataccccttgcataacacaatccaccgcaacgcaccattcctggatcataatcacccccttataaacaaggcatggactccccagcgacccctgtgggcttatctccgccacttctcagtctggtgccccgcaataaaccatgctatacaaaaggtaaagccgttgcccacgctggcttgtggttggcacggttaatgtttcacaaccgaaactcgtgaaccggtccttaattgtcatgagcacgactctcaaaaccatgtgctcacaacccaccattatcaagttttagttggcacagtaattaattaaccaatcacgattgaccatcgtgaactatcattaagccatcattaattaattaatagtgaatcataagttatcccaaaagtgtgctaatgtttctaagcatggctaagcaattatatctaatacatctagttgaaccaatatataaagcccaactagtcaagttataataacccaaggtatcaaggaataaagtaatcaagaacaaaagggctataacaaacaataggttaattccacccaatgacattcgaaaataaatgcaatagttgaatagaaacaatagctttaaacgggatcaacatgctcaaagggttgtttgggatctgtgtgacttgccttgctggccttggaattcttcaaattcttctcctgcgaaaacggactctccggaaacgtcggaatctaagcagaaaagagcaaaatcaccaaaacagcacataaacaagcatgaacagtacatgtggatatttttaacatgtagatctcaattttagaaaaatttagagacttgaaccaactaaatccgagctaagatgaattagttatgaatttttgaagattaaatcggattaaaacacttatatggattttaattgaattatgacgcaataatgaattatttttgaaaaggaaaaagggatttattgcgtcagcggctagggttttcggtggaccgggcgcacggcgacggttcacggaaacgaacggccgagatcgatccatccaaaacagacggccgagatcgatcgggtctacggcggctcacggcagacggccccgatgacgtcgtcgatgacgtcaccaccggcggcggctcgggcggcgcaaactcgccggcgaacaacggcgcttcggcacgaacggaggacaccaggatgtagagggcgacgcggcgaactcaccggtgaccaaaacgtcggcggaagagcaacggagacgaagaagaagcggcggcgaccttcggcttgacgacggcgacggtgctccggcggtcttcggcagcggcgaaggggctataacgtcccgccttccccaggccgggcccgcttacatctgatagctttcataggtcatagactgccctcacagaccaacacatgtcttttttgcacactttgtccacgcttaaccctggagttctttggagattggcttccggaaaagaagttgcaacttgttgatatgagtattctattaatcctattaagccctagaccgggatgttacaccctcaccccccttaagagagatcgacgccgccgtcgatcaaccctaggccaggaacgtcctctcttggccacgtccatgtgtccagtgccagcgcatgtgccatgctgtgtaaccactcccggtctacaccagacatgcgcaccatgcctgcgcccgtgaaaccgcgagagtcggctctgataccattttgtaacgtcccgccttccccaggccgggcccgcttacatctgatagctttcataggtcatagactgccctcacagaccaacacatgtcttttctgcacactttgtcctcactcgtgtgcacccacgaagaatttcccggtcggtcacccatcctaaattgctccaggccaagcacgcttaaccctggagttctttggagattatcttccagaaaagaagttgcaacttgttgatatgagtattctattaatcctattaagccctagaccgggatgttacaccccacttgtcacgcccggaatttctatccaaaattccaaacgcttacatgtgtgtgaaccctcgtccaggaatcagccgaggcacacaataacaaattgataatagagtacaattattactctaattaataagcgaataaaatgtcattacagaggtagatagttcctctcaatcaataaagatctaagcagcggaaaataaaataaacggcgcagacggctccactccacaggcaacttgaccagggctacacctaatcctccacaccatcagcttcactgtagaactcctcctctgatgaatgattgcaaggtgagtatatgacatactcagcaagccacgcaacaaatatgcaagtgcacaggataacaaaggatggcatagtagggtttcatttgcataaacagcatttaataaacatttcagaatttaataaagcagttaataattaagcagtattaatccaacgctatacaacataccctgttctataggcccaaccattctgaacaaccatcccggctgcacagtcctatctccaaaccaggaatgtaccattccaaaccaggagctaaacaaattattaccatttaaagcatttgttatcatgatgagaggtgtgagactaatcacgaaaaacattgttagacccgcccataaccgcgggcacggctattcgaatagttttactctgatcagaggtgtaccactgtacccacaagacacaaccccacatcatgtcaccatgtgcctcaataccaccacggtacctcggaaaggagttgtgacaataccccttgcataacacaatccaccgcagcgcaccttcctggatcataatcacccccttataaacaaggcatggactccccagcgacccccgtgggcttatctccggcacttctcagtctggtgctctgcaatgaaccatgctatacaaaagataaagccgttgcccacgctggcttgtggttggcacggttaatgtttcacaaccgaaactcgtgaaccggtccttaattgtcatgagcacgaccatcaaaaccatgtgctcacaacccaccattatcaggttttagttggcacattaattaattaactaatcacgattgaccatcgtgaactatcattaagccatcattaaattatagtgattcataagttatcccaatagtgtgctaatgtttctaagcagagctaagcaattatatctaatatctagttgaaccaatatatatagcccaactagtcaagttataataacccaaggtatcaaggaataaagtaatcaagaacaaaagggctataacaaacaataggttaattccacccaatgacattcgaaaataaatgcaatagttgaatagaaacaatagctttaaacgggatcaacatgctcaaagagttgtttgggatctgtgtgacttgccttgctggccttggaattcttcaaattcttctcctgcgaaaacggactctccggaaacgacggaatctaagcagaaaagagcaaaatcaccaaaacagcacataaacaagcatgaacagtacatgtggatatttttaacatgtagatctcaattttagaaaaatttagagacttgaaccaactaaatcggagctaagatgaattagttatgaatttttgaagatttaatcggattaaaacacttatattgattttaattgaattatgacgcaataatgaattatttttgaaaaggaaaaggaggattattgcgtcagcgggctagggtttcggtggaccgggcgcacggcggcggttcacgcgaacggacggccgagatcgacttgatccaaaacggacggccgagatcgatcggtccacgaccagctcacgggagagggcgacgatgacgtcagcggtgacgtcaccaccggcaacggcgactcggcggctcgggcgcgcatgctcgtcggcgaacggcgacgcttcggcacgaacggagggcaccaacgggtagagcgcgacgcggcgaactcaccggtgaccaaaggagcggcagaagaccaacagacggcgacggcgacgaggttaaaacggcggcggtcttccgcttgacgacggcgacggtgcttcggcggtctacagcgacggcgaaggggcggacgaggacggcgacgacttggcgaccacgacgacggtcttcccgagcgacggcgacgtctggaacggcggcggcgcacggctggagcgacggcggcgacggcggtgctagggcacacggcgctagggcgtttccgacgacgagaggcaaaggcgagggtggcggcgggtagaggagagctcgggggtccttttaaaggggctcggaggcggcggcaaaggcccacggcggccggcgacgagaaggaaagttcgggaaaatcgaatccgaaacaaactcgaatccacgaatttccaaacgattttagccggtgtttccaaaggagaaaaggtagaggagatcccggagattgattcccctctatcaattcggccggaaacggaaaggagcggccggatttggaaggaaacggcggcggcgacgcgctagggtttcgggcggcggcggcgcgaggtaaacgatgggtccgacaggtgggacccacctgtcagcgagcaaaggcgcgcgcgcgcggcggcggactgggccggattgggccgaggagagagagaagggaggttttgggccgactttcggcccaaagccaaaagaagacttttaaaacctttttccatttaaattatttcttaaatgcaattccatttattaaaaatacttccttagctcaaataaatcccagaaaaatctaggaattatagaattaagcaaagtatttaatgaaattttatctggccccattttatattggaatttattaattaaaattagatcttctcttctaggcttttaaaataaattctaaaaattccatttaaacaacaatttatatattttgaattttcagggtgtgacaggggcggacgaggacggcgacgacttggcgaccacgatggcgacctccccgagcgacgacgatgaccggaacggcggtggcgcacggctggagcgacggcgacgacggcggctcaaggttgcacggcgctagggcgcttccgacggcgagagacgaaagcaagggtggcggcgggtcgaggagacaccgggggtccttttataggggcaaggaggcggcggcgaaggcccacggcgaccggcgacgagaaggaaagttagggctcggagagagagagaccgatccgactcgacctcgaaaccaacactttccaaacgattttagccggggattccagaagagaaaaggtagacgagatcccgaagatcatttcccctctattgatttcaccggaaacggaaagacgcggccgaatttggaaggagacggcggcgctagggtttcggacggcggcggccagaggtagacgacgggcctgacaggtgggccccacctgtcagcggcagcgagcgcgcgcgagggcagctgcggctggacttgggccgacttgggccgagaaggagagagagcggttttgggccgactttcggcccaaagccaaaagagacttttaaaatcctttttcaatttaaattattcatgaaatgcaattccatttattaaaaatacttccttagctcaaataaatcccagaaaaatctaggaattatagaattaagcaaagtatttaatgaaattttatctggtcccattttatattggaatttattaattaaaattagatcttctcttctagacttttaaaataaattctaataattccaattaaacgacaatttatatattttggatttttagggtgtgacagtacagttgtacacctctgatcagagtaaaactattcgaatagccgtgcccgcggttatgggcggtcaaccagattcaccgtgattattctcacccaagtctagtctaatggaattgaatagtctaggtggatggttgggcctgttgcaacgtggggtagcgttggacagtgggtggttaatattgattaattattacaactgttttactgctttcaactactatttataaatgctcgctctatgcaaacgaacctctatagctatcccttgttaattccctgcatcatacccctattccggtatgacttgctgagtacagtgggtagtactcagtcttgctctattttccccaaacctcagagtttgagtatgcatcagatggtggcttctccgaggagtaggtttcgtccgtgccgtcgaggatgcctgtggagtggtgttcccgctgcagtccaagtcaaggcttagctccagttatcttttaattttccgctgcatttatgtaagattttatgatgtttgtaagacgtggatctgtttgtcaactttgtcgtttgtgtacccggccggtcctggacgggggttttaatgcacattctgcttggaatcctattcgggaatttctgggcgtgacactcggcaatcaggggtggcttctcgaagcaccaggagggcatcggaaggagggtattagctaagtgtcacatcctgatttttgtttcaggatttataaattatttaataaattattattagaatttatattaaatgttcattaatttacaagtgaagttaaatgtgggaaataaaattttcttaatataaagcatggatggatttaatttttattaaattctccatgattaattatactctctggaattttctcggatttttcggagctcaattcctaaatgatacaaagaacaattcagtaattatttgatcaataatgatctaattataattgttaagtgcttttcttgtttaaaatccttaaattataaattgttgtttaaaagaaattagcagaaatgattttaaaagcttaaaagagaagatctaattttaatttgctaaatctcaatataaaattgggctagataaaattttattaaatattttgcttgttcctctattttctagaattttctgaattgtttgagcaagggaagtatttttttaataattgaaacaacatttcaccatttattttaattaaaaagttccaaaacccctccttttaagttgttgggccgtttttggcccaactctctctctctctctctcccgcccgcggccgagccggcccagccgactcagccggcccagccaagccggcagccgccccctcctcctctagccaccgacatgtggggcccacatgtcggggtcatcccctacctccggccgactcaggccgagcccaagccggccgcgccgcgccacctcccgtctccgattccgccgccctcgctcgcatttgagtccgagtgtttgagggattttgatcccctcgtcctcctctatctttacccccaaaaatcggagctaatcgttgagtattttatccgaatcgaactcgtttttgagtttatctccaaaaccgagtttttgatttcccgatcgatttcttgcgggaggagtccgatctcttcaatccaaggctataaataggaccccctagtcctcctcttttgtttgccccctttcccgagctctctagtgccccgtggagtcaccgccgcgccgccctagtcgccgtcgtcgccggtcgccgctcagccgtgccgcgccgccgcttgcgtcgtcgccgccgccttttctcaccgccgttaggtgcgcgtgagggagagctagctcgtccgccccctctccgctgtcgtcggtcgccgtgaagccgccgccaccgtcgactgaaccaccgcgccgcatcctctcgtcgccggccaccatcggtcgtcgttgggcgcattggtgagtaccgttgcgttcgtcttgttgccctctacgcgttggtgccctcttttcgcccggccaaggtccgtagcgccggtggtcgtgccgcccgagccaaggccaccatggatgacgtcagcatgacgtcataacctttcctttttagttttttttatagatgaaatagattagatcttcagaaaaacatatctaaataaccgtagatccgtttcaggtggttcaagttgctaaatttttctaaaatcaagatcttcatgttaaaaatattgacgtgtactgtttatgcttgtttttgtactgttttgttaatttttgttctttcgctttattttccgacgttccggaggagagcgttttcgttgaggaaggttcggaagtgtttgcggaagcccaaggcaagtcacacagatcccaaataaccctttgagcatgttgaacccgtttaaagctattattttatttcaactatgcattatttttgaatgtcatcgggtggtgaacctttccccgttaattaatggccgaagatgatcttattttccaatgggttataatttgattagcatgaaccttatatattggattggttcagctaaatgctatatgtaagtttgcttagctatgcttagaaacattagctaactaaaggggttaattataaactatattatattatattattattatggttatatttaatggtcgctcacgatggttaatcgtgtgatgttaattaattgataattataacctggctaaggtgggttgtgagcatatggttttgatggttgtgctcatgacaattaaggaccggttcgcgagctactgttgtgaaacatttaccgtgccaaccacaaggcagcatgggcaacggctttaccttttgtatagcatggttcattatagtgtgccagactgtgaagtggcgagaagtccgtgggggtcgctggggagtccattgcctctggttttgagggggagattatgatccaggaacggtgcactgttttgagttgtgttgtgcaaagggtattgtcacgatttccccctttgcaatgccgtggtggtatttccgggcatggcaacatgtgtggaatcgtgtcttgtgggtacagtggtacacctctggccagagtaaaactattcgaatagccgtgcccgcggttatgggcgagttgagcaatgtttttcgtgattagtttcacactactcatcaatgttaataatgtgagaattaatttgactcctggtttggaatggataattcctagtttggaggtttgatctgtacgaccggggttggttgttcaggtttggttgggcctgagcagcatgggtgtgctgttcagtgttgattaaaattgatgattaattactctattgttttactactcttaaatctttgctaaatgctgcttttgcaaatgagcctatattatgccatcctttggaatccttgtgcacttgcatatttgctgtgtggcttgttgagtatgtcatatgctcattcttgcaataatcatcaaacctcagttgaagataaaggatccagaaggaaaagacgtttggcttataccccagttgagctgcctgtgggagtggagctgaagccatcgctagaccgttaattcctctgctgtttttcttttctttgtaagtatgtaacgttattattaagatggatttgtatattaaattgtcagtttgtgtacctcggctgattcctggacgaggattttatgcacaaattagttcggaaattactagtgaatttccgggcatgacactaagtaatcatataagtaggatgtatgtatactagaagtataggaataggatctttctattttcctttccacttagcttagatagttatgaataagagtataaatactttttcttagtgtcactctaccctttgaatgatattaacccctgcctagactttggttattacaagtaatatataattattagtgtggttctctctattataatcttcccacgggattactcaaatatgattcccttggaatactcttgggtgaaaagctacaatggtatttccatgcacttgcggatgaactctgtaaccataatataccagaagtatttctcaaccattgctaggaattatatttcgagtaatataccagaagcatttctggcgccgttgccgtggaagattcataaaaaagattactataactaatactttatatttacctctgtataatcactgtcctttgtaggctaaccttggttgttttcacttctattgtggaaatagggtagtgcatgactggttttaacttgccggaaaatttcaaggaaaatccagaagttttctttcagagcttcaagccgcgagtcgttgctccgcagaaaactcttccgatagagaaaccagccattcccacgccaccaacctttaagactatggctgacaagaccctccgcgaattcactgctccctctgctgacaacgtggcca

SEQ ID NO: 5346 - DNA, 18138 bp, Oryza sativa
agtgggcatacccgtcggcagcataggagagagaaggacgtgaagcagactttgtggttggagagaaggcaacttgtgctgggcgggagcaagttggctggcagaggaggagaagggatggaggagtggagatgggctggaagtaggagaaaaagacgggccggaaatagcccaagaaagcgatggagagtttaatttgtcgttcaatttaaatttaattaatttcttaaatgaacattgtgatattaaaattatttcttgagctctgaaaattcacaggaaatttcaaatagtactttagggcatgcagaatattaaaaaaaatatttctagctaaaattttgaatgaaaattttattttccacattattttcacttttaattagctttaacttttaatataaattgtagaaatttattatttaatgatttttagtcctgaaagaaaattgaggcgtgacatgttttccatgcaattaaaaatctatcatgtgtacatgtggtatctctgactgtgtattccttgtaatcaaaaaaatatcaaagaacataacgaaggatcaatattaagtgcacatcatctattatggatggattagttcaaaggtgccaaaaggtagagcaacaaaattaaaccgcacgtacatgcagattagtcagaaatttatgaaaataccttcatgatttaattacagatatggtggccgagagtggatatttctgggtgcaaacgaatttgtggattcatggatcaaagccttgagcccttgaccaacacctgtacgtgcacaatttttatggccaaagagcaacattggttgtgcgtctatgtatggttatgatattaatctacggtcacgatattgtaatgcatctattcaatggccagatttttttttgttaacatttgagctcgtagaatgtatccaagtagtataggtctagatagacagacagacagatagatagaaagatgtaagatagatagatagatagaaaggtgtaagatagatagatagatagatacattgattgatggatggattgatttagcatttttgaaaccaaataaaatgtaatttaatagaaagaaagaaagaaagaaagaaagaaagaaagaaagatagatagatagatagatagatactccctctgttccagaatataacaagttttagggttggacacagttattaagaaagtaggtagaagtgggtgatggagggttgtgattggatgagtagtggaagtaggtgggaaaagtgaatggtggagggctgtgattggttgggaagagaatgttggtagagaagttgttatattttaggacaaatccttaaggctaaaaattgttatattttgaaatggagggagtagatagatagatagatagatagatagattgattgatttatggatttatggacggattgatttagcatatttgataccaaataaaatgtaatttattattcgagaatagaacaatcaggatgaaaattttcaaaaccgatggatagaagtgatattaatcaattgtacacattatgatatgacaacaaaaatattgaagcagtaattcactatcataaaacaaacaattaatcataacaatttggaaaacctatgtttagaagtggctttaatataagataacttaaggataaggataaaacataccagaaaatcctcagcttacaaaagtaattaagtcaacattaatttcttccatatataacacctatctttggtctatatatatgaaccatggatcctgaagttcacactcatcaacattcaactcaatagtcacaataagacacaaaacaaaacatagtagctcactcttcacaatatgaagcacgcccaccttggactcatgttgttctgcttggttcttctagttttctttgctatccctgcacaaatacgaggcaattatttttttttgaatttgtatgttttttcatcattttctttgcactggcaagataataaacatatgactccttatgtctctaggtcaaagcacaagcagggccccggtgggagttagcattggagaacttaaacttagtgtttgcttttcggcccctccatcgtggtcttgctgttcaaaggacaacctgtgctatccatcacttgaggcatgcctggaaaagtgcaagtacgatgaataggcacgcagccgactcagaggctaagtgctccgatgtgtgattgaattggacacaatatttactaataatcatatatccggtatatttgggaataacatatgtatatgttccaacagatatgcattttctaaatccatattgaagcatatgagatgcgtggtgcttatgtttaggagttgttttcataatcaacaaaatataattccatattttcaatgctagaataaatattgggccaaaagaaaaccaagaatctcatttcataaatttcgttatcgcacataaagacccaataaattgagtctatgaaaaagagttgagcatgctagtgggcgtagttgctatagcgacactagacgtgcatggttgcgcttcccatgcaggttttggttttgcttcacgtggcatctttagcctcccgttcaaagatctctacatatcagaactttcagttttcctgaacttccatctccaaaatcacaaaactttctcttcaaacatatgaaaacattcatctgaaaatcacattactttccaaccgtatctaaaacttttatctaacaaatcataacaactttcaattcaactataaaactgtcatctcgaaattgcacaaactaatgattcaaattaaaaacttctaggcaaacttcataaaattttcaattgaaaaatccaaaaattttcatgctgtactcaaaatccctcttcctcctcaacgatcgtcatccttgtaataacgaccgcaattatgaccaagttgttcattcctgctattgccgctcctgcacggtgtgtggcagcagtggcgagggtggtgtctccatgtggcggctagcaactacaatgctgcccctggtggctagagttgaggagctatggcatgggtggtgcagcacaatatattaggcgaacttctccaatctgttgatatgtagatatggcacaaaatgttgaaggaacaacttcaacatgctagtagataatgccgtaagggcaattgtgaaagatctcgaatccacagacagcaagagcttagtccaaagctccaagaagatttaatccaagttgtgaaataggaacatccagttgtattggtaagttggtaaacggaagtaagctacaaacttgagggcatcgcctcaatttataggcttcaaaaccccatgtacaactcataaacaactatatgataactagatgacaacctatttgataagtaggatgttactcaaaacaatccatctattactcaatgacaccaagaacacaactcaaaggacatatatcttctagttctagcagtataaggacatatgcaatgacatcgtaattattgttaagccttcatgaagcatgtactatagatgcaaaactcaaattgccttcttgttcttagtcaaaaatcatattttgctcgtaacacttatactttttgaattggtcgtctaatgtccctcatcaatgggggtacgatatggccaaaggagttgacccagggatgaagcgcggctgggaacgtggacaaggatcatggcctgacacaagcgcagattgaagggcaacgacgagcagctctactgatgctgtcgattggaaacattgaagagagaaggaaagcagcgaacgaaggaataagaagagggatcatactcctctgccccccaccccgatgggctagatgggctctaaacatgcacctgtggtgcagctgtgccaaataggaatcttgcaatacatatactgcaaatcacattttaccacgaaagattttgctggtatcaatgtgtgccaccaacatattccagcactatgactgtccacatggcatgttgaacagtggggatagtcgtcaggcactacaagagatcttatgataggtgacattttatttatgtcataataacaaagagttatgtcatgttttgaaacctgtgactctcatgtgatgaaaatccgttcgtcacagatcatgcgtctcgaatcaggctctacgacgaaacatacttttttgtcattaatctagtgatgattcttctctcgtcattaactctgcattatcttgcaaaaaaaacacaaaatctcttgtgcctaccaaggtccatgtagtatgcaacatgtttatgggcctcagcccaattgcaagcccaattagattttgggcctaacctatataaaaagaagtattttattcactattttcatcccaattatattttatccaattttttttgtgtgaaataacaaatggttgaaccccatttcaaaagcccatataggcccaagcttatacaagcccagataacatccaatagcataaatccaatatacaatatggcacaagcccaacatcccatataactcaagctcaatgatatacgcacaaattcatagtctagaccttagtaaccacaacaggcttacttacatcagttaaacaaacaagtgtagtacatcttgaccaaattcagccacaaatcgaagagcaaacaaccacaagtctatttgaaaagataggtttagtcaatgagcaaacaaccacaacagcaccaccatatcctagatagcaaactaaagacatcactgaccatatctacaaagtcgagccacaagtaactgaccaaaacaaactcagatgtccaaaagttcacattcgctgaccatatcaaagttacatctccaagtgacacttttggcagcagccatctcacattatgaattggtaaggcaacatgaagaaataggcaaaccttactaggggggtgggaggggagagggccaaaagatggggtattcagaccaatcaaacaacggagaagggaatcggtctcctctgatgacttcttcaaactttcaatctcttgcaacttcagctcccttgcttcttctgaatcagctacctttttctttaaggaatccaactcctcctgctgaccatcaagcgtacctctaagatttgatgcgtcttacatctctacctcaagttcagcttcaagctcttgaacccgtgcaacgacaacacctttgccgcttctctttggtgcggttgactcaaggtcaacattctgaagaaactttgattttggcattacttgggaaatgtcacactcagaaaattctcgaaccagaatttctaagctgaatgtgcattaaatccctgtccagaaccagccagggtagacaaatgacaattgttgacatacagacccacgtcttacaaaaatataaaagattacaaatgcagcaggaaagattaaagcgagctaaaccgggaagcttgacttcagcagcgggcgagtccactccacaggcaaaccttgacggcagcaacgaaaccaatctctctgagacggctccactgagaagaacttcaactctggtgtgggggaaaagagagcaagactgagtactacccactgtactcagcaagtcataccggaagaggaagtatgatgcaagatataaccaaaggaagctaggggttcttttgtataaagcaggcatttcaaagcagtagttgaaagcagtaaaacagctgtagtaattaatcaatattaaccaatcactgtccaacgttacaccaagttgcaacaggcccaaccaaccacctgaactacaccagttcattaagctaaactaggggtgagactaatcacggtgaatctggttgatcgcccataaccgcgggcacggctattcgaatagttttactctggccagaggtgtacaactgtacccacaagatacgattccacacatgtcgccatgccccgaagtatcaccatgatactgcaaagggggaaatcgtgacaagaccctccacataacactcccctaaccatccacaccacgctaaggtttcacccccacccctcaaaaggcagtgggcggtcccctcttgcgccgcggtgaatccggcagctggacaaccgaacacctcggccgacccaactccatcacgcccaccctcgccaccggtgcctaggaaagggtcgagctatacttcagatcaagcagttacccactcccgcttgtggtaagcacggtaagtctcccagggtttcccgtgaaccggtccttaactgccatgggtgcgtccagcaaaaccatgcactcacagcccgccattcagaattttttaatttactgacacccttgcggtggcaccaatctaaagctatgccaatagtcagagtatatgtaataatgtgacccccatttgtgtactagttgaactaagcatggctaagcatttcctaagccaacatctagtattttgatacccaagttatcaatggcataaggtaaccaatatgtggctaaggaacaggacccatcccacattacattgtaaaagaatacaacatttaatagaaaaatgcgggatattggtaaattgggtacaatatgatcaaacgtattgcatgacttgccttgctctcgaactgatgagacctcagcaacgtcttcgagaaaccgcggatcgacgaaacggccgaaacctacacgacaaacaaagcacacaggcaaaacatgctataagactactgaaacaggaaacaaaaccatttttaatggattctttgcatttttcttgatttactgagacttgaatggacttaaacggacctcggatgaattacttatgaattttagaagataaactgtgtttttactaataaagaaaaagtccttaataaattattgcgcaataatacccagggctgacgtcatccaaggggggggcggcgccgataggcggagcccatgggtcagcggctcaaaggggagaggaagggggcgccggcatgtgggccccacgggcagtggctcaaggtggccggtctaccgtggaccgagaccacgcgggtggtccaccgccggtccacaggaccgacggtccggatcggctgggaggccgatcggacggcacggcggcggctaggcatggctcggctcagcttcaaaactggccgaccggccatggcaaccggcggtgacgcgcacggtcgccggcgacggcaatcggcggcgcgggaaacgacggcggacggggtacaggacggcggcgtcgaccaaaggcaacggcgagcgcgtggagagaggcggcgcaaacgagagagaggggaagagggagaaggggggatcctcaccggcgagtatggcggccggagcggaggatgaaggtggcggcgacgacctggcgatgaggaggggcggacgggcggcggcggcacctacggagggagttgagaaggattaggagtagagagagtgaccacggcggccaccattgttggccgggagacgaaggagaatggatagctcaccggtgtgcgaggagaaccgggctccggtggggtttagcggaaaccgagcggcggccgaggtggctcacgcggcggcaatgctaatggcggcggcggcttggcgcggcggcggctctagcggcccggcgcgcgaccggaggtggcggcaagcggcggcgctagtggcgagcggcgcggcggcggtaggtggcacgggagagcgcggcgaaaagaggaaaagggagagggagatgcggggaagctttataggggctcgagaggggtggacatggccgggaaaccccccgatttggccggcgacgtgggggaagagagagagagtgggggggattcaaatcgaatcccgcccatttgcgggcgcgcgtgcgggcgggaatggcggggagggcggcgacgtggggacgcggagtaggggcgcggcgcggagcggagaaggcggcggcgcggacggtttcggcggcggttgccgtcgtggagcgggcggctggaggaaggggacgacttgacaggtgggccccacttgtcagcgtcccggagagaggggaaaggggaacgggccggcccaaaggaaggaggccgagcgcgggagggagtgggccgacggtccaatagggaaaaatgaaggaaaagaaaaagaaaaagaagaaaggatttttcctgggatttaaaattgcactttggtgatttttagttggttaaaattatttccaaggctctgaaaattccactaaaaatcttgttaatgcactggagcatggggaactcaagaaaaaattccaccacgctaattccgattattaattgcatttattaactagggatttagctctaggttaattaagataatttcttcgggcaatttatttaaccaatttttaaagcaagaaaagggggggggggaaacttcagggtgtgacaaacctaccccccttaaacggaatctcgacctcgagattcggaatggctggcgaagaggtgcgggtgggtggccttcaactcatcttctctttcccaagtggccacttcttctgagtgatgactccactgaaccttgcagaatctgattactttgtttctggtccttctctcgctggtttcgaggatacgagtcggcttctccacatacgtcagatcttcctgaatttcgatgtgatctggacttgcctgttcctcaggaactctcaaacatttcttcaacttagagacgtggaacacgttgtggatgccaagcatgttggagggaagctcaagctggtaagcagcttcacctctacgttccaagatcctgtatggtcccacaaagcgtggtgccaactttcctttggtttggaagtgatgtactcccctgagcggagtgacacggagatacacataatcccctgtttcgaaagcgagctcccttcggcggttgtctgcatagcttttctgccgagattgcgcgattctcaatctttccctgacagctctgactttctcttctgcctcatttaaaacttctgtaccaaacaactggcgttcccctgtctgatcccagaagagcggagtacgacaccttcgtctatacagtgcttcaaacggtgccatctgcagactagcttagtaactgttgttgtaagagaactcagcatacggcaagcttttgtcccatgctccaccaaagtcaagcgcacaggctctcaacatatcctctagtatttgattgactcgctcggtctggccatctgtttgtggatggtaagcagtgctgaaattcaaccgggttcccaattcttcttgtaatttctgccagaactttgaagtgaattggcttcctcaatcagacacgatcttcttaggtacatcatgtaaacacataattcttgccatatagagttctgctaatttcttccctgagtaggtagtgtgcaccggaatgaagtgagccactttggtgagtcggtcaacgactacccaaatagaatcatgccctgatgacgtcctgggcaaaccggtgatgaaatccattccgatttcttcccacttccattctggaatctgaagtggctgtagcaaacctgctggcctttggtgttctgcccttactcgttgacagacgtcacagagtgctacgaattcagctatctcccttctcatgttgacccaccagaacttttctttgaggtcttggtacatcttagtactaccgggatgaatggaatactgagtttgatgagcctcggttagtatcaagtcttttaattccttgttttcgggtacatacaatctttctcccatccagattgttccttattcatcctcaacaaaacctcgggcttttccaactctcatgttctttttgagctctgctatttcaggatcacttgcttgagctatgcgaacctgctccaccagtgtgggctgtgcctctagggcaaccacgaatccgtgctcaactataccaaggttcagatgttccaaatcgcgttgaacctcacaacatagttgctctacccatacaacattgcagtagctcttcctgctcaaggcatctgcaaccacattagccttgccgggatgataatgtattcccatatcataatccttgatcagctccaaccatcttcgctatctgagattcaaatcaggttgagtgaagatgtactttagacttttgtgatctgtatatacctcacaacggttaccgatcagatagtgccgccaaatctttaaagcatgaacaactgcggccaattccagatcatgcgtcgggtagttgccttcatgaggacgcaactgccgtgaagcataagaaaccactttgccatcctgcatcaacacacatcctagcccctggcgagatgcatcacaatagactggaaatctttcgtctgatcaggcaggattaagactggtgcagacaccaaccgtcgtttgagttcttcaaaactcctattgcattcagcagaccagataaacttttcttccttcttcaatagttgtgtcattggcttagcaattttagagaagttctcaatgaaccggcggtaatagccctcaagtcctaagaaactccaaacctgagtgactgtccttggtggggtccatttggtaactgactccacatttgctggatccacagctactccttgagcattcacgatgtgaccgagaaactgaacttccttaagccagaagtcgcacttgctgaacttggcatatagctggtgcttttttaacttttcaagtaccagccggagatgctgctcatgttcttcctcggacttggagtagataagtatgtcatcgatgaaaaccatgacaaacttgtctagaaattccataaacaccttgttcatcaaattcatgaagaaggcaggtgcattagtgagtccgaaagacataactgtgcattcgaacaacccgtaccgagtggtgaatgttgtctgtggaatatcctcttcgcggatcctcaactagtgatagcctgatcgcaggtctatcttagagaacacagtagctcctttcaactgatcaaacagatcatcaatccttggcaaaggatacttgttcttgatggtgacctcattgagtgcgcggtagtcaacgcacatcctcttggttttgtctttcttctccacaaagataaccggagcaccccaaggcgacgtgctcgggcggatgtatcccttctgtaactgttcatcgacttgcttcttgacttccgccaactcgttggctcccattctgtaaggcctcttgtggattggagcagttccaggtaccaagtcaatccggaactcgatatccctttttggtggcattgttgtcagatcgtccggaaaaacctctggatactctctgactatgggaatatcctccagcttcttagtggttttctccactgctacctcttgttcttcaccagcagcctggtttaaactaatccctggcttctgcggcactggagactggaaggttaccacctcttcttttgcattggtcaacttgatggtgcggctggcgcaatcaatcactcctctgtgccttgtcaaccaatccattccaagtatgacatctaggtccttggattcgagaagaatgaggttggctggaaaaatcaacccttgaatttcaactgtcacagatgggcagtagtgagttgtggtcatgccacctccaggagtatgaactcgcattggtatcttaagcttcactaaagataacccatgtgcaccagcaaaacgcttggaaatgaaggaatgggttgcaccagaatcaaacaatattactgccggtgtcgagttgacggggaatgtgcccaatataacctctgttgctgactgcgcctcctctgcagatgcatgattgacacgggcctgaacgaacttgggtccagcacgtcttggcttcgggcactttccaaccgtgtgtccgggtttgttacaattgaagcagagttcgggtttttctcccaacctcttgggctgttctggcagagctggctgaactgattgagctggaatctttagtgaactcggagtagggttgaggctgtgctgctcactgttgttgtgactgccactatggtggttcttgttgaagcttcccgggtggtagggacggtgctgccggataatcatggtggaaggtccaccgtgacgtcccatcgtgaaacgaggcttctgactcttcccctggggagtcctgaactgagctgccttcctcttacggtttattttgttacagtgctcctcctgacggatagccttatccaccagcttctcaaagtcctcataatctctagagatcaactggttagtcaattcatcatcaagaccagacagaaacttctcctgcctcccgtcatcggtacgcacgtcctcaggggcgtagcgtgcgaggcggttgaactcatgcaaatactctataactgttctggttccttgttgcagggaacggaactctctcttcttttgtgccacaattccctcgggaacctgtgctttattgaaactatgacaaaactctgtccaagtaacctctgccccagttggacgggtcaccatgtagttgtcccaccaaacagaagcaggaccttgcagctggtgtgtagcaaaagcaaccttctcttgctcgttgcattgcaaaagattcagcttcttctcaatggcatgaagctagtcgtgggcctcgatttggttggtggtgcttcagaaagtgggcggcttgacacaaagaaattctaacagtttggactgaggaggtggaggaccaaactgcaggttctgctgctgctgctgtgcttgctgctgcacctgctgcaacacctgatggtactgttgctgcatctgttacatcatcattgtcatcatctgagtctgattgtccaacacctgggcggtggggacggactgttgtcagatgcactgttggcacgtgctccattgatcggctcttcgctgccactggcgttgttggagtcgcgtgaaccattccttgtctccatctgaaggggataggtagaaatatgagaaaaggaagaaaaacagggggctcagaaactaatctttcttataaatttaagtgtaattatcttaatcttgattaaaacactgaaaaagaggcacgtaactcctaattgaggcagtcataccactgacatatgatatcgaccgccgactaatccacaagcaacaaacctaaacacgaaaactggcaagcaaacagactaagaaggtcggggcggcgactctgaagctcggggcggcgcttgcaaacgagggataggactgacatctaaagtagacaagggataggaaccaattcatgctcaaatccaaattaaacaaagcaaaagaagactcaaataaataaccgagcatgatgatttttatgcatagaacaacatttttcacgaaccgagacaaaagacactaatgcaactgactaaacaataacttaatgcatgaaatagatgcatagtcatactgatacgcataaacttaccccaccgaacatagacacgacctaatgcatatcacccgacaattcccgaccgactgccgaataaattccgaataaacttttactaaatccctagactgtccctagtcgagaaatccaattaaataagcgaccaagatttttcccacaaatcaaaagaacaaaccccaaaattttcccgaaacaaaatccaagtgcaaaagggcatatgcatatgaaaaaaaagggttcagagggctcttaggtttctagttggcttgtcctacggtcaaggtcggctctgataccaacttgtcacactcagaaaattctcgaaccagaatttctaagctgaatgtgcattaaattcctgtctaggaccagccagggtacacaaacgacaattgttgacatacagacccacgtcttacaaaaatataaaagattacaaatgcagcgggaaagattaaagcgagctaaaccgggaagcttgacttcagcagcgggcgactccactccacaggcaaaccttgacggcagcaacgaagccaacctctctgagacggctccactgagaagaacttcaactctggtgtgggggaaaagagagcaagactgagtactacccactgtactcaacaagtcataccggaagaggaggtatgatgcaggatataaccaaaggaagctagggattcttttgcataaagcaggcatttcaaagcagtagttgaaagcagtaaaacagctgtagtaattaatcaatattaaccaatcactgtccaacgctacaccacgttgcaacaggcccaaccaaccacctgaactacaccagttcattaagctaaactaggggtgagactaatcacggtgaatctggttgatcgcccataaccgcgggcacggctattcgaatagttttactctggccagaggtgtacaactgtacccacaagacacgattccacacatgtcgccatgccccgaagtatcaccatgatactgcaaagggggaaatcgtgacaagaccctccacataacactcccctaaccatccacaccacgctaaggtttcacccccacccctcaaaatgcagtgggcggtcccctcttgcgccgcggtgaatccggcagctggacaaccgaacacctcggccgacccaactccatcacgcccaccctcgccaccggtgcctaggaaagggtcgagctatactttagatcaagcagttacccactcccgcttgtggtaagcacagtaagtctcccagggtttcccgtgaaccggtccttaactgccatgggtgcgtccagcaaaaccatgcactcacagcttgccattcagaattttttaattaactgacacccttgcggtggcaccaatctaaagctatgccaatagtcagagtatatgtaataatgtgacccccatttgtgtactagttgaactaagcatggctaagcatttcctaagccaacatctagtcattttgatacccaagttatcaatggcataaggtaaccaatatgtggctaaggaacaggacccatcccacattacattgtaaaagaatacaacatttaatagaaaaatgcgggatattggtaaattgggtacaatatgatcaaacgtattgcatgacttgccttgctctcgaactgatgagacctcagcaacgtcttcgagaaaccgcggatcgacgaaacggccgaaacctacacgacaaacaaagcacacaggcaaaacatgctataagactactgaaacaggaaacaaaaccatttttaatggattctttgcatttttcttgatttactgagacttgaatggacttaaacggagctcggatgaattacttatgaattttagaagataaactgtgtttttactaataaagaaaaagtccttaataaattattgcgcaataatacccagggctgacgtcatccaaggggggggcggcgccgataggcggagcccatgggtcagcggctcaaaggggagaggaagggggcgccggcatgtgggccccacgggcagtggctcaaggtggccggtctaccgtggaccgagaccacgcgggtggtccaccgccggtccacaggaccgacggtccggatcggctgggaggccgatcggacggcacggcggcggctaggcatggctcggctcagcttcaaaaccggccgaccggccatggcaaccggcggtgacgcgcacggtcgccggcgacggcaattggcggcgcgggaaacgatggcggacggggtacaggacggcggcgtcgaccgaaggcaacggcgagcgcatggagagaggcggcgcaaacgagagataggggaagagggagaaggggggatcctcaccggcgagtatggcggccagagcggaggatgaaggtggcggcgacgacctggcgatgaggaggggcggacgggcggcggcggcacctacggagggagttgagaaggattaggagtagagagagtgaccacagcggccaccattgttggccggagacgaaggagaatggatagctcaccggtgtgcgaggagaaccgggctccggtggggtttagcggaaaccgagcggcggccgaggtggctcacgcagcggcaatgctaatggcggcggcggcttagcgcggcggcgactctagcggcgcggcgcgcgaccggaggtggtggcaagcggcggcgctagtggcgagcggcgcggcggcggtaggaggcacgggagagcgcggcgaaaagaggaaaacggagagggagatccggggaagctttataggggctcgagaggggcggacatggccgggaaaccccccgatttggccggcgacgtgggggaagagagagagagagtagggggggggattcaaatcgaatcccgcccatttgcgggcacgcatgctggcgggaatggcggggagggcggcgacgtggggacgcggagtaggggcgtggcgtggagcggagaaggcggcggcgcggacggtttcggcggcggttgccgtcgtggagcgggcggctagaggaaggggacgacctgacaggtgggccccacttgtcagcgtcccggagagaggggaaaggggaacggaccggcccaaaggaaggaggccaagcgcgggagggagtgggccgacggcccaatagagaaaaaagaaggaaaagaaaaagaaaaagaagaaaagatttttcctgggatttaaaattgcactttggtgatttttagttggttaaaattatttccaaggctctgaaaattccactaaaaatcttgttaatgcactggagcatggggaactcaagaaaaaattccaccacgctaattccgattattaattgcatttattaactagggatttagctctaggttaattaagataatttcttcgggcaatttatttaaccaatttttaaagcaagaaaagggggggggggaaacttcagggtgtgacaaacctaccccccttaaacggaatctcgacctcgagattcggaatggctggcgaagaggtgcgggtgggtggccttcaactcatcttctctttcccaagtggccacttcttctgagtgatgactccactgaaccttgcagaatctgattactttgtttctggtccttctctcgctggtttcgaggatacgagtcggcttctccacatacgtcagatcttcctgaatttcgatgtgatccggacttgcctgttcctcaggaactctcaaacatttcttcaacttagagacgtggaacacgttgtggatgccaagcatgttggagggaagctcaagctggtaagcagcttcacctctacgttccaagatcctgtatggtcccacaaagcgtggtgccaactttcctttggtttggaagtgatgtactcccctgagcggagtgacacggagatacacataatcccctgtttcgaaagcgagctcccttcggcggttgtctgcatagcttttctgccgagattgcgcgattctcaatctttccctgacagctctgactttctcttctgcctcatttaaaacttctgtaccaaacaactggcgttcccctgtctgatcccagaagagcggagtacgacaccttcgtctatacagtgcttcaaacggtgccatctgcagactagcttagtaactgttgttgtaagagaactcagcatacggcaagcttttgtcccatgctccaccaaagtcaagcgcacaggctctcaacatatcctctagtatttgattgactcgctcggtctggccatctgtttgtggatggtaagcagtgctgaaattcaaccgggttcccaattcttcttgtaatttctgccagaactttgaagtgaattggcttcctcaatcagacacgatcttcttaggtacatcatgtaaacacataattcttgccatatagagttctgctaatttcttccctgagtaggtagtgtgcaccggaatgaagtgagccactttggtgagtcggtcaacgactacccaaatagaatcatgccctgatgacgtcctgggcaaaccggtgatgaaatccattccgatttcttcccacttccattctggaatctgaagtggctgtagcaaacctgctggcctttggtgttctggccttactcgttgacagacgtcacagagtgctacgaattcagct

SEQ ID NO: 5347 - DNA, 9524 bp, Oryza sativa
ggcggcgcacagggcggcggcggcggcgcacagggcgcggccggcggcgaggttgcagcacatcacaaagagtgagaggtattgctccatctccaatactccaaatgtgcctggtgatttgtgaatgaaattatgaaacagaagattgtgatctatttcagtgtatatttcagtgtatatttggtagatttggtagtacatagcacatagcagcagattgtgatctattattgaattatgttatttgtggacagaatgtcgaaccctgctgccaccgttgagtcacaagttgcattgacaccatcttccactcccactccaaccaatgctccaagcgtcgaaataaatgattcacaaggtacagaagtagaacatgataataagagactgaaatctgcagcatggcaagattttgttaagaagaaaataaatggtgcgtggaaagctgaatgcaaatggtgtcacaacaagcttggagctgaaagtagaaatgggactaaacatttgttagaccatattaaaacttgcaagtctaggcaggctagaaaaggtctaacacaatccaatttgaagatgggaatagatgcagaagggagggttaccgtagggaaatatgtctttgatcaagaggttgctaggaaagaacttgcactgatgatatgcctccatgagtacccactttctattgtagaccatgttggttttcgtaggttctgtggtgcattgcaacctttgttcaaggttatgaccagaaacacaattaggaaggatattattgacttgtttggggttaacaagatttctatcagtaattattttcacaagcttcagagccgtgtggccattactactgatttatggacagcaactcatcaaaagaaaggatacatgttgaggagggtgttggaacttcagatggagttaatgcttcttcaagtgttgcccctccagggggatttgatttggtggatgatatatttgatcagtatatgtctggacaaactgttgcctcttcctcacagattcgcactgagttagatttgtatttagaagagaaaccgttgcctaggacacaagattttgatattatcaattggtggaagtttgggggcattaggtacccaactttgagacagattgcccgggacattttggcaatccctattacaacagtagcatctgaatcagcatttagtactggttggagggtgataactccaaatcgtaatcagcttaaacctaatcttgtggaggcacttatgtgtgtgcaagcatggggtcgtgctgatatgttaggtaatttcatttttgcttttgtatcgttcaagtttaatttgtcctttcatgtttcttccatttcatctaattgcaaatcacattatatgttgatagctgaaattgctaacaagaccaatgcattgaacacggtacttgacgatgaatcagaatcggtatgtcctacactcccactttattgtttttattactataatatacaatgcttagttgcttcctctaattttgatttcaggaagcatctactgtcactgaagcttgaggtggagatttcataagtgaaggatgggctagaaagcctgcaattgcaaactatctacctatatattttattatgttggcaatgtaatagtatattaagacttctatatttctgtgagactgaatttgcttgctgtgtgtgatgtgttgaacaattcaactgttgaactttgaaggcttgattcgcttgaacagttgaactcatgtgtgttagtgtgtaactgtgtgaaatgatggatatcatcaatgtgttcttgctgaatttttatgatgaaattgaagtattcatgctatttttgatggtgtgttaattatgtacaatatttctttttgatgaaatgatgattgtgttgtattttttgagctgattggattgagatgctacccaatgcggggccccggtcgggttgcggggccccgcaggggtcgggggcgggggatgttttcaacccgcatcactggtcggggccgggggcggggggtgaagtcgggggtcagggtcgggggcgttccagcccaacccatccccaccccgcccggtggccatccctaactacctttccactattcgcacgaggtgcactactacaacaaaacaacccaacggagacatcttatttgtacgataaagacgttttatctcgtctcctacagataactgagacgcttttataaatcgtcgtaggaacgtctccgtttgcaccgtctcaaaattatggaaacgctttttaaagcgcacctatattatttaagacgttgctagagacatgtaaattgcatctctataaaatatagagatgcttttatagaagcattaatataggcacgcacatcaagcattaatatttgcagattgcaaagttcatgcactaaccaagtcattaacgtgaacaatcttaaaggtaaatagatagttttttttatattgcaactctgcaaacatgcgtcctatagcagatactcttcttttttaatctgagactgaatattaaatattcatttttttttctaaataattataatattattataatggtatttaatgatgacgattaggaacagtgtgtttttttcttctttctctatataaataattatatattatctaataacgatgacacggatataataaaaacgtctcaaaactcatttctacacatgagacgttccaaaacgtctcaatattcctctctaaacgatttagttttgtgctaacctgtaaagcgtcttaaactatgtcctcaactaataaagcgtctcaaatatcgtccctattttaatttttcttataaaaaagagacgacttataaaatgacttaagtgaaacgtcttaaaacaatagttttgttgtagcgcgcgtgctctgcttcttcttgtatacggaaccactataggatccagtaatttattcttaatccgttcatcaagtcaatctcctacataggctgctatgttgcaaagcaaaagcatatactagtatattttaaaaagcgatttcatggacagacgatttggcatgcattatataactactctgagtacagccaggccagtgtttgtcacatggctgatggctcagatatacttttatgtcatggacgttgctggtttgagcaagtcggatgattaatttgatcgatccgacggcagtatgcatatgatgatgtgataagccaactaccacagagaattattagtgaagagtttttcactagtgactcagtggtattattggcccagttcctactgtataagcgaggatttattcgaggaaagagggaccctatatcataccattacccaccagttatcatcgccatctctagctctctcacacgttcgaccacagtctcgtcaccaccatctcccttacacgcaccattttcttcatgatcaccaccatctcacatctttatctattataaaaattaaagatatttttgcctatttttcatacgtcatctcagtccgattccctccccgtatgcgcccgattactcctagatcacccgtataaaaaacatgcaaggattacgtattttctttcttaaagcttttcatccgtcatcgatctcttgcgtaatcaaattcgctaattggctttcaatagagccttcgcccgccgcttgtgccatcatgcacagcataaggcagtccaaatcgatcatgtatttcataatgtaacacagcctaatctctgtccccacggaatgccccagtctttcctcagaccaactttgtcacgtattaatccatccacagccagcataagccgccgcctacgataactgatcttcataggtggctggtttaagatgggactggataaaaactcgtggcttgttagctcgctcggctcgtgtctatctcgactcgacttggctcgccgaaccagagttttagctcgttagctataacgagccagctcgagatggctcgcgagccgctcacgagccatgaaaacatcagaccgagcagccccggatgacacctatccaaaccatgtaagcccaactaggccacggtagtacagtgcacatcctatattcagttaataaaggcgacagttgcggctcggcaacagaaaaaagaagagaaaaaagaaaaaagaaaaggagagaagaaacggtgagactccctcgatcccttctctgatgtcgccattcgccgccctgcgcccctgccgctcgcgctatccgctgtctgccgtcgctccctgctgttccccactgtcggagcaaaggagatccggtggccatcaacctgaggctgccggatctggcgccgttgacctcatggctaaccactggatttggtgttccatccgtgacaaagggacggtggtggccatgaggagaatttgttggccaacgaggagggagacgctggctggcggtgatgtaggcggcaacaccgtggcgcggtaggaggtgatgccagctcgttatcctaagccggctcggtatccaccctagtttaaggtgatgccggctctaatgcatcttcgttgggagcacctttattaagccacctgtggtaattttatatcagaggcgaaacctcaaatgtatcttcgcatggtggcctgctatcaaatcccttgtccacaaattacgtagacgggtgtttgcgccgaaattttggcctgccttaataaaatagctcgcgtagtcgaaactcatgtaacacacactggtggagaaaccatctttcgtcggtcggccgatttccacaatagtcccggatgcaataaaaaccggtgctaaagatgatctttagtcccagttcaaaagggtaacgggcatatttgatctttagtcccggttggtaataccaaccgggactaaatatcatctttagtcccggttcgaatgctgtcagggcatgtcgggccccccgggatctttagtcccggttggtcgtaactttagtcccggttggtattaccaaccggggctaaagatcctggtgatctttagccccggttggtgctaccaatcgggactaaagtcccacccctatatatatgtcttcttcctcctccagctgcccgagcaagcttcaaaatttcttcaaaaaagaggggaggtcatgccaaaatttttattgaatttattttgatgattacatacaaatcggaggtgcctaaaaggtttgcaacttcatcgtccaatgtttttttttgtcatactacatttgcacctatgttttgcacactttttttgtctccaaaatttagttgtaagttgatgagagagaaaatgtgtgtggggaagaaagaatatatagaaatttagttcatttgctaaacaaggttttataaaatagttgagaaggaaaactctagtgaaagttaatcttaaataatagaaaacaaactaaaatgaaaattaaaagaagtaaaacacattaaaattagtttaaaactttacaaatagtttttaagaattatttggtgtaatattttatgatttttgtatgaataaagatatcttataattataattattgtatgactgtcattattgtaagaataattatttgtgtacggtttttttttactcatgtagatggatcggcaatggatgtacactgaccggcggtccaaagagtttattgacggcatgcactattttttgagagtggccgaagctaacaggcaaaggggttttatttgttgtccatgcaataagtgtaagaatcagaaggagtattctgcatccaggactattcatttccactttattgagtcggggttcatgccaagctataattgttggacatcccacggagagcaaggtgttaaaatggaagaagatgaagtggaagacgacaatattccggactttgctcagtatgttggatttgaagaaaatcaaacgggtgaggaggaaatagctgctgatggtaacgacgttgcggatgatcttggtcagatgttgcaggacgccagggaggactgcgaaagtgaaaaggaggcccataaattggacaagatgttggaggaccacagaacttcgttgtacccaggttgcgagcaggggcacaaaaagttggataccactctggagttcttgcaatggaaggcaaaaaatagggttagtgacaaggcatttggcgatttattgaaactcgtcaagaacattcttccggggggaaacaaattgcccgagacaacgtacgaggctaagaagatagtctgcccgttaggactggaagttcataagattcacgcatgtccgatcgattgtatcctatatcgcggtgaggagtatgagaacctagaagcatgccctgtatgcaaagcactacgatacaagattagacgagatgatccaggagaagttgacgggcagctaacaaagaagagaattcctgctaaggtgatgtggtatttccctataataccacggctaaggtgtttgttcaggaacaaggggaatgctagaatgttgcgatggcacgctgaagagcgtcaacaggacgggatgctgagacaccccgccgattgttcgtagtggcgaaacatcgacagaaaatttaaagaatttggaaaggacgcacaaaacatacggtttggtttgagtacggatggcatggatccttttggagagatgagcagcggccatagcatttggcccgttacgatgtgtatctataacctccccccctggctatgcatgaagaggaagtacataataatgccgattattattcaaggcccccaagcaccctggtaacgacatcgatatgtacctaagaccactggtcgaagatcttaaacagttgtggaagaaagaaggtgtccccgtgtgggacgaggacaaacaggaggagtttaacctacgagcgctgctgttcgtaaccatcaacgattggcctgcacttagcaacctatccggatagtccaacaaggggtacaaggcttgcactcactgtatggatgaaacataaagtacgtatcttaagcactgtaggaaggttgtatacatgggtcatcgtcgattccttgcagcaaactacctggtacggaagaaaggcaagcacttcgaacataaggccgaccaccgtacaaagcctaaacatcgcagcgggaaaacagtgtttgctatggttaaagatcttaaagtagtgttcggaaaggggcctggaagccagcctatagagagcgaagatggtcacgcggcgatgtggaaaaagaactctatattttgggagttaccatattgggaattcttggacgtacgccacgcaatcgacatgatgcacctcactaagaacctttgcgtaaaccttcttggcttcctaggtgtatacggaaagttgaaagatacactggaagcacgtaatgatctgaagcatatggaacaacgcggcgaccttcacccggaaccaaaggagaaaggaagccattacttgagtccagccagctacactcttagcaaggcagagaagaaagtatgtttgaatgcttggagagtataaaggtaccgtctggatattccacgaatatcaagcgaataataagcacgaaggagaagaagttcacaaacctaaagtctcatgactgtcacgtgttgatgacacaactgctaccagttgtaataaggggtatccttccagacaatgtccgggcaacaataacaaagctatgtgcattcatgaacgcaatttcgcagaaggtcatcgatccggatatattagaagcccttcagaataaagtggtgcaatgtctcgtcagttttgagttgatatttccaccttcatttttcaatataatgacgcatctgctttatcaccttgtgaaagagatccgtattctcgggcatgtgtacctacacaacatgtttcctttcgagaggtacatgggcgttctgaagaagtatgtttgtaaccgtgctcgtccagaggcaagcatcgccaagggttatggaacagaggaggtcatcgaattttgcatagaatttatcgaagaccttcgcccaatcggggtacgtgaatcacgccatgaagggagactacggggaaagggaactctcggaagaaaagcaataatgacggtagacaacaatttattccgtaaagcccatttcactgttctgcaacactcttcattggtagctccttacatcgaggagcacttggctcaatgggtacacattctacacgagagcccaagacatgaagagcacgaaccaaaacagcgttgttcgtgtcgatgccatgggacacgatggaacaactggcacgtattacgatgccatcgaggatatatgggaacttgactatggtcctctcaaggttcctctgttctagtgccaatgggttaggttgactggtggaggcgtaatgattgatgacagtggtatgacaactgttgaccttaacaaggttggatactcggacgaaccttttgtccttgccaatgatgtaacgcaagtctttttcgtgaaggacatgtctagcaaaggaaagaagggcagagggcctaatgagcctaagcgtcaagtggttatcccaggcaaaagaaaaatcatcggagttgaggacaagactgacgaggattacgatcagttggatgggcaaccccctttcacggtgacgattgaccctagcatcctcctatcaaatgaagacaccccttactcacgcagcgatcacaaggagggaacaatagtgaggagaaagtatgtgcggtcaaccgtcaccgccgatgtaatgccgtaattattgtgtacacgatataaactattttggatgtattgattatccatataaatcaattgatgtatggcataatttactatcattcatatgctacatttaattgaatatcattcatatgctaattataattaactagagaatttttaaaagtattaaatcattcatgtggcatttacagatgttaattagagtttttcacaatttaatttactatctttcataggctacttatatatgactattcgaatttttaaaaggtttaaatcatgcatgtggcatttacatatgttaattagagtttttaacatttaatttaatataattcctacgctaagtatatatgatgattacaatttttattaattttaaatcatgcagtatgtacatacaaatcttaattagagtttttaccaatttaataatatcattcatatgctaagtatatatgattattggaatttttattaattttaagtcatatatttgcttattacgatttatccacttaatttattacagacaaaaataatttttcgaagtaattgtcattaatctttgtaatttaaataatgttaatgcattaacttctattttagaaacacatatgtaagcgaaaataatatgcagtgctataatctttagtgccggttcttaaccctaaccgggtttaaaaagaatttagaaatagtgggaaaatatctttagtcccggttgatgattactcccggttgttctcatca

SEQ ID NO: 5348 - DNA, 38908 bp, Oryza sativa
cccgatttggccggcgacgtgggggaagagagagagagagtacggggggggggattcaaatcgaatcccgcccatttgcgggcacgcatgctggcgggaatggcggggagggcggcgacgtggggacgcggagtggaggcgtggcgtggagcggagaaggcggcggcgcggacggtttcggcggcggttgccgtcgtggagcgggcggctagaggaaggggacgacctgacaggtgggccccacctgtcagcgtcccggagagaggggaaaggggaacggaccggcccaaaggaaggaggccaagcgcgggagggagtgggccgacggcccaatagagaaaaaagaaggaaaagaaaaagaaaaggaagaaaagatttttcctgggatttaaaattgcactttggtgatttttaattggttaaaattatttccaaggctctgaaaattccactaaaaatcttcttaatgcactggagcatggggaactcaagaaaaaattccaccacgctaattccaattattaattgcatttattaactagggattttgctctaggttaattaagataatttcttcgggcaatttatttaaccaaaaaagggggggaaacttcagggtgtgacaggaaacaacttcagtatgagtctttggttcttgcccttcttgtgaaggatcatcaatgatagcttccatctcaggctagcaatataaagataagaaatcacaaatcacattacattcacataaatatgtaagtgcaaaagataaaagaaaaatataactcacaataacattctttacaggctcactaaaacccatcttgctgttgcaatggcactccttgaaaacataaattgtagtgggtggcagtgtggcacgtccttatacttagtttgcttctaaaattacatgcaaacagtttgtaaataaagatgccatcactttctgaaagttttttcatatgcatatttagagtgctaaatataacatgccattagtgtaacgttttcttatccataatatgtcatccaatgttttaacaacctatggctgctaggtgcttatatccaccatgttagaaccacagcaacagattatgtagttaaagtgcagttggctagataaaaatatttagggtgattgtacataagtattactaactcctagaaaatgcatgtctagtttctgtggatcacacatgacacatacaaactcaaaatctgaaaaaaaaatcaacttattatacacataacacataattaagttacaaataagagtacaaaagaaccgacacattttattttgtatcttaccacatggcattgtgcaatgtagctccgagagcatgtcctttgctagtactgagcattctcatggttgttatgtttgttttacagacacttctcctatagaaagggaaacactagtaagacaagtagcttatttctatcacatatagataagacaactgtacacaatattttgatagtacgttgtattggtcaatcacatatggtttgactggtcagaagtaaaaacatatttagattcagatcagaaaataatatacgcgtgttagttgtaccacgaaaattgccagtttttacaaatatgacatgcatgtgagcttcaggtacaaacaatatgctagcttcctcttgcttttaaatgtttttcattaccatatatatgatttattcacttgtttctcttggaatgtaaacaaatatagagaaaagacatactatgattttttttactagaatatgagacttgacaagttaacagcaggttctgaatttgaagtcaacaataggtaactagttgtcattaaaccatggtcatagtttttgtaccagcaaattaacccaagatacaaaacaagtagatgcggcatcatgattcatgtagccaacactgtgtaagatttttgaaataatgccatgatttccaataacattcaagtctataccttatgctttggatctgaccacatctctactattgcttgccattgctcacggtcatactcttcagcgatgatgttgttctcacttcgttttctggtgtaccatcaaagaaaatattcttcaacttgtacctcatttgtcattgtctagacttgagcaaatcagcacatgcatctttgaccgtctgattattttcatctttggcaaattggccctaatcaagagcatggataaaagaaaattagcattaaaatagaataacatacaacatgataaacctaatgacaggtgaataaaaaaataagtaaaaatctgcataaaatagcaagcaaaatgaacgacatagacaagaataaagttatacaacaagtagcatgtgttcaacttgggagcaaataaagcaatatgaaagaaaaacaaatagcttctaagacttagttgcggatgttcaacttctccatttaaaattcagattagaattgtatagatccaacatgggcatagaaatgaggatgcaaaattaatcagagcccacacaataatttgtagaaactaggacataattcatcttatacatttgcagatactcacataaagcaacccatgaacatactgcaatacagtgaacaattaaaatttaagagtgttgctctattaggaaagaattgatctacttacaaccactttatccatatagtttttaagttgagacttgccattcttatactccttccagtgagtaaagattggtatgtgctgcctaagtacaaccccccactctgatgcttgctttgcaaactacattggtgcttctggccttctcttcccttcaacaatgcgcaccatcttaagggtgtgtttggttgctcgtatctatcaagcctggctcatctccgtcatccaggttgagttcgtcctagttaaggcgatacatatgcagtcgtttggttgtttgcattagtctggcctggctactacgagatactgtttggttgtctgcacgggggatacggttcagatgagaatttgtttggttggttgtatgaaccgtatgtatgaggatattttttcttgggtgagattaccgcttataaatttccactatattagagttcaggtaacctgaatttatttttttcatatatcaatcttcttttgttagtaaaacaactcatcaattgaactaatgtagtggagtacgtaactacacagtaaatcgtatattagtgactaattacgggattagagaacggggatagtagaaaaaggaaaaagaagaaaaaagaaaaagtgctctcgcatctcctcacactcctcgctgttggtattttttaacgacattacaagaaatataattcccagcaatggcgcagaaatactcctggtatattatggttacagagttcatccgcaagcgcacggatataccattgtagcatttcacccgagagtattccaagggtatcgtatttattttatctcgtgggaagatcatgtagagagaacttgactaataatttatatattacttgtgataatcatattctaagcaggggttaagataatccaagggtagagtaacacacaagcactaactactcattcttatgatatattatctaagctaagtggaaagaaaagaggaagaaaatctattcctatacttctaatatacatagtatacatacattctagttaaccgacatactagctaataccctctatccgatgccctcctggtacttcgagaagccaccccagactgccgagttccgtacgacagcccgttatgaccatataatcggggctaaatacggaggaataccctccccaggaaattaacttaggattatatacagacgcggaggaatacccgtactgagctgtcaccatcagcggcccacctctcatccgcagcatataaccccaaataatgatatcccgtaatctagacaacacgtctaaacgaccagatcctactctaatatcatcgtcatgacatagagtaattgcataagcaaacattatacccacaccaaagcatctcccagataagctagccgtatatccagtataacaagaacataatgtaaagtagatattcatatacttggaaagtatttcaataccataaatgtatatagaagagtattctaacaaaagtacaaagcttacaaaagaggaaaggaaagctattagagccatacccgaactcttccgaaggcttccggactcctgatttctactctattcctattccaccagctagatactactaactaaacttgagagaaatgagcgagctcttgcttgaggtgtgtgagtgaagtgagaaggtgaagtccttatatagaggtagttatgacggttgtggaaggggaattgtctgaagtgctctccaaccgtcattgggatgcaatcttggatgtccacgccgaaccctgcatccaacggtgccaggatgggtaccaggttcggctgaagcatcagctgggccatccctgcccttcttcggctggcggcctcctctattgcttcactttgtagacttgtgaatttttgtcaattctgagttcttggcccattcatacatcagtctgattctcgacatcgtctgattgatttatcgtttgatttgatgtcgattctcctctactttatggttattctctgcaaaaggttagtaaacctaatactagtggaatattattattctaacatgtttaagcattgcaagcatcactagttctcctctattttggaaatattgacggtcgaaactgatcgataacgaacatcaacaaaaccccccaagcttgaacctttgctcgtcccgagtgaaggatgaaaggaaacaatgacttggttgttgatcaggagttgctactatgctgcatatctcaatgatataggtgcaaggtatatgtaccctctctcagattaaataatcttttgcacggtggcttactcttacccctgattcccacgagacactgcttctccttgccttgggtggttgaaagaaagaacagcaattagagcaccaatcacccaacattcattcaactcttattccggaagttttgaaatgatttttgtaaaagaaagccaagttcctcaagtgattcgctcagactctctaagtgtatcaatatgacttcctcaccagattttgcctttttgattcctactttaaggttttaatatgtggagctcggtagagatcaaacatggcatacttgcattcacatttattactaagtcaaaaacttaaactaaagtagataattaaaacatactaaagatcaagatcgtgcaatgtgtgtgtggtatatcgtggaaatggcacacgaggaaaaataaagaaaatgcttctcctttgtgcttactttcttctcccaaaaaatccttcttttattgattaggagagggcatggctatttatttattttttttcaacatcatgctcatgcttgatggagcataactttattttttttcttttcataaccatgccttttccttcttctctttttttttcaaatggatttttctttttaggagaagaaagcatatgaaaacatggagaatttattttgttggtaacatggaaatggaatggaatatttgcttacctcccagtgtaggagtttggcatgtgtgtcgacgggggatacccgtagaccggatatagagggtattggtgtccgttggtacaaggatctacgtagtacgacatcaagcaaacaaaagaaggattatactggttcagggcccttggtaggtaatagccctaatccagttgatatgagattatatgatggaaaacacagattacaaagggaataacagaactcgatgataccgatgagaccgtagtcgagttggtccgactagatctcccggcgacttggctcctgcatgctccggctctgtaggctatagtgggtgtgttggcggtgatattcgatgccttaggtcctgcccagggggttccttatataccgcgggtcagttgatctctaagtaggactcggagatatcgaacccctcatgatatggtaaaaacccagtcttgtccgagtagaactccttccatccgtagataccatccctatcccgtgatagatttccttaatgtatacggaaactatctgtatacgcgtgggtatattgtatcagtatacaacgtacatccaaggatagagggtataacttatccgtaaccctgacaatgtgcatatatgtgggtgtatgatcttgatcatagagcatgagaagtatctacacaagtcacaagagtttgacaaagttcaatggaatggcaagtaaccaaaatgtatatggtttaatcatgatagcacattttttgctctggtaggaatttatatcaaatgaggaactttcaattttatcattttgaaaaacagaacattcggaatgtaagtcaaactaggatcatgatcatagtaacacttatttactatctcatatcttgcaacaacttagactcagattagcaagtgcagctcatttacctcaggttcctagataattgttggctacttatatttaacctttgagagagcacttaccatgaacccatatataagagatataaaacagagcaactattcatcatttcaacaaagagaactggcttgtcttatctagcatgactcaaacctgtcgtatccttttggtattttctactttgcaaatttttatattgttttcaagtttataagatgcaattggaaagcaaacatgcaattgaaaagggaaatatgcaatgtgatacaagttaccgcagtggggggagagacatctctccccccaagcttggctttcgctcagggtccttgacaaggattgaaccgttgaaagcggtagtacatttgaaggtcatcgtgctgttgctgcatcatgttgttgaagtttgcgaactgagcatcagcagattgttgccattcttgcgtttgtgctatgtgttccgtgaggttgtactggatctcccccgtctgcatataaagggtgtccattctcctagcgatttcacccaagccccaacgagaggaactcgagcgccattcacttcgagatggaggcacaccacttgatctggaaggttggttattcccccaatgtatgtcattaggcgcatgccatcggtcctaactggcacttgcccagtttgagactccgatgctatggcgttgagcttgggtccatccgggtgcatccccagttggttcccaacctgcctcatacatttgcacgagtgttgaggatgatgaacttccctgttcatttcttgccatgttgcgcgtctccctgtatgctccacctgcacgagattcttctatggtgtgcaggggaatggttagttcacgacagttgtacaaatgataccccgcatttggcaacgggatttcatttatacaaccgggaaaaaagtaaattaaagatccatcttctccatgtttcagaatatgcccttgcactagataagtctcatcaatacatggacaagcggctgagataaaagcaatttggtcgctaatgaccactagcccttttgctatccgagtaatcagagaagtgcactcaacaggagcagagaactttatattttctaaccattgccttatcatacatttcacaggagcaattttgatctttctaaccatggcaaacatgataatcaattcatcccccataatgggtctaagatcacctctaggaaacaaagtcatagcaatccatttgtgcctaagcctaagtgtaggattatggatatcattctttccaagtttcttgcaaattggagcaccagaaatatcttcccaaaacctatttttctcgaacccagaaattcctttctggagatcgattttacaggaatcgtgaaaaccaagagatgtgcttaagcctttccatgtgagtgtatactccttatggaaaaagcaaaaggaaatttcatcttctatttctttcaaagtgcatagaaattgcaaagaaagcaaacgagaaccaggctcatctaccacagcaaatctctgccaaccaacagctttccaaatagcacgaaattcaacatccatacttatctttttaagtagttccagtgagtattctcgcgtgtgagcatactcccggtcgctcagcatgtagtaggcttgtttctcccgatcactgacaaggtcgaggtcggtgttgttcaggagtcatcgcggagcttcggcgtcttccatcaagacatcggttgatgaacgagccctagactcatcatgacgacttgattaagagccggaccccttgaacagacgagacagtcgcctcctcattctgcacaatggagcaagagtggactaactcggcgggggttaggaatgacaaaaatttcacccgacggttagtttcaccaaagcaacttgtatatatgcaactaagtatttgaatttgagggaaactatcaaagcttgaatgaacttgagagcaaactttgaagaaggaatgaaaatgtgttgaaatggggtggaattccctctctcggccggctggcttttatagggtacccacaacggtcagaaatgacatgtgggtcccactagccgttaccctgccaaaagtggcaggtaaccgttgcctggccggttcggccgaacccctggtgggcccaatcggccccactttcggctgttggattccaacggtcagtgcggtcgtggcacagtgaattttcgttaaaaattttatgttggtttgcactgaacaattcatttgaaaaattttctcaaaattcaaagaatcctaaatgcagttttgaaatgcaaacatgtgttgatgcagaaattcaaattggtgaaaataaatatgcgcatacataccaatttaccggttggcgaaggtcacgtcatttaaagtccgacgtgcaagtctgtacctccttccgattcagtgcgtggattttccacccatctccgaaggtgatggagcgggcgtctttcgcttctccttccacaccttccttggctttgatgcggacggcggcttcctctgagccgactgctctagctttttggccgatagggttggttttaccggcttcctccaataacggttcctgggcatcgttgtttccttctccaggaaattctgcatgaacttcaccaggctgtccgtcttgggtagctccatttcgaccacttgaatgttctgtgggtttggcccgtacttgattctgaccatggagcattgttccgtccttggttgaaactcaaactttttctccttcccgttgatatgaaaacggatactccctgttcccacgtcaatgttggctcccgcggtgctaaaaaacggataccctaggatgagcggcgtctccttccccatgtccatgtataacaccacgaaatcaaccgggatgaagaaatctcgtatcttgactggcacgtcttccgctatccctgacgggtaacggactgacaagtcagctagttgtaggcacatcggtgttggtgccaacactgtgaagttgagcttgtcaaagacgtcctttggcatgacgctgacactggctccaagatcgcacaaggcctggtcgaactgctgtgccccgatcgaacaggtgatcataggagcttgtggagtatgacattgctgcagtgctccatcagcttgaccacctccgttgttgggagcggtctcttgttgttgagtatgtccttgagataacgggcatatgttggtacttgcatagcgtccaacaacagcatgttgatgtggatcttctggattacttcaacaaaacaagcgaattgctcgtccactgacagtttcctactccgttgaggaaacgacagcagccgtgtgtcgcagtactcctgcggcacggtcttttctggctgatcttccttgtcagccgagtcactagatggcgcttcttttgcaatcttgttaattcctacaggattaggatacggcggatcacaagtggacttaccttccctcgtcgtgatcgctttaacattttcaaggaaggagccgggttgcctcggaatcctcccagtttcattttcaaggactaaggatgctaactgagctagctgggtttctattatttcgttaaagctcagctgattttgaaaagcagaagcacaaccatctaacttgacatttatgttttctaggatcttgtcattggcagcaagctttttgcttagcgcatcagtggttttagcttttgcaaaaactagatccttcaaggagggctggttagaaaagttaccgttgttgttacctccttgataatatgggcgtggctggctccatccctgacctccttgtggacagtacccgttgtttttgttgcccatgtacatcgcctcctcacgggtttccaggcagtcattcccagaatgacccgtgttgccacagacctcacacgtaatgtgcgaatccaaggccttgatggtgccttgtggtcttttctcgtggtcgtccaatcgcttcatgaggaggtctagcttggcagcaagcagttccgtctccttgacggtgtgcatgcctcgctgacgggtctggattcgttcctcgctccaacccatattggagaccatcttctccatgaaccgttttagagaagaacactcctctagctgccgcgtctaggtgatcgcgggacgtgggcgtgagtccattgtaaaagttctgcaggattagcgagtcgtccatcccatgatgacgacaggcggccacatattcctgcagacgttcccatgcttcaggaatagactcgtaccttgtctgctggaaactggaaatccttccacgaagggcattggttttgcccatcgggaagaatttcgagaggaatgccatagaacatttgacccaggtattgacagtagcacggttggcatagaaccactgcttcgctctcccgagaagggagaacagaaacagtcttaacttgacggcgttgggactgacgcccttgatggtgtacgtgctacagatctctaggaactgttgcagatgagcattggcatcctcattaggcttgccatagaacgggctagcctgcgccatagtgatgaggctggacttcaagtcgaaatccacgactcccatgttgatttgcggcccaatggccacattgtcagcagagggagcagcgaattcacagagagtcttgttagccatagtcttgaaggtcggtggcgctggtatggctagtttctctgacggtagagttttctatggagcagcgactcgcggcctaacgctccggaagaaagctactggatttttctttgaagttttccggcaagttgaaaccagttatgcactaccctgttttcacaacaaaagttaaaacaaccaaggttagactgcaaaggaaaatgattatacagaggtaaatataaaatattagttcaggtaatctctactatgaatcttccctggcaacggcgccagaaatgtccattggtatttcttaacgacattactagaaatataattcccagcagtggcgcagaaatactcctggtatattatggttacagagttcatccgcaagcgcacggatataccattctaacatttcacccgagagtattccaagggtatcgtatttattttatcccgtgggaagatcatgtagagataacttgactaataatttatatattacttgtgataatcatattctaagcaggggttaagataatccaagggtagagtgacacacaagcactaactactcattctcatgatatattatctaagctaagtggaaagaaaagaagaagaaaatctattcctatacttctaatatacatagtatacatacattctaattaaccgacatacaagctaataacctctatccgatgccctcctattacttcaggaagccacccatgactactgagttccttacgacagcccgtcatgaccatacaaccggggctaaatacggaggaataccctccccaggaaattaacttaggattatatacaggcgcggaggaatacctgtactgagctgtcaccttcagcggcccacctctcatccgcagcatataaccccaaataatgatatcccgtaatctagacaccacgtctaaactaccagatactactctaatatcatcgtcatgacatagagtaattgcataagcaaacattatacccgcaccaaagcatctcccagataagctagccgtatatccagtataacaagaacataatgtaaagtagatattcatatacttggaaagtatttcaataccataaatgtatatagaaaagtattctaataaaagtacaaagcttacaaaagaggaaaggaaagctattagagccatacccgaactcttccgaaggcttccggactcctgatttctactctattcctattccaccagctagatactactaactaaacttgagagaaatgagcgagctcttgcttgaggtgtgtgagtaaagtgagaaggtgaagtccttatatagaggtagttatgacggttgtggaaggggaattgtccgaagtgccctccaaccgtcaatgggatgcaatcttggacgtccacgccgaaccctgcatccaacggtgccaggatgggttcggccaaaccatgggctgggccatcccagcccatcttcggctggcggcctcctctattgctttactttgtagacttgtgagttttggcccaattcatcgtgtcaattctgagttcttggcccattcatacataagtctgattctcgtcatcgtccgattgatttatcgtttgagttgatgtcgattctcctccactttatggttattctctgcaaaaggttagtaaacctaatactagtagaatattattattctaacatgtttatattgcaagcattactagttctcctcttttttagaaatattgacggtcgaaactgatcgataacgaccgtcaacactcgctgcgagcatggacctcgcttctcgcagcctgctctgcggagcttggctgctcgtcgtcgtcgtagtcaccgcatccatcgctctcgctgatactcttgctctaccgctcctctagccgcaccgctccctgtcttcatcgtcatggggatggtttgctgctgctgctcgccttgtcgcgtcgtggcggctagatccaacggaagcgccggagtagttggttgcaaaaggggttattgctgacagcggcgacatggaggaacaaatggggggcgacattggcgacggcgaggcaagggcgacggtgagcttcctgatctagaatcctatctcattcttgtccatcctcccgctattctccttcttcccgaatctggctgaggccaagtccggcgatgagcagtgcagtagcaacaaacccatgccttttcgttttgggggagaaatgagaaagggacaggatggtgaccactgaccccttcgcacctcttgcacgcgcgggtgcaacgcgtgcacgcgcgggtgcagtgttgctgcacgcgttgggccaggacaagcagcgaagctcgattcggccattcctgctcagcctggctgagggggctcttttgcatctgctcggcctggctctagcacatctgcaggcaaccaaacaggctgcaagttgcatccggagatacgaaccaggctgatacagccaaccaaacacgcccttagtgcataaacctcggattatcctatccagatatcttcccatacttcttcccctattccattgatcaatcatgccttttggttcacctgaaaatcatgaaattttcaaagttataggaaataatcaacattttttatgcaaatgtataaaccatattcactacaacaaagtgccaataccaatacatgcattctccagatttgataattgagttgatgctttgtggaccactgcagttctatccataccaatgcgatacaacacttgttctagaagagtatccattaagggtggtcccatgcatatttaataatatttttttgttattaaaattgcttatctgataatacatgatagtatctactcatgttcagacacaatggcccaatacacgcatgcaatctatgatatttaaaaatatatatagttatatcatccagtctacagaacagtcaagattattggaattatagttactactggtgaacttacatttcaatataattatataaaatattgctaccagaatacaaattatgccttcttctacactgatatatttattaagaccagtgagtcctcctatacaggcttccaggctatattcaactcatctaactatgggttgccttctagcttattttgatatattagttgtgtttaaactttaataaaaaaatatttatttagatgcaaaagcaagggtaacttggtaaaaataatacgatgttcagatgtaaatgttgtcaataaagcaagtgttggcggttattaaaatgccgattctataccaccaacatcttcataaagtccagataataaaacatccaacatagtgatagttgttaaatctcacatactccacgagtattggtgtatatttgtatgaagatgataaacccagaagttgggaggaaaatcagactaaagtgaagaaggaaatatatccatacaaggatgggctttgaactttatcaaaatactggagaatcagcccaaaactccgagaaatggatgaagtaggactaggggaggagacgggccaaaggccaagctagcagggccagtccaggtttggccgaaccctgaccaccaccgttgatactgggatttggtagggacggtccagatgcactcctgatggcagttgcatggcatttcggacaattccccttgtcataaccgttgtacctgtcctataaatagacttcactttcttcacttttacacacacacttcaaagcttgagctgaattataagaggctctattgtactccctccatttcacaatgtaagactttctagtattgcccacattcatatagatgctaatgaatctagacattattatatatatggattcattagcatcgatatgaatatagacaatgctagaaattaaagtcctacattgtgaaacggaggaagtactatttgtatactagaattaggacgagaatagagtagaagaagtcagaggaattccggagttgtcggtaatcttgtctcatttcttttatcttcccgagtaatttagatttatcttgtgagaattatctattggctagttcctaactagcatacgagattattgttcactataatcaactaaaatatagtgattgctttggtgagttataaacactaaaatagatattaattgcttagacgtggtgtttaggtaattgttatccattaattgctgtgtatcccacggtacgtttgaggtaggtgtagaggtggtgacagtcctcgagatcagttaagtcctccctatccgggtatgtagtagagcgacatctgggaacagcgggttgccagtgcctgaagtattgcgttaggattaaacttaagcttgccctagacacagtttctcactagtaaatcctctctgtcctagcctatcctttgcttggtgcccttggatgaaccgaagggagatctgatcacacacgttcccttcgattcgatacccttggaatactccgtaggggaagtgctacatcggtatatccgtgcgcttgcggatcttatctttgaccgtaagaataaccaacgcatttctggcgccgttgccggggaacggttgttgataatttccgaacctagttcatccgtctatctcttttcattttttattctaccttcacccctgctgccaagagaagtattccttttaaattcttctcgaccatggagcaacctctctttgagctgtctgctcctaagggcgaattctatgagccacctccttcatcggagccaatttatacaactggctatgaaattcgccccaaactaattagtatggttaggaagaatccttcttctggtcttgatctagaaaacccctaccatcatctgcgggactttgagcaagtctactcatgacttaacattcgtggcatgaagcaagaaactgtacgatggaaattgtttccgttctcccttcaagagagagcgaagcaatggtacacatctaccgtaggatgtgtaaacggtagttgggaaaagccgcgagacaaattctgtcttgccttcttcctagttactcgtattactgcccttcaagtataaatcctcagtttccagcagatcaataacgaatcaatcgttgcagcttggtccagattcactaatttagtgcattcaggacaaaccttgtccttacccgagtatgtgcatctgcaacattttcatacgggtctggataaggagtctgcattctatctggacataaccgccggaggatcattcgtgcaaaaaacaacgtcagaaggaaaagtaattctagaccgcattctagaaaataattacttcatgatgcaatgcgatgaaccccagctggaggcatctgtatccaagataaaggagccttcaaccatcgagtcacaatctgaaacatccacttcgaccaactcgattgatgaaaaagttaccgaggcaccataagttgagaatgaagaaattcagactctggatcgtgccacaattctgttcagggatggttttgacgaagactacgccaacaccctgaactatttcagtaaaaagaaaccaatcgtccccttgccacctcgcgatcctatggaactttggttcctaagggaaaccgtttgggagctgacatccataattgtaacgccccgattttcgtttgggattaaaaatcatttcataatgcatttcctagaaattaaataaaaatttaagctatttattcaagtgaattaatgggagaattaaaattctcccttaaaaatcattgtccgagaatattttgtaatattctctgtgccctaaaatactctccggatttttccgtgaattttcggagctcaagaaataattttaaagtcacaaagttcattaaactaatttaaataaaaagaaaacaaattaaaatcatccttcctctctttgggcccctttcggcccaatccctcctttcccttcctcgccccgcttgcccctctccccttcccctccttccccctcccgggccgtcggcccagctcgctcccgttttcccctccctctctctctccgacaggtgggacccgaggccccacctgtcatccccttcctccggctccaaccggcggcatggccgcccgagccaccccacgatgccgctgtttccgcccttctcctccaccccacgcgcgtgcccgccggccgtgggaccccgccgccccacgtcctccttatcccccacctttcccctccaaaaccgccgcccacaccccacgctgccggcggttgccgtccacgctgccggcagttgccgccctgactccgcctctcccgggctcggtccgacctctcctcccctataaaaacactccccgcccttccttctctcatttcccccaactcccgagcttccccgcgcccgaaatcgcgctcacgacgcaagtccgagctccgccgctcatcgccgtgctccggccgccccttgcggccagtcctggccacctcacgccgcgcctctgcatccactgcgttcgccgcaccgcgtggaacctcggccgccactcctttttcccccttccaccccgaaacaccgttcccaccgtgcacccgagccgccaccaccttaaaccgcctcaagccgctcactgccgtcgcctcagccatcgccgcactgcgccgccgccaccaatagcttcgctgcgtcatgccgcacccggtccaccgctccccttccctaatccattgccgaaacgccgccgctacattcaccatctctctccgccaccgtcgccaactccaaccgcttcccgtcggcgagcaccgctttgcccgggtgcgccactgcctcctccacattcgccgcgccccaccgcacctcggccgccgcttttcatgccgttatcccaccggaacacggtattcacgccgctgggagcctcctcaccccctcctaacctctacctcatcctccccaggtccttccggccgccgtcagccggttcgcgctcgcggaacgccgccgggccgccgttccacctttgtcccgaggagcgccgctgctgagctcctctcgtcgccgcgtccttggtgagcaccgctctcccttctgccgtttcccgcgccgccgctcgccgtcaatggccgctggccgtgcgccgccgcctctcagccgtccagctgtgagccgccgctgcccctttggcagtgcaccaccaccgtggactcagtccatggtggaccaactcctttgacccgctgatgagtaggccccacgctttgtggacgtggtccgcacccctcctcttgctgacgtcagcaaccccttttcctttggaaaaataattaataattgcgtcataaatagtatttaattatagaaattcatttaaatggctcaaaacttctaaaattcatatctaattcatatgaactccaaattgggccattcaacttgcaaaattcatctaaaattgagctttacatgtttgtttacttttgatgcactgtttgcttggtctttattagagtttttccttgttttgcgtgccagcgtgtagaatccgtcgtttcggaagtccgcggtcgcgaggaaaagagttcggaagattgtttgaagaagcaaggcaagtcacacattcccgttgagcattttgatcctactttacaagtttttaccgtttgcaaataaatatgcatcgtttgctaattacatgggaatagagtttccctatctgctcgcttgtgccatgtttacttcatatttgttctttgtcaaccgtgggtgaaaattcgactagcttgtgtcacttgtgttgatctagctagaactatatgcttagccatgcttaattaccactatctcagttgatgggataattgcagtattagaccttttagtatcattacaagctgcgtgctcgagacacccgaacatgtttcattggtcgtaattatccaactaaaatgcgactgaatggtgggctgtgggtgcatggttttgcgagtcgtacccatggcaattaaggtccggttcacgggaaaccatagaaccggtggcgagagtgggcgtgatggagttgggtcggccggggtgtccggttgtccagctgctggattcaccacggtgcacgaggggactgcctgctgccttgcgaggagtgggggtgaaaccttagcgtggtgtggatggttaggggagagttatatgaagggtcttgtcacaatcactcgacgtggtgacgtgttcatcatgggtgcatgatgacgcggtgacatgccggtgaattgtgtcttgtgggtacggttgtgcacctctggccagagtaaaactatttgaatagccgtgcccacggttatgggcgatcgaccagatttaccgtgattactctcacacttaataaatcgactcaatgcactgtagttcaggtgggttggctgggcctgttcaacatggtgtagtgttgatcagtggagatttaatattaccttaattactcaactgttttactgttttgctcaataaaatgttttacaactgcctttaagcaaatagccacaagccattcttgtatccccttgcacgtctgcatcgttggtgtggcttgctgagtacggtggttgtactcagccttgctatttcccccttttcagaagtgttgtgcttctgagctgaagacggagttagaggaccaaggctcagacctcagttgagttttgcctgtggagtggagctgaagccccgctaggatcgccttttgccgctgctgctgctttcatttcggtgtgaggactaagtgcctcttctgtaagtattttatgctttatttacgtttggaactgtttattacttatcgttttgtgtaccctggttggtcctggacagggatttaatacacaaaatagtctagacatttgggctaaatttttgggcgtgacaataatgagtgacgaatgatcaaggtaagcagagatttcatccgaagtaattctaataaataccgctccccgagttattccttgtcacctagaagggaacaacgttggtattctatacagtccaactgtcggggttaatctcgtctcggagtcatttgcattcgcttacctgggcaataaagctataaccctagcaaacaaattcttcaagcacccgaatggaactatcattgaaggatttgggattgtgcaagacgtacctgtctgctttgaaatccaagattttgacattctaattgggcctccaattgagcaactcctcataaatacacctcgattggacagcctcaagataactttgggagggaacgaattctcagttccattctcacgggcaaggatcaccttgaccgacactctcccagagaacgagtttgcagaggaggttatggcagttccccctcacgagtctcccgagacccttctggaaaatgaagtccccaacttcatcaaacaagaaccggagcccggtgagactgacgaacttccaatcatggaactgccgcctcgacctccacttgagcttaaacctctacctgaaggcctatgctatgctttcttgcacaatgacaaagaagcccctatcatcataagttacaagctttctgaagaggagactcaacgtcttctgtctgtgttagaaaagcatcgcgctgttcttggctattccctctagggtctcagagggattaatcccgcactttgcactcatcgtatccctattaagcccgagagcactccctccaaggaacctcaacgacggctcaataatgcgatgcgtgaagtcataaagaaagaggttctgaaactcctgcatgctgcgattatttatcccgtttcatatagtgagtgggttagcccggtccaggttgtgccgaaaaagggaggaatgacggtcgttgcaaatgctcgaaatgaacttatcccgcaacgaacagtaaccggatggaggatgtgcatagattgcaggaagcttaacaaggcagaaaaaaaagatcattttccgctacccttcattgacgaaatgttggaacggctagcgaatcattctttttctctgtttcctggatgggtattccgggtatcgtcaaattcccatccatccggaggaccagaccaagactacgttcacatgtccgtacgacacctatgcttatcgtaggatgtccttcggactgcgcaatgctcccgcatcttttcaaagatgtatgatgtccattttttcaaacataatcgaggacattatggaagtattcatggacgacttttccgtctatggaaagaccttcggtcattgtctactaaatttggacaaagtctttcaacgatgccaagaaaaagacctggtactcaattgggaaaaatgccattttatggtccgcgaagggattgttcttggtcatcgagtgtctgagcgaggaatcgaggttgatcgtgcaaaaattgatgtgattgatcaacttcctcctcctgtgaacatcaaggggatccacagcttcttgggacacgctggcttttatagaaggttcatcaaggacttctctacaatcgcccgacctttgaccaacctgcttgccaaggacgctccctttgggttcgacgatgcgtgcctaaaatcctttgaaattctcaaaaaggcactcgtctctgctccaatcatccaaccccctgattggacactacccttcgagattatgtgtgatgcaagcgactttgctgtcggcgcggtcttgggccaaaccaaggattaaaagcatcatgcaatctgttgtgctagcaaaactctacccggagcttagttgaattatgcaactgctgaaaaagagctgctcgcggttatttttgctatcgataagtttagatcttacttggtgggagcaaaggtgataatctacactgatcatgttactctgaaatacctgctcactaagaaagatgctaaagcacgtcccttgagatggattttgctgctccaagaatttaacttagaaattaaggataaaaagggagtagaaaattccgtagcagatcatttgtctaggctgcagattactggcacacaggaacaaccaataaatgatttctcgagagatgacatgctgatgacggtgcgcgactccatcccgtggtatgccaacatagtgaactacatggtatcaaagtacataccaccgggagaaaatcaaaggaagctgaaatatgtgagccgccatcatatatgggatgagccatacctatacggggtctgctctgatggactgttaagaagatgtgtgccaactgaagagggacttaagatcatagaatgatgccatgcctcgccttatggtggacattatggtgcattccacacccaggcaaagatttagcaatgtgatttcttctagctgacgatgtacaaagattcaaaggaactcgtcagaagatgcccaagctgccagaggcaaggaggaatcactgctcgcgatgcaatgcccctcacatacaacctacaagtcgagatatttgatgtttggggtattgactttatgggaccctttcccaagtcccgtaattgcgagtatattgtggtgatagtcgactatgtctccaagtgagttgaggctatgtcgtgcagcgccgcagatgcgaagcatgccaagaagatgttcacataaatcatcttcccaagatttggtaccccaaggatggtcataagtgacggaggttcgcactttatcgacaaaaccattcgagacctcctgggagacatcgcagccaaacacaacgtggccacaccttaccatccacagatcagcggtcaagcagaaacatcgaaccaacaaatcaagaacattctgtaaaagacggtcaacaaaatgggaacaggatggaaggagaaattgccagacgcactgtgggcataccagacagcatacaagacacccattggaatgtccccctatcagatcgtctaccggaagtcatgctgactccccgtagagcttgagcgtagagcatactgggccatcaggaattggaacatggattttgagggagtaggagaatggagaaaaatgcagttagcagaactagaagagtggagagaaaaagcatatcacaactccaagatctagaaagaaaggatgaagcgctgccatgatgaaaggataaaaattaagaaattcaagccaggaggcaaggtactgatgttcaactccagggttaagctgttcggccatggaaaatgacgaagcaaatgggaaggaccgttcaatgtcatcaacactgcttcgcacggagcaatcacacttcgtgatgactcaggtaacatatttatggtaaacggtcaacgtttaaagactttccttgagccgaatgaaactttagatgaagaagtggttattattgaattaattgattatgattgatttcctgtatgaaactttaaagactttctcatctaaagcatgcttaatttcctgtatagttgtcatttttgtgcttagcttaggattgtgtggggccagaagaaaattggtggccagccggactcgtctggttctgccaaaccagggtggcgcccgtttggtcccattttcgacaggttgtttccaacgcgcacttgtagtctattgtgaggcgcattcggaggtacatcgactgtatcaaagctcagaacaccttcttcctcctttcctccacctttgcaaattcccttctccaccctagctcaattccttgagttccactctcaactcactaatggctggcaaatctttgatgccctatattggctcttcttccaattccacttataacctcaacggagagcccactccggccaaccaactcatccccatcgaagattacaccatggaaggattgaatgctgtctggacacaacccctcgcgatagtgctgggctcccctgcaaatttgtagcccattggcgagcttcctgcaaatttgtagcccattggcgggcttcctgtgggcataccggcagcttcttcgtgagggggattgtttgtgccatctgggcccgtcgggtcaggcttattgaacatcggttctgtgcccgagggagctttcttgttcatcatctttttctttgcgcgttcttcaaatggaacaatttgaaactcattttataattgatatttcatacaaatccactaaaccaacgtaacgccacattaacttcgtattctgtgatggtttgctagacctctatctcgtacctacgtttgcctcgtggacagacacatccacgttcaacaaggctagagctgatgaggtctcgacctcaacgttaatatcccacgcgaacgggctatcgttgtcgctatctgaagatacttaaaatgatagccagttcgagtgggatactgatggtgaggccgggacctcatctgccccggcctagaggaacgtggatgctacacatctgtcgatgaggccgacgcaggtagaagacacgggcaaccaaacccccaaggtatcttatttgattatagacaattgcactgaacccctaacgataacaatattttagacatatctgatctgaacgaaatgttctagtttccaatgtgtaattaccgcctcctaaaatgcacctacttgtattcaccgaattagcctaatttaataaattgcatcaataataaaatttcatcacaaattgcatctcactaattaaatcctattcaaccacatgtgtaactcagatcccctaacatcacaattccatctcatatactgtaaattaacaaagtccaattaattacatcataaatactctaaaatgtagcactcacaattccatcacaaattccctaatttaacaaagtccatttatttactctaaaagcacatccttaatatcatcatcatcttaacattacaaattaacattcaaaatcgcatctcgcacaaataacacatatatcacacattgcatatttcacatattacatattgaataattttaaaaagccaaaaaaggcttaccggcggccggcggcttggggataaggtggctggcggcttggggaggaggtgaccggccgctgcttgaggccgatgtggccggccgttgcttgggggcgaggtggccgacagcaggttggggatgaggtcggtggcggcttgggggagttggtcggtgccagcttgggggagtaggctgtcgtgctcagtgaaaaggccggtggggtcgtggaggtcggcggcgcgggggacgtggtcggtggcagttcagggagtagatccgcggtagagaagacggcggcagaggcggcgagggggatggaggagagggaggcggcagcggcgagagggagagagaagagggaggtggctgacggtggcggggaggggggtgaggaggcgcacggcggcggtggaggaggtcgacgagtggaggaggtggcagtggatgccggggaggaggcggaggagaggacaaaggccggggagggggaggaggccgagagttggcggcgggatggatctggccggcgtcgagcaggtggcagccgggaacaaggaggagagtaggcagcggcagcgtgggcgagaggaggcgacgagggggtgaggagaggaggtggcagcagcaatggatttgggcagcctggtggcatggctccgaaaaatttcaccaggacttaaaaattttcggagcccgcccaagcatatgtagggcgaggaggggatttttccgtgtgcgcgacatagccaacccacacggaaagatattttcccatgcgggccatttatcccacccgcacgggataatatgttgccctaaaaagtaattatttaaaaaattattcaatcatacttttataataaaaaatcacaacttaatcacacttgattttaaattgttccaccatatgattaattaaagaattagttaaaaaattgttcaaccatatgggtaattagtttactaaatatatttatagttaattaaagcacaacttaatcacacttgattttaaatcgcatctaactaaatataatcacaaataattaaccacatatgatttttaatcgcatataattcaatcgcttgcatattgattaaaccaaaacttgaaaaatcaatataattattcacccatataaattgagaccgacatatattagggataaacatgcatggaaccgcgcattcattcggaaagaccataagtttgttccattaatcgtttacaaaataagttgtacacaccaacatatgtactaatgtttaacaattttggaaacatcatccgtccgcacagtcgagaacttctcttcgtcaagggttgtctcaactcgcttgatccggttaggaagatctatgaacaatgggacatcgtcgtattggttgtaatctgacgtgtcttcaatgttatcaatgccaatgatgtgttgctttcccggtacagcaatgaccatcttatcatcagatgggtccttcacatagaaaacctatgcaacacgctcagcaagaacccatggatcatccttgtgtcctagcttgctacgttctacaaccgtaaggctgtagttatcgatggatacgcctgttgtgtctcttacccattggcatcgtagcaccggggtctagatgttaaggccatagtcaggctcctaatgtcttttatgatcccatagtaagacttcttctagcctgatgcgtcaaacgcctccacccgaactccgctattctgagctacgcttttcttgtccttacatatcgtgtaaaacctatatccgccaatatcataccattgccatgaggtcacaaggctagttgggccatttgctagcatgtgcaatgttttttcctcgagcaattcaccgaacgacagctctttctccttcaaccatttaggaaatttacatttctattccttagagatccaagtggccgtccttctagggttgcaggctcttatctcgttcatgtcttcctcaatgtacggctcgacgatggtgagctattgcaacacgctgctatgtgcttccactacagcattgtagtcctcatcatagaaccttttcttgcctacaaacctcgtcccagctaaccgaccgtcatgtacaggggggttataccaatgggttcagcgtccttcatgtagtatatgcagcattcaaccacctcctcagttgtgtaccccaccatcttttttcctaccctcttgttgccatctcatcaactcggcatctgtacggttcgaaaatagccacttcaggcaatctttcacaggcgggtaccacatcaccattctaggaatctttttttttcatccaccgatgcatcttggtcgaccacctctccatcggaggctccgttgcccgtcttgtaccgactcgtctcacatgttgggcaagagtctaaatccgcgtattccttgttgtacagtatgcaatgattttcacatgcatggatcttctgaacacctagagataatggacatatcaatttcttcgcttgatatgtgttccttggcaggaggttcggcttaggaagcataactctcagaagatccatcaaatcattgaagctagtgtccgaccattcatgtatggccttcaatctgagaagttgtcacgcccagaaatttagcccaaatttccagattattttgtgtattaaatccctgtccaggaccagccagggtacacaaaacgacaagtaatatacagttccaaacataaataaagcgtaaaatacttacagaagaggctcttagtcctcgcaccaaaaagaaacgacagcagcggaaaaaggcgatcctagcggggctacagctccactccacaggcaacactcaactggggtctgagccttggtcttctaacttcgtcttgagctcagaagcactacacttctgaaaagggggaaataatagcaaggcttagtacaaccaccatactcggcaagccacaccaacgatgcaggcgtgcatggggattcaagaatggcttgaagctatttgcataaaggcagttgtaaaacattttattgagcacaatagtaaaacacttgagtaattaaaataacattaaatctccactgatcaacgctacaccatgttgaacaggcccaaccaacacacctgaactacagtgcattgggtcgatttattaagtgtgaaactaatcacggtgaatctggtcgatcgcccataaccgcgggcacgactattctgccagaggtgcacaactgtacccacaagacaatccaccggcatgtcaccgtgcccggccggacacgtcaccatgtcaagtgattgtgacaagacccttcatctaaccccctctaaccaagcataccacacctcaggtttcatccccgcccccaacaggcagcgggcagtcccctctcgtgcctaggcgaatcagaaagccgcataggccgtcgcagggcccatccgaactccatcacgctcacccttgcctggatgcgtcagccagagaaaagctatacttcaagtcatgcaattacccattcccgcttgtggcaagcgttgtatgtcttctagtgcatcccgcgaaccggtccttaattgccatgggtgcgactagcaaaaccatgcacccacagcccaccattcagtcgtattttagttagataattacaaccatgaaacatggccagatgtctcgagcacgcagctcatcatgatactaaaaggtctaatactgcaattatcccatcaactaagctagtggtaattaagcatggctcagcatatagttctagctaggtcacataagtaacataagctagtcgatttattacccaatgttgacaaaggacagatatcaagtaaacatggcacaagcgagcagataggtaatccctgatcccatgtaattagcaaaacatgcatatttatttgcaaacggtaaaacatttataaattgggatcaacatgctcaaaggggaatgcgtgacttgccttgctccttcaaacaatattctgaactcttttcctcgcgaccgcggacttccgacacgacggaaactacacgctggcacgcaaaacgaggaaaaactctaataaaaaccaaggaaacagtacataaaaagtaaacaaatatgtagagctcaactttagatgaattttgcaagttgaatggcccaattcggagttcgaatgaattagatatgaattttagaagttttgagccatttaaatgaatttctagaattattatcgaattattgcgcaattattaattgttttttcaagggaaaaagcactgctgacgacattaaaggggaagtgcgcgccgacagtggaccgggaccaccgaggcggtccactggtcagcgacacaagggcgccggtccacgggaaccgacggcccagatcggtccaaagacgatcgggcggccacgaggcggcgtggttggggcacagcacggctcaggccggcctagccgagcgacggtgcgctgcagcgtggccaccgacggcgacggccgccgacggcgcgggaagcggcgacgcacacaggcggcggcggcgcacatgcccagcgaagaggagggaggaggggctcaccgagcgtgcgggctgacgaggcggagcgggaggtggccggtgacggggagaggcggcggcgctagtcggggaggcaacggcgacggcggtctggcggcgttccgcgagcgggaaccggcagacggcggctgcaaggacatggggaatgcaatagtatggttaggaggatgggagaatgcatgagacaacgggaaacaccggccgaaggcgaaggaattaggagagctcaccgacgcgcgaggggagtggagccgaggacctcctcatccttgtggagccgagggaggcaacggcgcgggtcggcgtcgaccgaggtggcggcgcgacgcggctggagtcggcggcgacggcatatggtggaggtggcttgggatgcacggtggaagggtggttgcggtgatgaaatggggaaacggagcggaggccggggtgcggcgaggcacggcgaagccggcagtgcaagcggcgcgacgcagcggtggctagggtggcagctagaggcggccggaggaggcaaaagcagcggcggctcgggctgcacgtggacacggcatcacggcggtggttaggggaaataaagtggatgccggggtggagcttgggacggcgaggctagaggtggtggcggcgcagcgcggcgtcgtctggagcggcgatggcgtgcggctggaagcaaggcggcgagcggtggagctcgggctcgcgcggagagagcaggagaaggcgcgatgggctcgggaaagagggcgaaacggaagaggagagcatggggagggtttatataggctcgggagggtgaaatcgttgccgagaggggtgggatcgggcggcaaccggccagcgacgtgggacgccgacatgggcaaagtggagctcaatttgactccaaaaattgggggaaaagtgggggaaaatgtggaggagttggtggggaaccggtttcactcggtttgggtgcgagggcgcgagcgggagggcgccggatttggcgggacgtgggcggcaaccgccggccatggcggcttcggcctgggaagctgaaggtaggaggagggcctgacaggtggggtcgccgggcccacctgtcggggagggagagagggaggagaacccagggggttatttagactttgcgcgaggggaaggaagatgggtcgacagcccaaggaggaaggaaggaataggggaggggacgggccgaggggagggaaggagggctttgggccggaagtggcccaaagtgaaggaggcgagatttaattgtttttctttttattaaattggttaaatgaactttgtgctatttaaattatttcttgagctccgaaaattcgcgggaaatttcagagagtattttagggcacaaagaatattacaaaatattctcggccaatgatttttttaaaggaaattttaattctctcattatttcacttgattaaattgctttaacatttatttaatttctagaaaatgcattatttaatgatttttaatcccgaacgaaaatcggggccttacagaagttcaagcacagagcgcaacaccatatagttcttgtcgcatcctttcgcttcgtcgtgaagaagttccttcactattttttccagcgcttcctaattgtccaaccctcgtcttctaccagttaggacctctggttcaacatgacgcaacatatgttccagatcaaaatcaatatttgtatcgtctataccagagccaccacattccaggatcgttccctgtgatatgtcttcgattataaattttctgcatcatcaaagcaggaatcttcagcctctttgttatgaccggcgacttccccatgaagagtccatatcttgtaacccttcttaaatcctcgctctacgatgtgcgacaatacatctttcggtatttgcagcaacatttcgttcttgcaatctttgcatgggcctcacagcatgtgcctttgccagcttaacaaatttggctgcttccttcaagaacgtcggatgagctctttttgtgttgtacatccatgcccgatccatgacctagaatatatcttgtcatgaatacatctgtgcccgattcaaaaacgagtgtatttaaatggagggaattaagcaaatagtaaattaaagttttacggacaatttaaacaagcgtacacgatttttaatcattaataaaatattgtccatttctaaacaatgaaaaaattcatccttttatccgaaggaaaataaatttaatggaggcaaacccaacttttcaatttgggtactaaatacttttaagaacatgtaatggaaacattatatattagctaaaaaataaaaaaacacaaaatgcatacactgttccatttaaaaagtggaaatttctacgcattgcaccgatgaaaactgacaaaaatggaagcaaatgaaggaggagaacaagctctacaccttttatacagaacccaatcaaaaattcgagatccttccccctaatttgtgtatgtttaggagagagaaaacgccggaaaaaatgggattgtgtcgggttgagggctatatagcccaacgaccatcgcatgcggtcggcttatgttgcccgcacaggataatgcattatccagtgcggccgacagcccgacgccgatccacggattttactaggcagagccagttcgcctggaaactaccggggccagtgtccaggaaaatcaattctgtagtagaggtagatatattcttgggtttttttttttttgtcaagttcttgttgaatccgagtaggtctcctgcagcctttttgaagtaggtcatggccccccttgtgtgattctttacttagagtagtcttcctgtagatgtacaggttctatatggatatctagcattaccctatgtcacaagggtataccttatttttatacaccaacagtattgtacgaactctcatgtattattatacagttgagtgaacacttatatgcctaaattttatccttttcatatatgtgcatgtatggcatcctagttagcatctatctccccaggattagccatagcttatcatgcatgttgggcttttgtttgcatatggtgcacaagttcatgcaatggaaatctagagactacaacagatgtgggctttctggatggatgccctatgacaaacatgaaatatgccattgatctataatgaattcataaaaaaaatcatcgtaaaattcaccctcggccaattctaatgataactggatatcttgggcataagatatgttcactgtgacaaacatgatcgtcataaccgcaaggattttatcgttagcagttggtaatgaagaatttatgaagaattctaaaatttatgtcacaggtaatcacgcggtaatgaagaacttatgtcgcagataaaaagggcattgtgatgttggcctaagtgtttagactagtgagatttggggcgttacatatatgtcgtggatcctgatcggtacattataatgttggatgataatgcggctgataaatttatttaatacaacaatttctctaaggatattattacagcatagttttcatgggcttgtttcgatctttttttaaaaaacaaattaccatttgttggtaagacgaaatttggcaattctaaaattttggtaagatcaagatatgaaggatgtgtttagtttgatactagttttatgagtacgagtttctgtaattaccaaatgttgggggggatttgaaatgttgtgatggtgacgtctcgtttagtatattgccttactaaatattggcaatgtgaaaatttgatatggttgaatttagcaacaaactgaacaagccatatattaaaatatttggcaagatgctatgcatggctgcctacatgattaatattgaaggggtccagcaccacaataatgcgtctatgtatattaatgcaaaaataaatatttaacaaataactaaaattaaccatggaaatatatatatttttctcgctcttatctaaattgctaaatattttatttgcatatcaataccaatttttagctataaaaggatcaaatttctctctttttcctctcctaagtaaatgttggaattaaaagttaagccaatctatgtctttttttcctcccctattatttataaaaacatcatatttatactagtaagggatgagtgcacacattcaacaaggatgccctatacaaatgtgatccaaattgtgctctaagttacaaaaacgaagatagctagaaaaccatggctacatagatccttcacatcgaaccatagctagaaaactacataaccaaggtagcaaagtatagatgtaattttggaaaccaaaagccaccaaaagtttcaagttcaaaacattactagtatattttgcttattttagaatagagaatgttcaagcgaaatgaacagctatcagggaaagaagaagaatttatgggtctattttagtaggtgatcagcttaagacgccgcatgcggtatctgatcttcttaggtggtcggtttaaggtgacacctatcgtaatgtatcttcataggcggcaccttaagtaggccacctatggtaatttatcttcagaggtgtctccttagacatatcttcgcagttggcctgctataggatcccccgtccacaactacatagacatgcgtttgttgctggcctgccttagaaaaatagatctcgcggtcaaaaattattttcctattagaggttataactttatgagatccaaacacgtataaaaatctcagtgtatcaaagtcatgccatcacgtatatataatatgcaagcaggatcctacgtataaaaatttccagagttcaggctatgattcaatgccatgtgtgtatcgggttgtgtcaggtgaatgggacatttcgatgtcggcctaaatgtttaggctagcaagatatctaggagttgatcatgattttggtacattgtgatgttggacagggatgtggtgataaatttaatacagctatttcttaagacaattattggagacaatatatctttatgttaaaaaaaatggtaggatgcatggcagcctagctagatgattaatagtgaaggggtccagcaccacaataatgcgtctctacatattaatgcaaaaatatgtacactactaagggattagtgcacaccttttaacaaggattacctaaacaaatattatccaaattgtgctctaagtagcaaaaatgaaaattttttatatgtgtacatacatatgtaacatattttttacggtaaatacatatgtagcatacatagatccatcaaatccaaagcataaaaatgctagaaaactacaaaagcagggtaggaaagtatggatattatctttgacgtcaaaagacactacatattcgagttcaaaaagttcctcctatatattgcttattttataagagagaaagctcaagctaaatgagcagctctcgaggaaagaaaaaggcatcatagatcctttttagcatgcagccagccaccataagccgccgcctacagtaactgatcttcaaaggtgactggtttaaggtgatgcctgcggtaatgtatcttcgtagggagcacctcaattaatccacctacggtaatttatctttagaggcgaaacttcaaatgtatcttcccaggtggcccttgtccacaactacgtagacgggcgtttgcggccgaaaatttgaccagtcatgctgagtaaaatagctcacctagtcgaaaatcatttttctatcggtggttgttactcctcggagatccaaacatgcataaaagtctgtgtctgaaagtcatgtcatcacgtatatatcacgtatacatatatatatgacatgcaagcagaacacggggtatacaatttagtgttgtgatcaaacatatacgaggcactagctagttagatcataaggacgacagaatgtttgcccctactagaatatatgatctcgcctcatcttttatttgcaccatgatactgccggtatagagcatgatctatttttgaaaaaccatgtattcctgtctttctgaacatcccaactgatcaacatgatcgccaatgttaagtccttctgacattctatctcagctaattgagtcatcactatccaccatttgaaaaacatagtgtgtgtatgctaattacctgtttcaggcgttgttagactatacaattgtttttccatactatatatatacactacggttgacaaagacatcccaacaactaaagataaatgacaaagtttttttccacaatcattactctctgtatatggcatcccaacaattgaagataaatgacaaaccaataaaccatttgtttttttccaccaatcattactctctgtatatatatagccttagtccgtatggagcacttgataagcttgtatgctaaatctccttcctcttccaacatgactcttgccaacattcctgagataatggaatctcttcccgtagagacgaggttcacagagtttcccttgcgacaatatggtggattttggttattggaggtcatgctcaatggcgttgctgcagctgaaactagctttcaaccgagaccatccgacatcctcctttcaagctttcctaagtgtggtaccacctggctcaaagccctcgcctttgcaaccctgaaccgttcgacttacccaccatcggatgaacatcacccgctcctcgaacacaacccccatgaccttgttgggtttcttgagatttaccccaagctcgagttgtacgagtcactcccatctccacggctgctctcaacccacctgccatattcgatgctgcctcatcgcatcagggaacaagaaacggggtgtcggctagtctacatctaccgggacccaaaggatgccatggtctccatgtggcaccagaacaagaaggagaagaagaataggttgacgttcgaggagatgttcgacatgttctgtgaaggacggtgtgttgtcggcccgcagtggtgccatgccggtgagtactgggatgagagccaggcgagacctgagaaggtgcttttcctcatgtatgaggatcttctgcaagatactgtgggcaacctaaggacgctggcggagttcatgggctgtgggttctctcgccaggaagaagatgacggtatcgtgcaacaaattgtagaactgtgcagcttgaacaacctgaagaacttgaacgtgaacaagagtggaactacccttctagggatctccaaagatggcttcttcaggaagggaggaaccggtgactggagcaatcacatgtcaccagagatggcagcgaggctggacaagatcgttaaggagaggctggagggttctggacatccaattatttccaggatcaatgcgaaagcaacaacttcgatcggttcatccaaccatggtgcttctgaagccaaatacattaaggagtaacaactcggctggctaattaccgtggctcatggtgctgtggattctgtgaagaccaggatctgattgctttttcattatcatttcagtcctttgtattccttgtgtttcaagtgtaatatgcccttcttttgggagcttctttgcaaaatcaactgtaccctcagttgctacttgctatcagggtttcccaaaccgctggggccagggttaccgtgtcccggcggtaagcacggttaccgcgcggtaatcgtggtaaccgtgaaaaaccgtacaaaaccgtgtaaaatttatcaaaaattcaaattattttttaaatttatttgaatttaaggaggttaccgcggtatttatattaccgtacccccgtggtaagcccggtaaccgcggtaaccgcacgtttaccggcggtaaaggaaaccctgcttgctatcgaataaatgtactgctgaggctgttgcctcagtttatgcttcaagaaaaaaaaaagaagtggaggtgaccggatgagtcaaccggttactgtacttgtgttttatagtactctctccgtttcacaatgtaagactttttagcatttttcatatttatatagatgctaatgaatctatacatacatatagtctagattccttaccatctatatgaatgtgagtaatgctagaaaatcttatattataaaatggtggaagtatgtaataagtgtcggactatagctatttatgtaagaataaattaaaatacctcaaataaaaaaacaattatctcaatgttgctttgttagaatggtttgtactcttgaaaggagactatgagaatgcgaaacttttacgaagtgtacaagaacagtgactacgtaaaaatttcacgttttgagtaacctgttccatcaaatttaaaaactgtttaatcagccttccgagctaaagaactgggggaatatgtggaaaattgctatgggcctatgtgcaatatatatccctatatacatgatgattgataggcaatccacaaagcctatcaatcatcagtgcaaatatatcatggtttaaatcaatagtttttcattttaaaatatatcatggtattaattgttagacacgacgtgaccatttgtcaacttaaaaaaattagtgcaaacttgtgcttaacccatcttcaatgataaaacaagtccaaacaaaataactgacacttatattgttttcttaaaagaaacaaatggttaacgtcgttaaacttcattaattactttaaaagcgtagtcattcttcttcactacctttagggatggcaatttcccccgcagggccgggtcccctgcggggacccgcccctacgggggcgggggcgggggcgatttttgacccgtgggtgcgtcggggacggggccccgcatttgggcggggaggggacgggggactgatttcacctgcgggtgacccgcggggccccggggagtacatatagacctcaaaatatagatcaaagaaagcccaaaaagcccagcccactaaaaaaatccttaaccctagcagcactgcagcagtgcagcacatccctcagtctctctcctccccacatccattcccctcccctcccgtcatccactcatcccgtgcggctgtggcgtgagccgcgtgacctaggcggcggcgcgcgctcgtgggcggctcgccggctcgcctctggatctcgccctctcggcgtcgccggcgcctgccagccgccaggccaccatctcctct

SEQ ID NO: 5349 - DNA, 17668 bp, Oryza sativa
catataaatgattagcaacacagtactatatatagccaccacatatgtaacaaagcatatatatttcagtgggtctcacaagtcagtaaataacaggggcatggcttaaaaaatgtcagatatagtgagcactaatcacatttgtttatgtttccatcaatccaaagaacacacatgtccatacagtggcatgatagttatggcatatgacttctaactcaatttaatcatgttagatactaaaattagttgcactgcagactctggcaatgtcctttatttgaagaaattatgaagttttggtaactatacatgctagcagaaaactagataaaatagctctgcattttacatggtgactttctttactttaaatacgacttgtaactatatgtccatacatttgtacaggaggaacaatcaactctgttactgttgaatggctggagcaaaccacgacaaaatcaaacaagtgatggctagaaaagctagtttcgacaacaatgttacaaactcattagtttcagaacttttagttttatcagacaacttgtatttcagcatttggaaatttaacatactcatattgtcatcattactttgggtatctgaaatatattatgtcttattcgcggaaatatcagacatcataattcttgtgcgcatgagttgcaagggttttgccatttaacatatatttctactcatgttgcaatagtaccaaatgatccatccaattactgatgtaacacaatttcttttctataaaagctagaagaaattcatttcattgtaataatacttattgccacaaaaatattttagtggcaataacccatatgatatattgccacgattaatgctatgtggcaataacatatattagatattgcaacgaaactattttgtggcaagcacaactaatgccacgcacgaagtggtggcaataattatttgttgcaacgatgttaagtgttgcaatatgtttttttgccacgattattttgtggcattatcaaagtttgttgccactagataaaaattgttgcaataacctattgctactgtttctattgccacggctagcaacggttttaaaatggtggcaatatgtatctattgccacgattttagcattgttgccacgatttttttcgtagcaacaaatcattttcctagtagtgatagagaggtttacattttaaaagagagcgattaactttgcaaataaagtttaaatccaagttaaaagaaattaagagaaggcaacatcacttcaacagaagaatcgagaagagtgcaactaaaatattttgcaaaacattttccctgaaaatttgagtctgtcaatggtggagaaaccctttgtagtcccggtttataacccccctttagtcccggtttccaaaccgggagtaccaatccgggactaaagatcgctatctttatctttagtcccgggtgaaataaccggtactaaagatcgatcttaccaaccgggactaaagatcgagctgacctttttttttttgcatggccctgtgtacttatacatatatatgttatgcaaatgcatatgtatatatacaaacaaatttactatatatatatatatatatatgaccaaaatatatttacattatagaaaatgtgtacacatgcatatagaaacatatgtagtcatgtattaattacaatccattatatgtcctagatagctacgatttcgacgtagtagtagtactcgctgctagctcagaagctaaggaccggtgaattgtgtttccgtcgtagtagaattcacccttgggatcaaggatttcttcgttgatgaatcccatgagttgttcttgaaccgccgcgataaattccttgtgtgtggtcaggttatccctcatgcgaataaactatatgaatgtatgaaattgattagtaattaaacaagaaatcgttacgtaatgaaattttgaatttatttgtacgtacatcgagctctcttgtggtgatgatttggtctgcaaggcagtggcaatactcgcacacgtaatagctgcacaagttagttccctgcttttgctttgcgcactacaaataaatgacaaacaacgagagatctaattaatatacacttgtatgtatttgaatcggagaaatataaatatagagcatgtgtactcacaggaaatttgaacttccgcctaagtctttctctccatttgccgcggaccaaatgacggaatcgataccaagccctacatggagtttaaagctatgattcgtagtagcaattaacataacaagattttcttaattaacagaggaacttatgacggtacctgtctataagttcgaaaaaatagtcaaacgtagactcttttttatccattaagtcatatacgttgacggtgcaggccgacaggtcgaagagtaaaagcacccagtggaatctgcaatgtgcgtgggatgcattacatatgaaacacttagcaagttcgtacgggaatgaaatttggtatgtaggaagacagtaaaattaaactaactctatgttgtacggcaacagtatgaacgtcttgtaatgctgcgccttcaggagatggacgagattgtcctctgtttcttgtggatattggtcaagcattgtgacgtttactctccgagggtcgatgaatccagtatcgaaaaccctccgccgtcgggccctttgaatctccattctacaacgataaaagggagtatattattttctatagtctacttatatacaaggacctaattaattaaaggagacgtatagtaagaaatctaactgaacgatatacttacaaaatccagcaactcataatagagacgtcgagggcgtccagctggtatagttcgtagattcccctgaaattgatccagagaatgtcatctccttgcaagaagtccgtgtccctgatcctcgctccgatcataagaatgtcatcaataaagaccaccacgaacttgtctaggtattccataaacaccttattcatcaagttcatgaagaaagcaggggcattggtaagtccaaaagacataacagtacattcgaacaacccatatctagtggtaaaagctgtcttaggtatatcttcctctttgattctcaactggtgataccctgatcgaagatctatcttggagaaaacagtggcacctttaagctgatcaaacaaatcatcaattctgggcagcggatacttattcttgatagtcacatcatttagtgcacgatagtccacacacatcctctgggtatggtctttcttttccacaaaaataaccggagctccccatggagatgaactcggtctgatgtatcctttctgaagcaaatcgtctacttgccttttgacttctgccaactcattggctgccattctataaggtctcttatggatcggagttgttcctggtcccaaatctattctgaactctatatcccttttaggcggcataccaggtaaatcatctgggaacacatcgggatactcccggactataggaatctcttccaaagttatttggttcagtcttgaccttaaggactcagaagacaatgcatgaacagttacaactcgaccatcattgctggtgagagttacttttctgttggcacagtctatcacacctttatatctggctaaccagtccatccctaggatgacatcaaggtctttggattctaacaggataagattggccagaaatggtactccttgaatttctattctgacagagaggctacgttgcaaagagagtgcttgattacttggggtactaaccatcaaaggacgtctaagatcttctacttccatcccatgatttcccgcaaaactcatagataagaatgaatgtgtagcaccagaatcgaaaagcactgttgcaggaactaagttaacaagaaacgtacccaaaatcacatctggagcatcttgagcttctgcagcagcgacatgattaacacgggcctttggcgctggtgcggtagagttgctctgagcagggacaaccttcacgcgtcggggcttcggacacttgtcagcgtaatgtcctgggtctccacagttgaaacacaccacgggctttctgccttgctccctcttggcaggttgttgctgtgtcgaggctgcaacagggcgtagagcttgattgcggatgttgttgccagcattgttgttgaagaactgacgctgcggacgaacaacagacgaagaacctccctgtggcatggactggggtcctaaagtaagacgcggcctctgactattcccctgttgtgtcttgaattgagcaatccgacgtttcttctgctcgatgcgattgtacttgtcctcctggcgaatagccttatccactaacttctagaaatcaggataatccccagtcatgagtgggtaagaaagctcatcattaagtcctgccaagaacttttcctggcgctcttcatcagtgcgtacatcttccggagcataacgagcaagacgattgaactcgtgcagatactccgtaacagagcgagatccctgagtgagcgacctgaattccttcttcttgagagacaccactcccgatggtatatgcgtcttccggaaagcagcggtgaattcaagccaagtgataggttcagcagtagtcctattcagacggaagtgatcccaccattcagaggcagggccatgcaactgatgggatgcaaatgagaccttctcctgatcagtgcattgaagcaaatccaacttcttctctatggcatggagccaatcaccagcttcaacaggattagtggtgctagagaaaataggcggcctcacacgaagaaattctgctaacttgttttggggaggcgcatagttatttccctggttttgctggttctgaagttgctgcatcatcatgttcattaactgagtctgttgagcaagaacttgggcaagtgtgggattctctccattgttattgttattgttgttgttggggccattcccgttgctgcgagtgagcaccatctggcatggacagggcacaagaagagaaaccgggggaaactacttaggacagagaattactttaacttttattgatcttaactgagtttcattattacaaaactgaagactctcacaccactaaactgtcacgcccggaaattcactagtaatttccgaactaatttgtgcataaaatcctcgtccaggaatcagccgaggtacacaaactgacaatttaatatacaaatccatcttaataataacgttacatacttacaaagaaaagaaaacagcagcggaattaacggtctagcgatggcttcagctccactcccacaggcagctcaactggggtataagccaaacgtcttctccttctggatcctttatcttcaactgaggtttgatgattattgcaagaatgagcatatgacatactcaacaagccacacagcaaatatgcaagtgcacatggattccaaaggatggcataatataggctcatttgcaaaagcagcatttagcaaagatttaagataagtaaaacagtagagtagttaatcatcaattttaatcaacactaaacagcacatccatgctgctcaggcctaaccaaacctgaacaaccaaccccggtcgtacagatcaaacctccaaaccaggaattatccattccaaaccaggagtcaaattaattatcacattattaacattgatgagtagtgtgagactaatcacgaaaaacatcgctcaactcgcccataaccgcgggcacggctattcgaatagttttactctggccagaggtgtaccactgtacccacaagacacgattccacacatgttgccatgccccgaaataccaccacggcattgcaaagggggaaatcgtgacaataccctctgcacaacacaactcaaaacagtgcaccgttcctggatcataatcaccccctctacaaccagaggcatggactccccagcgacccccacggacttctcgccgcttctcagtctggcactccataatgaatcatgctatacaaaagataaagccgttgcccacgctggcttgtggttggcacgataaatgtttcacaacagtagctcgcgaaccggtccttaattgtcatgagcacaaccatcaaaaccatatactcacaacccaccttaaccaggttttaattatcaattaattaacatcacacgattaatcatcgtgagctaccattaaatataaccataattaataagaataatataatataatttatatttaatcccctttaattagctaatgtttctaagcatggctaagcaaacatacatatagcatttaactgaaccaaaccaatatataaggttcatgctaatcaaattataacccataggaaaataagatcatcttcggccattaattaacggggaaaggttcaccacccgatgacattcaaaaataatgcatagttaaaataaaataatagctttaaacgggttcaacatgctcaaagggttgtttgggatctgtgtgacttgccttgagcttccgcaaacacttccgaaccttgctcaacgaaaacgctctcctccggaacgtcggaaactaaagcgaaagaataaaaatcaacaaaacagtacaaaaaaaagcataaacagtatatgtggatatttttaacatgtagatcttgattttagaaaaatttagcaacttgaaccactcgaaacggatctacagttatttagttatgattttccgaagatttaatctattagaaaaacgggaaaaagaaaaaaccgatgatgacatgatgacatcaccaaaggtggccggctaggatggcaagctcgccggagattggatgatcggctgcgaatttggaggacatgtacgcgtagaggacgatgagacgaacccaacggtactcaccctcgagccaaacgacaaacgacgacggccggcgacgaaggggcggcgacggcggctcgggataaccggcgacggcgagctacggcggccggagacgaaggaggaggtgcggccgagcttctcgtcgctcccacgcacctaatggcggtggcggcaagcggcggcgacggcggagacggctgctcggcgcggctgcaacccggccggcagtagatcttgattttagaaaaatttagcaacttgaaccactcgaatcggatctacagttatttagttatgattttcagaagatttaatctattagaaaaacgggaaaaagaaaaaaccaatgatgacgtcatgatgacatcatcaatggccggcccgggttggcgacctcgccggagattggatggtcggctgcaaatttggaggacatgtacacgtggagaacgacgagacgaacccaacggtactcacccttgagccaaacgacgaacgacgacggccggcgacgagatgaacggcggcggcggctcggcttgaccggcaacggcgagctacggcggccggcgacgaaggaggaggtgcggccgggcttctcttcaccttggcgcacctaaaggcggcggcggcaagcggcggcgacggcgaagacggcgactcggcgcggctgcaacccggccggcggcggcggcggactatgcggcgtcgacggcgggctacggtgcacgggagaggacgggagagggggaaaacgaaagaggaggactagggggtcctatttatagccttggattgaagagatcggactcctcccgcaagaaatcgatccgggaaatcaaaaactcggttttggagataaactcaaaaacgagttcgattcggataaaatactcaacggtttgctccgattcttgggggagaggatagaggaggataagaggaatatttcccctcaacaaattttgcaaacggagctcgggatgtggcggatttaacggaggaagcggcggctgcacagggcacagcaccggcggctcggctctgtccaagcttgaagatgaatagtgccagggaggcaaactagactttcggctgggcttctacttccaaggactgattaaaggagggaaataaagcagacttcgggaaagagaggaaaagggctgcaggctgagaggagactgggccgagagtgagaggacttttcctaattcggcccgaaaaggaaaaggtgaactttaattacttttccaattaaattaatcactgaaatgatctttgaattgttaaaaatacttccaatgctcaaataatttcaagaaaaatcttgaaaatacttggacactcaaagtacttaacaaaattataatcagaccatttaatgattaatttaatatttaaacaattgctgaactgctctttgtatgattaaaattaacaattgagctccgaaaaatccgagaaaattccagagagtataattaaccatggagaatttaataaaaattaaatccatccatgctttatatttaggaaattttatttcccacatttaacttcacttgtaaattaatgaacatttaatataaattctaataataatttattaaataatctataaatcctgaaacaaaaatcaggatgtgacaacgatgacgtcagcgatgacgtcaccaccggcggcggcggctcggcggctcggacgcgcatgctcgcctgcgaacggcggcacttcggcacgaacggagggcaccaacgggtagagcgcgacgcggcgaactcaccgatgaccaaaggagcggcggaagaccaacggacggcgacggcgacgaggttgaaacggcggagctcttcggcttgacgacggcgacggtgctccggcggtcttcggcgacggcgaaggggcggacgaggacggcggcgacttggcgaccacgacggtggtcttcccgagcgacggcgatgaccggaacggcggcggcgcacggctggagcgacggcggcgacggcggctcgaggctactcggcgctagggcgctacggacgacgagaggcgaaggcgagggtagcggcgggtagagaagagctcgggggtccttttaaaggggttggagggcgacggcgaaggcccacggcggccggcgacgagaaggaaaggtcgggctcggagagagaaaagccgatccgattcgacctcgaatcaaacgctttccaagccgatttagccgatgtttccaaaagggaaaaggtagaggagatcccgaggatcatttcccctctatcaattcggccggagaaggaaaggagcggccggatttggaaggagacggcggcggcgcagcgctagggtttcgggaggcggccgacgcgaggaagacgacgacctgacaggcgggggcgcgcgcgcgtgggcggctgcggactggactgggccgacttgggccgaggagagagagaacggtttttgggccgactttcggcccagagccaaaagagactctttaaaacctttttcaatttaaattattcatgaaatgcaattccatttattaaaaatacttccttagctcaaataaatcccagaaaaatctaggaattatagaattaagcaaagtatttaatgaaattttatctggccccattttatattggaatttattaattaaaattagatcttctcttctaggcttttaaaataaattctaataattccaattaaacaacaatttatatattttgaatttttcagggtgtgatatgtaccactgtacccacaagacacagcctcaacatcatgtctaccatgcgtcgcgatactggaaagtacccgaatagaggctgtgacaataccctctgcacaacacaactcaccacagtgcaccattcctggatcataatcacccccttataaaacaaggcatggactccccagcgacccccgtgggcttatctccgccacttcttagtctggtgctccgcaatgaatcatgctatacaaaaggtaaagccgttgcccacgctggcttgtggttggcacggttaatgtttcacaatagtagctcgtgaaccggtccttaattgtcatgagcacgactctcaaagccatgtgctcacaacccaccattatcaagttttagttggcaagtaattaattaaccaatcacgattgaccatcgtaaactatcattaagccatcattaaataataataagtcataagttatcccaatagtgtgctaatgtttctaagcatggctaagcaattacatctaatatctagctgaaccaatgtataaagctcaactagtctagttataataacccaaggtatcaaggaataaagtaatcaatgcaaacaggccataacaaaggaatagattcacaccacccagtgacattcgaaaataaatgcacagttgaaataaatagagaatttaaatataggatcaaaatgctcaaaggattgtgtttaggatctgtgtgacttgacttgcaatattcggtctacaattaatcttcttgaatacttccggcgcactcgcgaaccttcgcaacgacggaaacgacaagctaacacgcaaaacgaagaaaaagactaataaaaaccaaataaacaatacataaaaagtaaacaaacatgtagatcataattttagatgaattatgagacttgaacggcctcattctgacttcaaatgaatttattacgaattttacaagattaaatctaattaaagcccatttaaaaagaattaaataaatttaattcaatttatggataattttaatatgtagatctttattttacacaacttttgcaacttgaaccacattaaactgagttacaatgaattagttatgaatttttaaagattaaaccggattaaagcatttatatggattttaattgaattattacgcaataatgaactatttttcaaaaggaaaaggaggattattgcgtcatcaaaggcagtccgggtgcacgggacggtctaaggaaacaaacggccgagatcgatcctatccaaaacggacggccgagatcaacttgatctaccgcggttcacgggacaaggcgacgatgacgtcagcggtgacgtcagcgatgacgtcatcaccgacgacggctcggcctcgcacgctcgccggcgaacgacagcgcgacgacgcaaacggaggacaccaacgggtagaggacaacacggcgaactcaccggtgaccaaaaccacggcggaagagcaacggacggcgccggccatgaggaagaagcggcggcggtcttcgggtcgacggtgacggcggtgctccggcggtcttcggcggcggcgaagcggtggacggggacggcgacgacctcgcgatcccgatggtggcgacggcgaccgacgacggcggctgcaacggcggcgcggcgcggctgaaccgacggcaacgacagcgacggctagggctacgcggaggcggcgctagacgcgacggcgggctaagacaaaggtggcggcggatagaggagagctcgggggtgcttttaaaggggctagcgagcggcgacggaggcccacggcgaccggcggcgagatggaaagctagggttggagggagaaaagtcgatccgaatcgagctcaaatccgtcgatttccaaacgaaattgaccgaagtttctataagagaaaaggaagaggagatcgaggagattatttcccctcaaacgatttcaccggaaacggaaaggatcgaccggattggaaagcggcggcggctagggtttcggccggcagcggcgcgaggaggaagacgggcctgacaggtagggcccacctctcagcggctgagagagaggaggaaggggcgcggcggactgggcggactgggccggggagggagagagaaagagagaggggttttgggccggctttcggcccaaagccaaaaggaggatttaaaaacatttttctatttaaattattcatgaaatgcaattccatttattaaaaatactttcttggctcaaataaatcccagaaaaatctaggaactaaagattcaagagaagtatttaacaaaattttatctagcccaattttatattgagatttagcaaattaaaattagatcttctcttttaggcttttaagatcatttctaataattccttttaaacaacaatttataatttaaggatttttaaacaagaaaagctcttaacacttataattagatcattaattgattaactaattactgaactgttctttgtatcatttaggaattgagctccgaaaaatccgagaaaatttcagagagtagacttaatcatggagaatttaataaaaattaaatccatccatgctttatatttaggaaattttatttcctgtcacaccctgaaaattcaaaatatataaattgttgtttaaatggaatttttagaaataattttaaaagcctagaagagaagatctaattttaattaataaattccaatataaaatggggccagataaaatttcattaaatactttgcttaattctataattcctagatttttctgggatttatttgagctaaggaagtatttttaatgaatggaattgcatttaagaaataatttaaattgaaaaaggttttaaaaagtctcttttggctttgggccgaaagtcggcccaaaaccgctctctctctcctcagcccaagtcggcccagtccgccgtcgcgcgcgcgcgcgtccgcccgctgacaggtggggcccatcgtcttcctccggccgaaaccctagtttcgcgccgccgccgccgctttccaatccggccgctcctttccgtttccggccgaattgatagaggggaaatgatcctcgggatctcctctaccttttctcctttggaaacatcggctaaaatcgtttggaaattcgtggattcgagtttgtttcggattcgattttcccgaactttccttctcgtcgccggccgccgtgggccttcgccgtcgcctcctagcccctttaaaaggctccccggtgtctcctctacccgccgccaccctcgccttcgcctctcgtcgccggaagagctctagcaccgtgtgccctagcgccgccgtcgccgccgtcgctccagccgtgcgccgccgccgtttcagccgtcgtcgtcactcgggaaggctgccatcgtggtcgccgtcgcgtctccgtcctcgtccgccccttcgccgtcgttgtagaccaccggagcaccgtcgccgccgtcgacccgaagaccgccgccgtttcttcgtcgtcgccgtcgccgtccgttgatcttccgccgctcgtttggtcaccggtgagttcgccgcgtcgcgctctacccgttggtgccttccgttcgcgccgccgtgccgtcgttcgccggcgagcatgcaagcccgagccgccgagccaccgccgccggtggtgacgtcactgctgacgtcatcgtcgccctctcccgtgagccgccgtggacccgatcgatctcggccgtccgttttggatggatcgatctcggccgtccgttcgcgtgaaccgccgccgtgcgcccggtccaccgcgaaaccctagtcgctgacgcaataaatcctcttttccttttcaaaaataattcattattgcgtcataattcaattaaaatcaatttaagtgttttaatccgatttaatcttcaaaaattcataactaattcatctttgctcggatttagttggttcaagtctctaaatttttctaaaattgagatctacatgttaaaaatatccacatgtactgttcatgcttgtttatgtgctgttttggtgattttgctcttttctgcttagattccgtcgtttctggagagtctgttttcgccggagaagagtttgaagagttccaaggccagcaaggcaagtcacacagatcccaaacaaccctttgagcatgttgatcccgtttaaagctattgtttcttttcaactattgcatttattttcgaatgtcattgggtggaattaacttattgtttgttatagcctttttgttcttgattaccttattccttgataccttgggttattataacttgactagttgagctctatatgttggttcaactagatgtattagatataattgcttagccctgcttagaaacattagctcactattgggataactcatgactcactattatttaatgatggcttaatgatagttcacgatggtcaatcgtgattgattaattaatgtgccaactaaaacctgataatggtgggttgtgagcacatggttttgatggtcgtgctcatgacaattaaggaccggttcacgagtttcggttgtgaaacattaaccgtgccaaccacaagccagcgtgggcaacggctttatcttttgtatagcatggttcattgcggggcaccagactgagaagtggcggagataagcccacgggggtcgctggggagtccatgccttgtttttaagggggtgattatgatccaggaaggtgcgctgcggtggattgtgttatacaaggggtattgtcacaactcctttccgaggtaccgtggtggtattgaggcacatggtgacatgatgtggggttgtgtcttgtgggtacagtggtacacctctgatcagagtaaaactattcgaatagccgtgcccgcggttatgggcgggtctaacaatgtctttcgtgattagtctcacccttctcaccatagtaaatgatgctataattggtaataatttgattagctcctggtttggaatggtacaatcctggtttggagatagaactgtgtagccgggatggttgttcagaatggttgggcctatacaatagggtatgttgtatagcgttggattaatattgtttaatacttaactgctttattaaattctcaaatgtttgttaaatgctgcttttgcaaatgcaaccctactatgccatcctttgttatcctgtgcacttgcatatttgctgcgtggcttgctgagtatgtcatatactcaccttgcaatcattcatcagaggaagagttctacaatgaggctgatggtgtggaggattaggtgtagccttggtcaagctgcctgtggagtggagccgtctgcgccgtttatcttattttccgctgcttagatctttattgattgagaggaactatctacctctgtaatgacattttattcgcttattaattagagtaataattgtactctattatcaatttgttattgtgtgcctcggctgattcctggacgagggttcacacacatgtaagcgtttggaattttggatagaaattccgggcgtgacatttcccacatttaacttcacttgtaaattaatgaacatttaatataaattctaataataatttattaaataatttataaatcctgaaacaaaaatcaggatgtgacagattgtatcgtacaatatctgttcctcatcgcggtcagccatctgttgatacaagaaacatctgctaagtcacgagacatttatgttttaacaatctaagtcatgtatgctaagtgtaaatgtcgtacattagaaccctacacaaccttacgttctaagtctaattacaaatcgtgatataagctaagtctaggtgacgtatattatacaaccctagctagtaaataattatatactaagtctaattacaaataaaataatcttatattaaaactcaaataatattacatgctaagactaaaatagtcatgtatatgctaagtgtttcgtgcgtatatgctaagtctaattaagactacaatagtcaattgctaggagtcgcaccaattccgtagtcaataattacatactaattctaattacaaataaagtaatcttatattaaaactcaaataatattacatgctaagactgaaagagtcatgtatgctaagtgtaactgtcgtatatgctaagtctaattaagactaaaattgtcaattgctaggagtcgcaccaattccgtagtcaataattatatactaagtctaattacaaataaaataatcttatattaaaactcaaataatattacatgctaagactaaaatagtcatgtatgctaagtgtttcgtgcgtatatgctaagtctaattaagactacaatagtcaattgctaggagtcgcaccaattccgtagtcaataattacatactaagtctaatttgcaataaaataatcttatattaaaactcaaataatattagaacactacacaatcttatatgctaagtctaattacaagtctaatattcttaattgcattacaaatataacaatcatttatattattacttcacttgcctgcacgaattccttctagggctagctcttccactccggcttgagggacgactccgacaacacgtcttttctgcaagatacaaaaaatatgtattaggataaatgcgaagtaacatatatatattgcatttcacgttcacgttcgttcgctcgttctcattcacgttcgttctcgttcacgttcgttgtcgttctcgttcacgttaattcgttcgatcgttctcgttctcactctcgttctttcgatcgttctcgttctcgttcacgttctcgcggcaacgtacattgacgtgttcgttctcgttcacgtgtcgttaacggcggtgtggtggcatcgggccggcgcttggcgcggcggcgtggcggcggcggcggcggcggcgttgcgcggcggcgaaggcggcggcgcggcgtggcgtggcggcggcggcgttgcgcgcgcggcggcgaaggcgcggcgtggcgtgccggcggcggcgtggcgcggcgtcggcgtggcgcggcgtccgggctttggatgttttgtggtgggtggcgtgaggagagagagatcgagatagagatggatgaagggagaggtggtggcggctctcaccccagagatgcggcggcggaggaggaggcggaggcggcggcgaggacgacgagctcgagacgacagcgagatatggcggcgtcggcgcggggatttgccctaggcagtggcagcgaaggagagaggctgagagagatcgatcggccgaaaacgttaagtgttggtggagaagacgagggcgcgcatcaggaatatatatagccctcgatctttagtcccggttgatgagaacaaccgggagtaatcatcaaccgggactaaagatattttcccactatttctaaattctttttaaacccggttagggttaagaaccggcactaaagattatagcactgcatattattttcgcttacatatgtgtttctaaaatagaagttaatgcattaacattatttaaattacaaagattaatgacaattacttcgaaaaattatttttgtctgtaataaattaagtggataaatcgtaataagcaaatatatgacttaaaattaataaaaattccaataatcatatatacttagcatatgaatgatattattaaattggtaaaaactctaattaagatttgtatgtacatactgcatgatttaaaattaataaaaattgtaatcatcatatatacttagcgtaggaattatattaaattaaatgttaaaaactctaattaacatatgtaaatgccacatgcatgatttaaaccttttaaaaattcgaatagtcatatataagtagcctatgaaagatagtaaattaaattgtgaaaaactctaattaacatctgtaaatgccgggctgcagga

SEQ ID NO: 5350 - DNA, 5972 bp, Oryza sativa
  unsure (1)..(5972): unsure at all n locations
ggtacttattatggcggagcctagtagcctagctacgtgtttaagatgagttgcatctatttgttgtgtcctataccatgcacggattagaccagacaaataatggcctagattatacatggatacaatggattattctaattagatatgtcatgttgggctcttagttataccacatcttagaaactctagtatgtgatacatagatgctagattatcatatctgatatctaggtattgggtcgaatacctaggtaccaggtatgaaacctataaatacaagatctgatgctgagttatccggcctgatacctataagtaccggatccgataactaggtatcgcgtctgatacctgagtactagattggatacccgggtatcgggtatctgatctcatacctatgagtatttgttccaatatctatgtgtaacgggtcggatacccaggtaccgagtatgatacttatgaataccaagtctgatacctaagtatcgggtctgatacctatgagtaccggattcgatacctaggtcaggtttgatacttatgagtatcggatccggtatcgcgcatgatacctatgagtatcggatcggatacccgggtatcgggcatctgatcttatacctatgagtatcagttccgatacctgtacgtactgggtcggatacccaggtaccgagtataatacttatgaataccaagtctgatacctaagtatcgggtctgatacctatgagtaccggattcgatacctaggtcaggtttgatacttatgagtatcggatccggtatcgcgcatgatacctatgagtatcagatcggatacccgggtatcgggtatatgatcttatacctatgagtatcagttccgatacctgtacgtactgggtcggatacccaggtaccgagtatgatacctatgaataccaagtctaatacctaggtattgggtctgatacctataagtaccggattcgatacctaggtcgggtttgatacctatgagtaacggatctaatacctagataccgggttgatacatattagtagaggatctgatactaaatatagggtgtgatggtacgagacttcagatgtgataccactaattctaatatttatgggttatatacttctattcaacaatcaaataaaaagatggaccatgcatagctaggccagaaagtacaaccaaacttgctcacatgccgctgacatgctttgtttaggctcatgctactagctctagtgcttaattctaactttactagttgaaccaggtgtcagacccatatggacctaaagaggtgtagaagtagtgctgtattagagtatttcatagctattttgtactgtaggagaaaagagacctctcgtcagtcatcactagtcggcagcctccatgtgaaaggacagcacacgacacgcttttagagagaaaaagaatcggtgagtgattggtaagtataaattataaactataccgttgagacagtacaccgtcccatagtttaatttggaatcaaaccggcccactaacatacgagaaagactggtacattggcccgcaaatatatgggccttttatctgttcatctaggcctacccaatctcggagtttttcacaaaaacccctgatattaactctagcaacatataggtcctgatcttttctaagaagccccccttttcagtccagatatttgcataaatatcccttattttaaccgttaacatcctcagcggtcaggattatagcataaaagcccttgatactgctctagagtcccccccccccccccacgacgccttcagcgacggggtgcccatccgactccgacgacgttttttcgcctcgccgccgatgatccccgccgggcagccatgtgttctaccctacccacccaccagcagccgattgcacctgccactgcggttcttccctcaactgtagagtggtcagcggagatggccggcagacggcaggggggcaaccttgcctggggaccgcgcctggcgccgtgcttggagacgacggtcacgtggttggtcgccgtgatgaagcggcttctcgacttcaacccctgcgccccactggagtcccagcagtacacggggcaaggccccggtacattgttcacccctcgcacatgacttgtttgttgaattgcctgagtggaaatcttacgcttacctgacctgcgctatgtgtttctttgatgattgagttggtacatgtgttctcctatttcatcatactttgtttcaaacttatactccatcccattttgcaaatgagatatgatgatgacatgatgtacagatgaaagaacgagctataagctggactgctagagagctggatggagaaggtcaaagcgcacaacaaggaggagctcttgcgcaagcagagctctttgctgggcactgatggtaaaccggaacaaagtattctcgaggcaactatttgaactcattggaaaatttgtcaaccgtttttctcttgacaaacttcggccaacgaacgcatcgccagcccagcaaaaagaatgaactgtcaagcattctaaaatcttaaaaagcccccccaaaccccccacctcttttacacccccctcttaaatatttggggggggcccccttttttttttttaaatatctagggctgttangtcccacttttttcttcaaactttcaactttttccatcacaattcaaactttttctacccacaccaaactttcaacttttttcgtcccattcatttcagatgggattgaggcctncaatntgacggtaactaaacacantccttaatatgtggtagagatgctacagtcaatanggtattaaagatttgattggaatgaaaggttttttgaaaaggtaaatgttagtcttctgtttttgcgtgcaagggtactgaggatttcagcttattgaagaaccaaaacttcatcatgaaagcaatatttttttagctttgtaaatcctaattgtagcaacagaaaaatgcactctatacgagagtatagaagatatttgcttcaaaacaatcttgatcacatatgaattcattttatcttttaaagtcactgattccttagcttagtagcccgttcatacccaggctaagatttaaagtggattttagtgcagaacatactaacataagacagccccactgactatttgcatagatacacattgttgatgtgttcctgcgtatttctgcctactgcaatcctttgtttttctcaccgggccggcctacttccatctccacttgggcatgttcttttacattgctgatttatcactttatttttgtactttgattatagtgaacttcatgattgctggcgtacttttaccatcatgttctcccatacaacttagactgcgcagggtgcaatgctacgattgattttcttttttaccttttgaatttaattgtacaatgaattggatgaatgcccaaaaagcaattggaagttttctgcagccagtcttagttttagcacgattagatgtgagctcatgaaaatttcgtcttttgtgatctcaactgctcaaggttcttttgctgccttttctttggactcaactttgactaagttctttgagctactgatgggcattgatgtttttcttggtgcaggatacttgataatgtaacctaaaaaagcaggatggacaatgaaactgaaagaagcaaagttgtgatgatgagatgagttaaactactggctgataacaaagttgcagtaatttctatgatccccctcatgctcctactctgtctttatatctctttatttgttttttttttcctttgcaactgtgcccttgctttggaacaaaactttgataaccatttaacacaatcgtcaaagcagaaggaaagcttatttgcaattcccttttggaactaatgacatctgtttaagtaacaacgaccaacctcaaaacttctgctgcaacattgtgtactttgttgctagactggatgaacatctagctgatgttctgttttagcattgctttacttgagacttgagagagcctgctaccagtttcacttaaccattcgtgtttatcttcccaggatttaatatgctggaattaggaagtctgaacaacattttgtggaggctactttattaaactgcggtgctgctctgtccaaacttgcgctaactgcgggagagaaggggggctagcgtgaaaagaagaggtaaagaaagagaaaggcaaaggcgcgacatgatgcctcgtccaagctttttgttgtcacgctgccaaagaggacaaggatttggccctgcttctcttcttcttcctcctcttcttgcggtaagatcactactactattaccatcaccatcaccgcatcatttgccaaaccatggaccagcttgcctttttccaggttgcagctgcctgacgcagtttagccagccactgtaaagtgcaggtccatttatctgacaaatagagtatgtgagcttaataattgtacagttttttcaaggtcaattttaggggagtaaaacacaattagttttggaggggaaatagcttttgacattgctgtgagatgaggggttggtttggtctgtggcctaaataggtattaccaaattttgtcaatgccaaattttggcaagttttggcatgactaattttggtaagtcaaaattgtgtttggattgaagccaaaatagcctaagttcactattgaaatggcatattttcttaagcatgccaaaatttggattcaaaccaaatagacactaaacactgttgaaattgacaaatattggtaagtctaatttattcctcaaaccaaaccagcccgagatggtttgtgtaggtgaactggtgaacagtttggcctgcatctgcattggtaggggcctaggagcagacaagaacagagcaaaagtgaaaagtggaagcatccagtactgtcaatctgacactggcgccacagctctcgcgaccactcctcatctcacacttaccgaagcaacaataaaaccgttctatcctcgcttcaaaaatcgatcaaaaaattcaaaaatcaaaagtgaaagaaaggaaagcacacgatgcttctcttcacccaatgcagatcgatgggggtcgtaccagtagcagagatcatggctgtgagcctgtgattgagtgatccctttcctccatgccaatcttgaatctttctagctaaaagaatcatctgtgctcttgtgctcgcagctagctgcacagtggtgacaatggcgatgctgctgttgttgcgttctttggagttcttggcgatcatggcggttgcatcgagcttggcaatgccggtggcggcggcggcggcggtgccacagccggagccggaggtgaagccgagcgacaccgacgcgctcaccatcttccggaacggcgccgacgcgcacggcatcctggcggcgaactggagcacctcgaacgcctgcgccggcgggtggatcggcgtcggctgctccggcgacggccgccgcgtgacgtcgctgtcgctgccgtcgctcgacctgcgtgggccgctcgacccgctctcccacctcggcgagctccgggcgctcgacctccgcgggaaccgcctcaacggcacgctcgacacgctcctcctcggcgtccccaacctcaagctgctctacctctcccacaacgacatctccggcgccatcccggacgccatcgcgcggctcctccgcctcctccgcctcgacctcgccgacaacagcctgcgcggggccatcccggtggccgcgctcgccaacctcaccggcctcctcacgctcaagctccaggacaacctcctcaccggcttgctcccggacgtcaccgccgccctcccgcgcctcgccgagttcaacgcctccaacaaccagctctccggcagggtgcccgacgccatgcgcgccaagtt

SEQ ID NO: 5351 - DNA, 13311 bp, Oryza sativa
ctgacagctagctagtacccagcatgcctaagtcatgcctttgatactagcctagctagtaaataaaactggaggtactactagcttgttgtgcatgccaaatccctgtaatagctacctacgttacctagatacggggatacggatatggatacacgatacgtcgatacgggatacggcattttccaaaaaaacaaggatacggggatacgcttttatatatatatatatatatatatatatatatatatatatatatatatatatatatatatatagtaaatttgtttggtgctccatggtgcccgggcaccattgttgaaattgagtatatacccaattcaaatgagtatgaaacttttttaattatttaggtattaacattaactacttttactaactagttcaaagcaagtttgaactgaatttgaacttatttttgttagattttgattctaggtatatagcatccatacatataattagttaggtatgtaatcatggattgtgaaataaagttaaatttgagttgttttgttgataggtataggtacgaatcaaattcttataactaggtatatactcacaattagaaaattttgaaaaatttgagtgattttgtgcatttgaaaccatggtgcccgggcaccatggtgccccatatgagtgtcctatatatatatatatatatatatacacaaaaaaaattaaggaaattgcatttatatataaaaaaaatacaaaaaatcaaggaacttttataaagaaatagcgatataatactagtatcagtgtagcagattccatatcaatattctgcaattttctcttctataagcaattcaaattaacaagcgattaagatcccaaaaaccacatattaatagttcaatcatatatttcttgatgactttgcatcaacattagaagccgcactaagcagtaacctctaggattgctagatgcactagcacttgtatctaataaaaacgatagtactttgtcctaaggaaaacaagaaaggcacagcagattcaagcatgaaacttttgaagataatggattacccggccaggcagtcaagcgaagaaagaaaaagttgctccgtgcttcgatgctactagcctgccactggccaccgctatgcccggcggccggcgtcggaggaagtgcctcacgcagtcacgcggcaagccggcaacagttctggcctcgaggttggcggcaaaagaggtgcgccaccaccaggctggcggcggcggctctgccgtctcgcgtaggggacgttgtggccccgcgcacggcagcgacgcgcgcggctgcagccggcgtccggcggcaacgccgggcacgcacgagaggcatcagccatcaggttggaagctcgtgaggtggcgcatccctgatgcgagcgaagacggaggaaggtcgtggcgtatcgctggcgtatcgtgatttatttatttttttggaaatcgcaaatatgtgggatacgtacgggatacgtatcggagcgtatccgatacgtatccgtatccgttgccgtatccgatacggatacgtgactatgcagccgtatcagggtaacccagatagctactagtagacctgtaccctagctatgtagggtacttattatggcggagcctagtagcctagctacgtgtctaagatgagttgcatctatttgttgtgtcctataccatgcacggattagaccagacaaataattacctagattatacatggatacaatggattattctaattagatatgtcatgttgggctcttagttataccacatcttagaaactctagtatgtgatacatagatgctagattatcatatctgatatctaggtattgggtcgaatacctaggtaccaggtatgaaacctataaatacaagatctgatgctgagttatccggcctgatacctataagtaccggatccgataactaggtatcgcgtctgatacctgagtactagattggatacccgggtatcgggtatctgatctcatacctatgagtatttgttccaatatctatgtgtaacgggtcggatacccaggtaccgagtatgatacttatgaataccaagtctgatacctaagtatcgggtctgatacctatgagtaccggattcgatacctaggtcaggtttgatacttatgagtatcggatccggtatcgcgcatgatacctatgagtatcggatcggatacccgggtatcgggcatctgatcttatacctatgagtatcagttccgatacctgtacgtactgggtcggatacccaggtaccgagtataatacttatgaataccaagtctgatacctaagtatcgggtctgatacctatgagtaccggattcgatacctaggtcaggtttgatacttatgagtatcggatccggtatcgcgcatgatacctatgagtatcagatcggatacccgggtatcgggtatatgatcttatacctatgagtatcagttccgatacctgtacgtactgggtcggatacccaggtaccgagtatgatacctatgaataccaagtctaatacctaggtattgggtctgatacctataagtaccggattcgatacctaggtcgggtttgatacctatgagtaacggatctaatacctagataccgggttgatacatattagtagaggatctgatactaaatatagggtgtgatggtacgagacttcagatgtgataccactaattctaatatttatgggttatatacttctattcaacaatcaaataaaaagatggaccatgcatagctaggccagaaagtacaaccaaacttgctcacatgccgctgacatgctttgtttaggctcatgctactagctctagtgcttaattctaactttactagttgaaccaggtgtcagacccatatggacctaaagaggtgtagaagtagtgctgtattagagtatttcatagctattttgtactgtaggagaaaagagacctctcgtcagtcatcactagtcggcagcctccatgtgaaaggacagcacacgacacgcttttagagagaaaaagaatcggtgagtgattggtaagtataaattataaactataccgttgagacagtacaccgtcccatagtttaatttggaatcaaaccggcccactaacatacgagaaagactggtacattggcccgcaaatatatgggccttttatctgttcatctaggcctacccaatctcggagtttttcacaaaaacccctgatattaactctagcaacatataggtcctgatcttttctaagaagccccccttttcagtccagatatttgcataaatatcccttattttaaccgttaacatcctcagcggtcaggattatagcataaaagcccttgatactgctctagagtcccccccccccccccacgacgccttcagcgacggcgtgcccatccgactccgacgacgttcttccgcctcgccgccgatgatccccgccggccagccatgtgtcctaccctacccacccaccagcagccgattgcacctgccactgccgtttcttccctcaactgtagagtggtcagcggagatggccggcagacggcaggggggcaaccttgcctggggaccgcgcctcgcgccgtgcttggagacgacggtcacgtggttggtcgccgtgatgaagcggcttctcgacttcaacccctgcgccccactggagtcccagcagtacacggggcaaggccccggtacattgttcacccctcgcacatgacttgtttgttgaattgcctgagtggaaatcttacgcttacctgacctgcgctatgtgtttctttgatgattgagttggtacatgtgttctcctatttcatcatactttgtttcaaacttatactccatcccattttgcaaatgagatatgatgatgacatgatgtacagatgaaagaacgagctataagctggactgctagagagctggatggagaaggtcaaagcgcacaacaaggaggagctcttgcgcaagcagagctctttgctgggcactgatggtaaaccggaacaaagtattctcgaggcaactatttgaactcattggaaaatttgtcaaccgtttttctcttgacaaacttcggccaacgaacgcatcgccagcccagcaaaaagaatgaactgtcaagcattctaaaatctaaagccaacactacctattgctttatatcttagggctggtttagttcccaactttttcttcaaactttcaacttttccatcacatcaaaacttttctacacacacaaacttccaactttttcgtcacatcattccaatttcaatcaaacctccaattttgacgtaaactaaacacatccttaatatggtggtagagatgctacagtcagtagggtatgaaagatttgattggaatgaaaggtttcttgaaaggttaaatgttagtcttctgtttttgcgtgcaaggtatacttaggatttcagcttattgaagaaccaaaacttcatcatgaaagcaatatttttttagctttgtaaatcctaattgtagcaacagaaaaatgcactctatacgagagtatagaagatatttgcttcaaaacaatcttgatcacatatgaattcattttatcttttaaagtcactgattccttagcttagtagcccgttcatacccaggctaagatttaaagtggattttagtgcagaacatactaacataagacagccccactgactatttgcatagatacacattgttgatgtgttcctgcgtatttctgcctactgcaatcctttgtttttctcaccgggccggcctacttccatctccacttgggcatgttcttttacattgctgatttatcactttatttttgtactttgattatagtgaacttcatgattgctggcgtacttttaccatcatgttctcccatacaacttagactgcgcagggtgcaatgctacgattgattttcttttttaccttttgaatttaattgtacaatgaattggatgaatgcccaaaaagcaattggaagttttctgcagccagtcttagttttagcacgattagatgtgagctcatgaaaatttcgtcttttgtgatctcaactgctcaaggttcttttgctgccttttctttggactcaactttgactaagttctttgagctactgatgggcattgatgtttttcttggtgcaggatacttgataatgtaacctaaaaaagcaggatggacaatgaaactgaaagaagcaaagttgtgatgatgagatgagttaaactactggctgataacaaagttgcagtaatttctatgatccccctcatgctcctactctgtctttatatctctttatttgttttttttttcctttgcaactgtgcccttgctttggaacaaaactttgataaccatttaacacaatcgtcaaagcagaaggaaagcttatttgcaattcccttttggaactaatgacatctgtttaagtaacaacgaccaacctcaaaacttctgctgcaacattgtgtactttgttgctagactggatgaacatctagctgatgttctgttttagcattgctttacttgagacttgagagagcctgctaccagtttcacttaaccattcgtgtttatcttcccaggatttaatatgctggaattaggaagtctgaacaacattttgtggaggctactttattaaactgcggtgctgctctgtccaaacttgcgctaactgcgggagagaaggggggctagcgtgaaaagaagaggtaaagaaagagaaaggcaaaggcgcgacatgatgcctcgtccaagctttttgttgtcacgctgccaaagaggacaaggatttggccctgcttctcttcttcttcctcctcttcttgcggtaagatcactactactattaccatcaccatcaccgcatcatttgccaaaccatggaccagcttgcctttttccaggttgcagctgcctgacgcagtttagccagccactgtaaagtgcaggtccatttatctgacaaatagagtatgtgagcttaataattgtacagttttttcaaggtcaattttaggggagtaaaacacaattagttttggaggggaaatagcttttgacattgctgtgagatgaggggttggtttggtctgtggcctaaataggtattaccaaattttgtcaatgccaaattttggcaagttttggcatgactaattttggtaagtcaaaattgtgtttggattgaagccaaaatagcctaagttcactattgaaatggcatattttcttaagcatgccaaaatttggattcaaaccaaatagacactaaacactgttgaaattgacaaatattggtaagtctaatttattcctcaaaccaaaccagcccgagatggtttgtgtaggtgaactggtgaacagtttggcctgcatctgcattggtaggggcctaggagcagacaagaacagagcaaaagtgaaaagtggaagcatccagtactgtcaatctgacactggcgccacagctctcgcgaccactcctcatctcacacttaccgaagcaacaataaaaccgttctatcctcgcttcaaaaatcgatcaaaaaattcaaaaatcaaaagtgaaagaaaggaaagcacacgatgcttctcttcacccaatgcagatcgatgggggtcgtaccagtagcagagatcatggctgtgagcctgtgattgagtgatccctttcctccatgccaatcttgaatctttctagctaaaagaatcatctgtgctcttgtgctcgcagctagctgcacagtggtgacaatggcgatgctgctgttgttgcgttctttggagttcttggcgatcatggcggttgcatcgagcttggcaatgccggtggcggcggcggcggcggtgccacagccggagccggaggtgaagccgagcgacaccgacgcgctcaccatcttccggaacggcgccgacgcgcacggcatcctggcggcgaactggagcacctcgaacgcctgcgccggcgggtggatcggcgtcggctgctccggcgacggccgccgcgtgacgtcgctgtcgctgccgtcgctcgacctgcgtgggccgctcgacccgctctcccacctcggcgagctccgggcgctcgacctccgcgggaaccgcctcaacggcacgctcgacacgctcctcctcggcgtccccaacctcaagctgctctacctctcccacaacgacatctccggcgccatcccggacgccatcgcgcggctcctccgcctcctccgcctcgacctcgccgacaacagcctgcgcggggccatcccggtggccgcgctcgccaacctcaccggcctcctcacgctcaagctccaggacaacctcctcaccggcttgctcccggacgtcaccgccgccctcccgcgcctcgccgagttcaacgcctccaacaaccagctctccggcagggtgcccgacgccatgcgcgccaagttcggcctcgcctcgttcgccggcaatgccggcctctgcgggctggcgccgccgctgccggcgtgctctttcatgccgcgcgagccagccccgacgtcaccctccgtcccgtcgtcgccgcagtccgtggtgccatcgaacccggcggcgtcgtcgtcgtcggttgcttcgtcctcgccggcgttggccacaccggagtcgcgcgacggacccggcaagggggggttgagcaccggcgccattgccggcatcgtcgtcggcaatgctctcttcctgttcgccatgctgtcgctgctcgtggcgtcctgctgctgcagcaccggcggcgagagcggcggcgagccacccaagaagaggaaacgaggcggccgcgtcggcctggaggatgacgacgacggcgggatgttcggccaaggcaagggcgtgcagccaggccggccaggcagcgccggcatgcgcagcgacgacggcggagacagcgacggcgcgcgcagcaagctggtgttcttcggggtggacggcggcgaggacgacgacgacgacgacggaggcggcagcgacagcagcgccggcaggagggcaaccggcggcggctggacggcggcgccgcaccagcctcacgggaggaggagcaggttcgcgctggaggagcttctccgcgcgtcggcggagatggtcggccgcggcagcctgggcaccgtgtaccgcgccgtcctcagcgacggccgcatggtcgccgtcaagcggctgcgcgacgccaacccatgcgcccgcgacgagttccaccgctacatggacctcatcggccgcctccgccacccaaacctcgtccccctccgagccttctactacgccaagcaggagaagctcctcatctacgactacctccccaatggcaacctccatgaccgcctccacggtacacatccatgtctgatgtctcctcctcctagctgtgaatcgccatgagagtggcacgatgagctcgatctcgccattgattgtgtttgtcagggcaccggatgtcgggggagtcgccgttggactggacgacgagggtgaggcttctcctcggcgcggcgcgcgggctggcatgcgtccaccgggagtaccgcacgtcggcgatcccccacggcaacgtcaagtccaccaacgtcctgctcgacaagaacggcgtcgcctgcgtcgccgacttcggcctggcgctcctcctcagcccggcgcacgccattgcccgcctcggaggctacatcgcgccggagcaggaggacaacaagcggctgtcgcaggaggccgacgtgtacagcttcggcgtgctcgtcctcgaggcgctcaccgggaaggtgccggcgcagtacccgcagccgtcgccggtcgtcgccgccgacgccgccgcagacgcgcagaggaaagacaagaggtgctcgacggcggtgagcctgccggagtgggtgcgatcggtggtgcgggaggagtggacggcggaggtgttcgacgtggagctgctccggtacaaggacatcgaggaggagatggtggcgatgctgcacgtcgcgctggcgtgcgtcacgccgcagccggagcagaggccatccatggccgacgtggtgcggatgatcgagagcatcccggtggatcagtcgccgttcccggaggaggacagggacatctccaccatgtcgccgtcgatcggcattaccactgacgacggagatggtcgtctcagctgctagctcatcatcatcctcctcctcattgatcttcttttctgaattctgaacaactctgcctgctgcattttttctgatttctgaaatgatgctctgctcgatcttggcattctgaagtctgaaattgctactgcagctggtattatcttgagctgcttttcacttctgctgaaatgtcgaattgtcgatgtgcctgtgcttggaagatggtgcttgtgttcttgtaagataattttggattatgatgtcgaatgcatgctcctggagaacgctggcagttgctgctatactctgtttgcgtttgtcatactcctctatttttaactttgacacagtcttcgagatactagtttgatcaataatatctatataaaagtaaaatattttaaataaaaagtaaaatgttttaaataaaaagagttgtatattgttatagtttatttaatgataaattaccatcaattacattattgatttttttattttttttgctattaatagtcacaattataaatatttgacttgatatatgctaaaaatacttacttatttttggatgaaggaagtagtcggtatggttgtttctttgtttctattagcgaatgtcgttttgtgacatactaaaatgctataaaaatgagaatatgggcaatcttctactactatcacatcatcattttgttctttttttttctttgaagcggattgcgtatgttgtacaacattttggggtgtgaagttcatggcatgctcacgccagacgatgactgtagactatagtactatttcggttgaaaattagcatttgcattattattctattagttagcctgtgttcttcttgaggaggttgggaaccatccctctacacgcaaagtggtgtgatagagtaacgcatgattaaaaagaattaatatgatttttaaagcaattttgttataattgtttttacaaaacatactattaacacgaaacggaaggggtgagttgagaacataagacagatgctttccgaaagaacgattgagctaccctgattaatcaataccagtagcaaaaatgaccagcaatcctgcctcataaaacaatgacatataggtttgctaatgccaactgctaagccaaatacaaattcgtatctgttctagaagactaaaagtagtctattggaaacagaacaatccggtcaaacagaagcatcttgtatgaaaatggtagtccaggacgaaaaagaaaaaaaatgagccgacaactacgttgacatcgttaggtaaacgtaaacaaaattccttacgaaaaaaaaaaaacaaaaacacatgtagacactgtagagaccgatcagtggtccccacgagaccacgaagaccatgtccattggaagcgtagaagaaaagcggaaagagtttgaccgatgcatcggaacacggcccgccacgctggcaccagacggttttgatgggccggaccagtctcggcggctcggcccaccaccacccatccatccatccatccatcgcggcgcatcgtacggtccagagctaacccagcggcgggtccaaacccgcgtgcggcgcggcgcgtcaccatccaccgtttattcgcagctcgttttatcactacttaaccctttcttcgagatttcccttttcttggaggcgccacgtttaaagggcggagtcgctgtaattagagaagaggatttaaagagagagaaggccattctctcttgattgcttggagaggaagaagaacaagagccgccaccgccgccgttaggtttttatttattttttttctcgatctgatccgaggaggagcgaagcgaagaagggcaagatgcattcgacgaatctgctgctggaggagcccatcaggatggcatccatcctggagccatccaagcccgtaagttgctcgaatgctttgatttcgcttcagatttgtttggtttttttttgttgatgaaccctaaattcgattgatctgcggggaaaaaaatgcacagagcttcttcccggcgatgaccaagatcgtggggacgctggggccaaagtcgcgctccgtcgacaccatctcctcctgcctcaaggccggcatgtcgggtaaccaatctgcttgcttcgccatctcctgctcgatcgagctgttcttaaccttcttgtgttggtgttggtgttgtgtggtgcgaattgcagtggcccgatttgatttctcgtggggagacgccgagtaccaccaggaaacccttgagaacctcaaggtcgccatcaagtccaccaagaagctctgcgcggtgagcccccctcctcaccgccttcagatttactgcaattcgattcgatttgattcattcacggtcatggtctcttagtgtttgcttttgctgtttttgcatactgacattttgggtactctactccattggcattggcaggtcatgcttgacacggtcggcccagagttgcaggtggtgaacaagagcgaagcctccatctccctcgaggagaacggcactgttattctcacccctgaccaggggcaggaggcctcctcacaagtgctgccaattaacttcgctgggcttgctaaggtaatactccctttcagttcttttttttttccgaaatcttattacgctgtgcatgaatggttgcaagcgcataggtaggagtacctttcagtgctatttatgcaaaatcttattatgctgtgtatgaatggttgcaaatagataggtccttcttttatggaacttgctattttgtcactgcgatttccagcatatgctctgtttgatatataaaaaatgacttattgttttgtttgcaggctgtgaagccaggtgacacaatatttgttgggcaatacttgttcacaggcagtgagactacttcagtttggttagaggtaaaaatattcggcatactgcgcttagcgttctgcatttttttttcttatgtcattgtcagtaggatttgctttgtgcccacattttccgataccaaaactctaatttgtctggtttaggtttctcaaattaaaggagatgatgtggtctgtgtgataaaaaacacagcaactctggctgggtcgctcttcacattgcattgctcgcagattcacatcgacttacctaccctatctgatgaggacaaggaggtaaggaactcatttcagaatagtgatatgtatctccttatgtatttgtatttgatgtcttcctttatggaattaagtaaaatgttgtatatttttccttttggagcaccttactcaaaatctgtcctttatggaattaagtaaaatgttatatatttttccttttggagcaccttactcaaaatctgtccgatgccttaaatgcttatgagcatgtactgctttcaggttatcagaaaatggggtgccccaaacaagattgacttcctctctctttcttatacaagacatgtagaagatgtgcgacaggtaatacatttttttctcaacgttcccggtgttttgtccttggaagtaaccattcattgaaaacatggcattgctatatccaaatatgtgatctcctgtatgttttcatttggtacttgaaaaggaagttctaaacagtgctgacatctttcgtttcaatacaggcacgtgaattcctctcaaagttaggtgaccttagccagacccagatttttgcaaaaatcgagaatgtggaggtatttacaacatgcacttttaacatctctgagccagcttctgtttgttgtacagcctatcaaccccctatctatttttgcaggggttgaataattttgatgaaatcctccaagaagctgatggtatcatcctgtcaagaggaaaccttggaattgatcttccacctgaaaaggttagtatttctagcttacgtcgagcacatcagaaggcactgcttaattgtacatccgctacacttagtaccttattaacaagaattgtagttttctcaaattatggtgcaatacttgtctttggtttagttatactttatttattttgctctttgacctttgc

SEQ ID NO: 5352 - DNA, 4201 bp, Oryza sativa
catcggtcttttgcattctgtattgctcagtttcacgagtttgtagtaaatatctcaatcccattggtcagcttggggggattgttttgatgtttcctattcaacctttgagaaaattcttgatccctgtttggacacaaggttacctacatgtgtgtcagtagtcactatatctcaattgcacaaactagatagttttcactcacttctcttgaaatcatttccaaagcatagtgttctgtaccaagaaatatagttattgcatatcttcatctgtattattggaggcgcttagtgcagaagcataatgccataatatggtaatggtgagtgcaacatacagttcataagtcaaaatgtacaccaggaaagcaaaggaagcagcttatgttacttgagtgatgctatcttgagaatgtaaaccagaaaagcaaaggaagcacaacatgaaaatgtaacgatttgcttctgcagcagccttacaatatgcataacttattaatttgccactcaatcaaagacaagaaatatccatgaaatgtaacaaaatttacctcattgtcctgttcaagagtatctatatcttcatctgacgatacattctataatatttatactgaactataaatacttatatttttccgttctgtgatttgtctacatcacaagtacaacataagatactgtactaatcctgatctcaaggtctccctcctacatcaaagaggttaccttgggtgtttttacttatccagtcaacattccaccttatcttgcattatattatgcctacttgaatatgaaagacactacagtaagattttagttgccacaaaggcactaattgaaaagtttcaatattagatattcagtgcaggtatcctgtaataggtgcacattaatatcttccactagatctctctgtcttgcctacatggtcttttttgtttaaacagaaaaggggttacttgtttgtttttcgcatacaaagtcagggtcctaacaatgattgttttgcaaagttgcactatatgacacttcctactttgtagcatccattgttttatctgttcaacctctcactggtttttcatcaaataatccattttgcaaatgcaggtagcgagatatgctacttcaagaatgggatatgccagggcactgcttttgtggacattcctggagggcggtactacccagctgcgtcaatgtatacactgcctgaccaaccaaactgtcaagtcaggttcaactttggtcccaattttgagttcttcccagaagattttggaggtcgattgattcctcgaccaatgagtgacgtgccttatagaccatttgagctggcgaatggcgggcctgctgaaaatggtactgctgaaaaaaacatttaactgcagtgaaaattctgctttagttatgtagaatagagcataatcatgtaatccggttaaagagcgcgcaggctgattggttagtttgtctggttattaaatattttatcacctgaggttcttctggtttggccatttgaccttcgtgtagcaacgcatggcttcaatctttcccatcaacgcatggctttaatactgttaacacaagatttcgtcaataatgtttgacagaatctgatacgtcaaatatttatgacacgcgcggtccgctctgtgtgtgtatctgatacgtcaaatatttgtggcaatacaaggataacagcatttatgcttgacgatactcaatctgggcttctggggtagccaggtagtttggagaacctttgaagaaaaatatatcgaaatagcaatatcataaatgataacattttggacaccggtgcagtctccaagtaaagaaacacaatgtttgcaaagcaccggacccttaattttcaatgtttcatatcttaatcttaaataaacaaatacaacaaccagcttcatcattctgcgagataacagtgttgagcttgaagacaagtgattttcaaacataaatatggaatttgaaaagcctatgctgaagcacactcacaaattacaaagtaacaggtgactttttgcatagttttaaatgcatgtacataccaacatgagagaaataacttcaacttgagtgccatttgattttcagatggctacaggccagatcgtttttcactctgctcaatgccatatctcgatgctgcagcaatgaggtcatgctaggttcactccttttgcgtgccattttccgggagatgttcttccattttgattcaaattcacaggctgcacacaaataattcagtaaataggaattcttacgtagtagtgcaaacttgaaaagggaaacattcatttcatttcgatgcaaaagatgcagatggcacctgagtatctaaagcacatagacaatgttaatgtttctctgtgcagaaaaagaggtaacaataactaaatgtttctttatgccaaagagtcaatgaacatagaaaccttgatgaaacactaattatataatactaaacaaaacaagaaaagaagtgaccagtacagacagtcatgttgtcaaattgttttggtatggctaaataaacatagcttcctagggtaacatgtcagaaaagtaccaacctatgatacaaaataatttcagaaaaaatgaaatgactccctaaatcaagtgaaaactggaaaggaaaagttgcacttacaagctagagcactatatggctatacgcaattctagtaacatctcaaccaagtctgaagctgttggaaaatgatggttacaatcaataaccttcacttctgttgacaaatccttcaataaggcatgcgagattccatggccttccagcagaggaagctttggcaccaccttttaactcaccattatgttgtctcaggctagaaataataaaaatactttcatcaacacacgattaccatttcaacgtggtacgactaaagatgtactttctttgtttcataatgtaagactttctagcattgtccacattcgtatagatgttaatgaatctaggcatatatatgtgtctatattcattaacttctatatgaatatgggcaatgctagaaagtcttacaatctgaaatggagggagtataaatttacttctcatctttgtactttctaagttctaaccatgttaagtgctatgtattccaacaagaaccgatgatcaacacacaaaaaaaaaccccatatattgaagcatgtatacaagcctgcctgagcaagacaactacgagtagaatatttcaaggcaactacaattttatacacgaataaaaggacaagctttggtatgcccaacgagtaacacagttctgcttgtaaatcacagcgtcataaattgaagataggtagaaacaagagcaggcaacagcttattcagtagaaaatattatgcatgtttaacatacattgctaaaagtagaacaaattaaggtttaatccatgctcatttttttttgaaaggaatcaatccatgttcaattatcttcactaaagggactgaacaataacctgagcttcatttgttttcccaagtcctaaaaaagtactaaatatatgaaaatcgcaaggatttcagtccaattgtcatccgaatcatgtaactttcaggcctaatatcacatctcatagtgttaacaaaacaatagcgataaattgggggcagtatttcaatcactaactggcggagccaccataacccacagaatcttctgaaacagctctagaaacagtgaatcaaagggattcggggaatcaccggcgagggaaatcggtggtgacgccgacgtaggtgcgggagatccgggaggaggcgatgaggtagacgcaccagcccaacgccgccttccccttcgcggcctccgccgacggattcccgggcgcgcacgaggccgaggccaaggcggcggcggcgggctcgccggatttgggaggaagagcgcgagggatcttcgccgatcggaaggtagcggagagattcatctcccacctcgccggcggaggcgacgacgccgtggggaaattttcgaattgggctatttttagcacgtgagttttagagggccgtggggcgtgttggacatgggccgaatggacaaatgggccgtaccgaaatgtgagcctaattcgacacggccattttaagcctggaaaacgtggattttttcatttttaaatttat

SEQ ID NO: 5353 - DNA, 5335 bp, Oryza sativa
acaccgctggtcaagaaccaggcagtagtcgtaactggaccacttaaagtggaaatagtgggagaaacgctacatcgctggtcgagaaccaggcagtagtcgtaactcgaccacctaaagtggaaatagtgggagaaacgctacatcgctggtcgagaaccaggcagtagtcgtaactcgaccacctaaagtggaaatagtgggagaaacgctacatcgctggtcgaggaccaggcaatagtcgtaactcgaccactagaagtggaaatagtgggagaaacgctacaccgctggtcgagaaccaggcagtagtcgtaactcgaccactagaagtggaaatagtaggagaaacgctataccgctggtcgagaaccagtcagtagtcgtaactcgaccacttgaagcaaatgtacgagagatcactacgatcaactggttgagaaccggtgagtaggaatcccttgatcacatggagtcgtggtacgaggaccgctacgctgctgtagtcgtaccttgaccatctgaagttaaggtgcgagagattgctacgtactggtgcgagaaccagtgagcgagcagaattatctctcgaacaccaatggaagttgcggtgtgagagattgctgcgtactggtgcgagaaccagtgagcgagcggaattatctctcgaacaccaatggatgctgcggtgcgagagattgctacgtactggtgcgagaactagtgtgcgagcagaattatctctcgaacaccaatggaagtgctagagttggtttattgcaagtgtatctcatgtggctagtatgactcacgtacccaacttatagcatatccggatgtccgttcgcaatcatgtcgggtgatcaggccgacgacgttcgcgaggaattatccgttaacaaccttttctcgagtagtctagccatggcagatgctatgagatagggcgtcggtctttgttggtaggttgggtgcgataactccgcatttgtcgaaaatgttctcgataatggagtgtactcgaccataacctactcgagtgctcaattgttcctgaaaaatattttttagaaggcaagatatatagcagataatatcgagtatgtactcaaaaaactgcatggatcttctagtattatcaggatacaacaagcagatgcaaatattaagcattatgtaaaccgtgaacaagcatgatttatacagaagaaaacagagtgagcccccagcgttagaccgtagttggtttaacgtcggaaacatccgcgcaatagatattgtataaaaaacatgctctaggtaaacgtaataaattatagatctgacaatgctgtatcatctgaataggtacgataaattgcatataaaatattgcgtacctttgtagatacatgccggatgtatctacgaaattagtagaccatttttaaaaaatcaatctactaaatacctgatcacgggcggccgttgatttatctgaataatcaacacgttgcaatttagacagccatgttggtcttctttgcaggtacacgtcggccaactaatgcatgcatgcctaagcacgtactgagtccatgcatatgcatgtgtacacgtcaggagcaagcatattagttggatctttgtcttgttgttttctcgataccttggtagacatccgtgatcaataatccctggaacacatgatgtcgggatggatgttctcagtatgcgtcaggggtccaaaatttggatcctaatcggggtgtgagaacgatccaaatcccaaaagaatccagtgaatagatcgagatgttgattttggttcctcgatggccgggtttctgagcaggcagcagcattaccgaggttaccaaaaatcagttgatgatgtcgcttccgaagagatggagatcggagacctcctagttgataatatcaagtcactgttctctgtggcggtgacgtcttgaagtttggtcgatctcgagagatcgagttgttgacgacgatggttccgatctcgtcgagagacatactctggtcgggttagatctccccacagcgaagtcgtcgagtagcttgttgtcggagaatctgtcttttgaacccatctcgttgaaatcctagagcaccaaaatccccctacctggcgcgccactgtcgacgtttgatgtctcgactatggtatttggacagtatggggaacgttggtgctaggatatacacaagactgaggtaaaagagatggagacgagtatttttatacaggttcgggcccctgagctgtcaggtaataaccctacatcctgttggctggagccggagttgcttttattcaccataatcacaccaatacaatatgtggggtagcctatctaactgttatcgacatgtcggtctgaagatctgactcgtaatcgacaacagggtagccttcctcctcgaatctgtgcccggcgagatcagagatagcgctttcgtctctcctgacggtatccggagacaccgtaggggaatagccatgcctatccctgaagtcgatatccggcgtcttgtcttggagtatgttggcttgtatgttgtggcttctatgtcgattgtgttgggtgttgattgtctcgtcatggtgggtgttgatcgtgttgatcgtctcatcatggttgtccccctgtcctcctaggggggcttgtatttatacccataggtgtccccttgtccaagtagaactagggaaaccaatatggatacaatccgagtagtccttgtcgttttcatgtagaactctggttgtctttccttatccggaactcctcctatatccgcagattgtttctatataggacatggtatgtggtgcgtcctgccgagatttagtcaactactattaggtatgtagtatacataaccctgacaacgaacggtcaaatatatttaaaatggtcaacggcgtcaaacatttagggatggagggagtagcaggttaaccttccagcctggtgggtcttcatggccagcccacttagggcccaagcccgtgacagtgtgataatgtgaaatgagaaggaaaatgatttagttgtagattaatcatgctaggttaaaaataataatggaggtgatgatgtagcttaatagaaatatcatttattacacttgttgggggccaatgacgttggcgttaggattcaaccacccataatgtgcccattcattctaaaattaattggaggtttctaccgtcttgaaaggtaaatgcattattagtgttaacggggaggtgttatgttatgcaatatttctagaacaatgaggtatggagaaactttcaatgactttaaagtttattcagttcaataaaatggtcattttggttctttactatccaattatatttattggtattatcaataatttcgtaggacatcaatattgatttgataaaagaattggcttcaatccaaaatttagccaaacattattgagtagaggatcaattagtaaggcacattttgatagctatccagaatggtccgtacctcacgatacatatcaactcagctaatatagtttagttttgctatgataatcctaaaaggaagacttagtatcctgatctaacattttttttagaatatgtcattaggaggggagagtttccccacctgtatttcattgataaaagggtgcctagaagtacaagatcattacaagatcgttacagatttagagaacgaaaggaggaaaagaggagatccttccaagctgaaattacaagtctattctcgaagtcgttcagcccagagtagcatccttatacacttcaccaaaaggcgatgtaatgatagtggttcatttctggaaaccacaccatgacggtggttcgagaggttccaaaagcagaaaagcagagaagatagaaacacatgataatgcctcttttgctgctgacttctgggagctactgaacatcctgatctagcatgccaaagtaacgagtgttatctgatagtatgatccctcaccatggtatgtagtggagtggtttacagcatggtatgtatctgtgagataatactgatacacgagcttgggttgtcatcactttcactattcttgcgtgtttcctaatgcatcctaatcctaatccctccatgtcaatgcatggacagagttaccatgagttttagattttgcgcggagagcatatgctagtatgcatcgcgtctctctctctctctctctcttatctatctttgctccccttaattgtcaactcatttctacaaatgttgaggcgcatctccttctattatttgccaacaccactacttatatataattaaagactagaaaaatacccgtgtgttgatacgggaggaaaagaccgtggaagcgggcgtcgttctatggcagagtccgcaatgtcaacgaaggagtaatcatggcggagctggtggaagtagtgtccagacaccttggtggttgatggcacatcgccgacgaagcttagtgcggccgactacaggagctcttgccggcatggcaaggaaaagcttgctggcggcagcaagatgacgacacacggcttgggagggacagagcggcacggaatgaaacaattcacgtccttggtggcatgttttgaaagtgttgcgaattgagtggcacatcctgaaggtggtgcagcaaatcgaatggcatcttctaaaaattctctcctaaaccatttgtaatatgtgatagtagaaatgccggcatgtttgcaatggaaaaagatacaattgcgtatgtaaatcgggacatgtttatatgtgtttttaagtgagaccgtcataaattttaatatcgattcgtcagttccaataaacatattgtcatgggcggatcacccaaaaaattcttagcctaacacataaatatacgtatgtgaaaagaaacttttgaaaaaacgaagaaaaaaggctcgtttttaatatattatgatgcatatttgatccatttatacttttagctttgttatatataagttggatcacccatataaaagttcgagatacgtcattggtattgttaaatctattattaattagtcattttcatttttaagggagtattgtttccagtttataaattaattacatttgaggtcaaatagtagtatttttttacctcaacaaattgatagagaaatgagaaaaataaaaggaagagaggtctggtagggaaaaaaaataaagaaagaaagcagagcacgagaacagataagtcataagtccccattttcactttctccttcactttccccaaatccatccgctctcatctcgtgtcctttactcctgtctagctg

SEQ ID NO: 5354 - DNA, 3509 bp, Oryza sativa
atatcactccactgtgaatggcttaggtgattctgagtttgtcgcaagtaaaacaccatcgtatctcctaagttttacgtactatatatttatagaaaacgagataattaatgtctaccacatctgaaaagtaaactatgaaaaatatttgataatgtatgtaatggtgtttatttgatatatcacaaatattatgttttctctataaattcaattaaatatagaatagtttgactagctatgcatgctgactagtcaccagtgaagcagtgacaagctgaaagctacagagcatcgcacagcaacaagagggacatcgagctactatagctctagctgcaggagccgttgactggtacgatcggttgaacaggcacatcgactagtcgtacacccaattcagtccattcgatcacgtacccacccacgatcgagatgaacgggcccgttcagtttatcgccaaaataaatctgattaaattttaacaatatcagaattttgataatttaataatattatcaagttttgggacgatttttttatgtatttactagagtttggtaaaacactaaaagaatacacatatttaacacctttataaaaaacgatatggtttgaaatgacgacaatctgaacaaccgagctcgacaaccacgcccacatatgaccccagcggaacgaagaagctcacatgctgcaatcgtccgtcgttgcaatcatgcacgcaacatactactctctagtagtacatcccatttttctcctcgtcgtctcagctaaacacacacactattttacacatgcatatgagcaaaattatttgcaaagaggaagaccagcactacatacgagtctacgagcctgtttaggggagcttaaaattttaagaagcagctgctgaaaagctagctggtgagaatctagagaagctgcttctggcttctaatttattttccaaattctacaactatagtttctcagaatctggacaaaaaactagactgtttaggagagcttatagcaattaaagattctagaagaagctacagctgctacaagcttggaagctctccaaacagaccctacgactacgaggaaggaggtaagctagccgagatagtggcgccaatgatgcaggggatttgagtggaggaatcaggcaggcagcactgcactgcatcagaagacgaagctctcgtgcacaacagagaagcatgaagtagtagtggacttggccaagatttcccaatgcaccaccactaacgcatgcagttgtaacgcagaggataggagacctggcagcttctgatacacgtgtcacctgcttgttctttgcatgtggggtgtgtgggccccacttggtggtgctgtgtgggccccagagacttctcgcactagcttgtatgctcggcttcgatgtcctctccgcggatgcagagcaccacagctgcaatgcctgcatgctctgaatactctgatctgaatctgctgccaacttcgtgaaattcagatcgcaatgcactgtttctcaacgcaacggggacctctgctaaattgtaacttgcttctgctcatttctgaataatactgatcgttttatctgatgaccaatgttggaaactggtcgagaaatgcatcaagcagtgcatgaacttcaaatctttaatcatgtttggtataggccaggagtaagcatacaagggggcccaagaaagctattttctcctccatttcaggatgctagttgctgcaaaattccaaccatatccagcgcatcctcctctggctagcaagctagctcagatgttacatccgtgaaacggctctttgtggaaacgtttttagactttctagtgaaagaggactagaggagtgttctgttttcagggatcagacaaatccaagattagtaaggattgacaataagcgtaccgtttgccattctgttctttgttttatctttcctttttcttgcgttggacaacgcatccctctatcactgaatattctttccttgcacacagatacacagtagtaggtttttggtagggtcggaaagtctcataatagaaaattatcaatgaattaactatgtttaatagtcctacaatttgatataataggatgttttttattttctaagtcaaactttttaacttgatttaatctattaagaaaatatagcaacatatataatatcaaattatttcaactaaatatgccattggttatatttgtatagttttttcttgaatactataaaactatatccaacaacgaattttattaaactaatatggcattgttgatgttgttacgattttttagaaatgggacaattttttaaaaataacttataacaaacaaaaaaaacacttgtagtataaaaattggatgaagtaaggtcattgtctacggctgattataagatataacggcatattagcgataaaaaataatttatagaactttttttactatatcctttgtgacttaaaaactaattacaatgcttgaaaaaaaaactatgttgaaaaaattatcaaaatttaaaatttaaaatttagcattgctttatatgtcacagatcaaaggaagcttttaaatcaaaagtatgctaccaccctaatctgtatttactactatggcctggtttagttcccaactttttctttaaacttttaacttttctatcacatcaaaacttttctacacacattaacttttaatttttttcttccaacttctaattttagtccatggaaggcatatgttcaagacgaaattggcagtttgtttgcctgtgttggcacctacacaagtgtgaaccaacaaatctactcgtgttttgtaaccacgcggccgactaacaaccttagctagtgcatgggtgtgggcctgcctgcttacttccatcttgaattaccaatattaatcaccttctgtggtctgctgttaattaactaacctcagacgacgtctcgttaatctgagttgctatagctttacgaaaggccacacctcggattataaatactacccagctcatggcaccaccacactcttcagtctcacacaaacccaaaaacccaaagcttagccaagctactagctagctcctcacttcttccagcttcttacactaatacagctcgagccacttcgtcttctcctctcttgcagcatagtttaagtttgagataggattggcgatagatatgaggccgactggtcgtcgttcttctccgccggtggctgctgctcttgccctgcttctcctcctcgtcctcttcttcttctcccactgcgcctcagctgctcgcccactgccagcatcagcagcagcagagctagtgcttcaggatggcgccaccggcaatggcgacgaggtttccgaggtgagaattaatcgaacaccacacagtagctccttatacaagaattgatcgaagaagcacctagtggtagcttgctaagcttgatgtgtgttttgtctggggctgcagga

SEQ ID NO: 5355 - DNA, 2035 bp, Oryza sativa
tcacatctaatactaggttgattttttttgatggagaaagagtagatcactagaatgaattaatcgatctggtagtggtatgttaggatcaattgattagctaaactataataagttgtctcccacttatacttattaaatttacctttgttttgccgcacgtgaaactacacatgctcaaagccaagttaattggctttttaccgatcaagcgatgttaatttaccgcacatttgtggagaaagcgtttgtagtcccggttcgtaacctctttagtcccggttttcaaaccagaactatcaatccgggactaaatatcgctatctttagtcccgggtgaattgagatgacctttttttttcatggccctgttgctgcatggttaatatatatatatatatatatatatatgaacaaaatatatatttacattaaagaaaatgtgtacatgcgtatagaaaaatagacatgtattatttacaatccattatgatgtcctagctagctacgatttcgatgagtagtagtcgttatctcagaagctaaggacctatgaattgtatttccgtcgtagtagaattcacccttgggatcaaggatttattcgttgatgaatcccatgagttattcttgaaccgccgcgataaattccttgtgtgtgatcagattatccctcatgcgaataaactatatgaatgtatgaaattaattagtaattaaacaacaaatcgatacgaacgcagtgaaattttgaatttatttgtacgtacatcgagctctcttgtggtgatgatttggtctgcaaggcagtggtaatactcgcacacgtagtagccgcacaaattagttctctgcttttgctttgcgcacaataaataaatgacaaacggcgagagatctaattaatatacacttattaatatacacttgtatgtatttgaattggagattgaatataaatgtagagcatgtgtactcacaggaaaattgaacttccgcctaagtctttctctccatttgccgcggaccaaatgacggaaccgataccaagccctatatggagtttaaagctatgattcgtagtagcaattaattataacaagattcttaattaacataggaacttatgacaatacctatctataagttcgaaaaccttgttaaacgtagactcttttttatccattgagtcatatacattgacggtgcaggcctccaggtcgaagagtaaaaggacccaatggaatctgcaatgtgcgtgggatgcattacacatgaaacacttagcatgttcgtacgggaatgaaatttggtataggaagacagtaaaaactaactctgtgttggacggcaatagtataaacgtcttgtaatgctgcgccttcaggagatggatgagattgtcctctgtggcttgcggatactggtcgagcattgcgacatttactttccaagggtcgatgaatccagtatcgaaaaccccccgccgtcgggccctttgaatctctattctacaacgataaaaggaagtatatattatatatagtctacttatatagaaggacctaattaattaaaggaaacataataagaaatctaactgaacgatacttacaaaatccagcaactcataatagagacgtcgagggcgtccagctggtatagttcgtagatacccttgaaattgatccagagaatgtcatctccttgcaagaagtctgtgtccctgatcctcgctccgatcatctctctaccggtggcgctcatctccatgtacagttgatggaacttgtacatttgtgtgggtagggactgcagctgctcaggctagacaagcgatttaccgagttcgtacatgtatttcacttccgccttttcgattggtgcgcctcgtagcaattgatccgtagttagcctggtgtcattacacgcgagtggaaacaactacgtactgcgcagtatatagttacaaatctcagctcagctcagattctcaaaaaaaaaagaaagaaagaaagaaaaaaactgctaggcg

SEQ ID NO: 5356 - DNA, 11560 bp, Oryza sativa
gctctccgcgcagaatctaaaactcatggtaactctgtccatgcattgacatggagggattaggattaggatgcattaggaacccggcaagaatagtgaaagtgatgacaacccaagctcgtgtatcagtattatctcacagatacataccatgctgtaaaccactccactacataccatggtgagggatcatactatcagataacactcgttactttggcatgtagatcaggatgttcagtagctcccagaagtcagcagcaaaagaggcattatcatgtgtttctatcttctctgcttttctgcttttggaacctctcgaaccaccgtcatggtgtggtttccagaaatgaaccactatcattacatcgccttttggtgaagtgtataaggatgctactctgggctgaacgacttcgagaatagacttgtaatttcagcttggaaggatctcctcttttcctcctttcgttctctaaatctgtaacgatcttgtaatgatcttgtacttctaggcacccttttatcaatgaaatacaggtggggaaactctcccctcctaatgacatattctaaaaaaaatgttagatcaggatactaagtcttccttttaggattatcatagcaaaactaaactatattagctgagttgatatgtatcgtgaggtacggaccattctggatagctatcaaaatgtgccttactaattgatcctctactcaataatgtttggctaaattttggattgaagccaattcttttatcaaatcaatattgatgtcctacgaaattattgataataccaataaatataattggatagtaaagaaccaaaatgaccattttattgaactgaataaactttaaagtcattgaaagtttctccatacctcattgttctagaaatattgcataacataacacctccccgttaacactaataatgcatttacctttcaagacggtagaaacctccaattaattttagaatgaatgggcacattatgggtggttgaatcctaacgccaacgtcattggcccccaacaagtgtaataaatgatatttctattaagctacatcatcacctccattattatttttaacctagcatgattaatctacaactaaatcattttccttctcatttcacattatcacactgtcacgggcttgggccctaagtgggctggccatgaagacccaccaggctggaaggttaacctgctactccctccatccctaaatgtttgacgccgttgaccattttaaatatatttgaccgttcgttgtcagggttatgtatactacatacctaatagtagttgactaaatctcggcaggacgcaccacataccatgtcctatatagaaacaacctgcggatataggaggagttccggataaggaaagacaaccagagttctacatggaaacgacaaggactactcggattgtatccatattggtttccctagttctacttggacaaggggacacctatgggtataaatacaagcccccctaggaggacagggggacaaccatgatgagacgatcaacacgatcaacacccaccatgacgagacaatcaacacccaacacaatcgacatagaagccacaacatacaagccaacatactccaagacaagacgccggatatcgacttcagggataggcatggctattcccctacggtgtctccggataccgtcaggagagacgaaagcgctatctctgatctcgccgggcacggattcgaggaggaaggctaccctgttgtcgactacgagtcagatcttcagaccgagatgtcgacaacagttagataggctaccccacatattgtattggtgtgattatggtgaataaaagcaactccggctccagccaacaggatgtagggttatgtcacgcccggaatttctatccaaaattccaaacgcttacatgtgtgtgaaccctcgtcagaaatcagccgaggcacacaataacaaattgataatagagtacaattattactctaattaataagcgaataaaatgtcattacagaggtagatagttcatctcaatcaataaagatctaagcagcggaaaaaaaaagataaacggcgcagacgactccactccacaggtagcttgaccagggctacacctaatcctccacaccatcaacatcactgtagaactcttcctctgatgaatgattgcaaggtgagtatatgacatactcagcaagccacgcagcaaatatgcaagtgcacaggataacaaaggatggcacagtggggtttcatttgcataaacagcatttaataaacatttcagaatttaataaaacagttaagtaataattaaacaatattaatccaacactatacaacataccctgttgcataggcccaaccattctgaacaaccatcccggctgcacagttctatctccaaaccaagaatataccgttccaaaccaggagctaatcaaattattaccagttatagcatcttttattatgatgagaagtgtgagactaatcacgaaagacattgttagacccgcccataaccgcgggcacggcttttcgaatagttttactctggccagaggtgtaccactgtactcacaagacacagccccacaacatgtcactatgtgccttaataccaccacggtacctcggaaaggagctatgacagtacccctcgcacaacacgatccaccacagcgcacctttcctggatcataatcaatcaccccttataaacaaggcatggactccccagtgacccccgtgggcttatctccgccacttctcagtctggtgctccgcaatgaaccatgctatacaaaaggtaaagccgttgcccacgctggcttgtggttggcacggttaatgtttcacaaccaaaactcgtgaaccggtccttaattgtcatgagcacgactctcaaaaccatgtgctcacaacccaccattatcaagttttagttggcaagtaattaattaaccaatcacgattgaccatcgtgaactatcattaagccatcattaagtaatagtgaatcataagttatcccaatagtgtgctaatgtttctaagcatggctaagcaatcatatctaatatctagctgaaccaatatataaagctcaactagtcaagttataataacccaaggtatcaaggaataaagtaatcaagaacaaaagggctataacaaacaataggttaattccacccaatgacattcgaaaataaatgcaattgttgaatagaaacaatagctttaaacgggatcaacatgctcaaagggttctttgggatctgtgtgacttgccttgctggccttggaactcttcaaaatcttctcctgcaaaaatggactctccggaaacgtcggaatctaaacagaaaggagcaaaatcaccaaaacagcacataaacaagcatgaacagtacatgtggatatttttaacatgtagatctcaattttagaaaaatttagagacttgaaccaactaaatccgagctaagatgaattagttatgaatttttaaagattaaatcggattaaatcacttatatggattttaattgaattatgacgcaataatgaattattttttaaaaggaaaagggaattattgcgtcagcggctagggttcgcggtgaaccgggtgcacggcggcggctcacgaaaacgaacggctgagatctttccatccaaaacgaacggccgagatcgaccggtccacagccggaccacggaagacgacgacgatgacgtcagcggtgacatcaccaccggcggcggctcgggtgcgcaaactcgtcggcgaacgacggcgcgacgacgcgaacggaggacaccaacacgtagagggcgacgcggcgaactcaccggtgaccaaaacaatggcggaagatcaacggacggcgacggcgtcgaggaagaagcggcggcaaccttcggcttgacgacgacggcggagaggtggacgagatcggcgacggcttggtgaccacgacggcgacctccccgagcagcgacgacgaccggagcgacggcggcgcacggctggagctgcggcggcgacagcggcgctaggctacacgatgctagggctctaccggcgacgagaggcgaatgcgagggtggcggcgggtagcggcgggcttgggggtccttttataggagcaaggaggcggcggcgaaggcccacggcgaccggcgacatgaaggaaagtctagggttcggaggagagagatcgatccgaatcgaactcgaatccacgatttccaaacgattttagccgacgattccaaaagagaaaggtagaggagatcccgaagatcatttcccctctattgatttcaccggagaaggaaaggcgtgagcgaatttggaaggagacggcggcgcggctcagctagggttccggccgggcgacgacgcgaggaggacgacgagtccgacaggtgggccccacctgtcagcgggcggacgcgcgcgcgcgagcgggcggctcgactgcgggccggattgggccaggagagagagaaaaggttttgggccgactttcggcccaaagccaaaagaggatttttaaaaccttttacaatttaaattattcattaaatgtaattccatttattaaaaatacttccttagctcaaataaatctcagaaaaatctaggaattatagagttaagcaaagtatttaatgaaattttatctggccccattttatattggaatttattaattaaaattagatcttctcttctaggctttttaaaataaattccaattaaacaacaatttatatatttaggatttttagggtgtgacaggttattacctgacagctcaggggcccgaacctatataaaaatcctcgtctccatctcttttacttcagtctcgtgtatatcctagcaccaacgatccccatactgttcaaataccgtagttgagacatcaaacgtcgacattcgtcttattcaaaaaatttaagtaattattaattctttttctataatttgattcattgttaaatatacttttatgtatacatatagttttacatatttcataaaagtttttgaataagacgaatggtcaaacatgttttaaaaagtcaacggcgtcaaacatttggacaataagggagtataaacgaacagggagacatggcaaaaggcatcgatgaactgaaccaaggaacgagcctctccttctccctggatgcttcctcttcccaaaatccttttctctgaatcccaacctagctatttttccctgtctaattcttctcccagtctacgaacctgtatctcccttcaccacttggtatcttgtgcgatgaatgaaggattaaccctgagttatgctccaacatatcatagaaattaacccgctgattgagaggagcgaagatatcctgttctaataaatgaaattgacgctggttgatttgttaaaaaaacaaaaatacagaggagggaagagagctaattaaagatagggttaattggatccatgccactacaaatataccaaattagaaaaatgtcactacatttcacgatatcagctgagtgccactcgaatttggggaaattggaaccgtgccactccgttgggttttccatccactccctgttaatttcccaactccgacactcggcctcgatgcggcggcgaaggagctcggcgacggtgccatttcccaactccaatggcgagaagagttttggcaatggcggagttcctgcccctctttctcctcatgaactcgtcgtacttcctctttgcttcctcttcttggttccgtccacgtaggtgctgtggaagctgtgcccgcatgccgggagcacgccgccgtccgccagctctgacaggcagatggcacactccacctcggcccacccgccgaccatcgggactccgaacgccgcgccgaccgccctgacctatcggtgttggcgtcgtcgtcggacgccggcctaggtggctgtggttgcgcccactccccggagtcgcgccaacgggcgaggcagcggatgaggcaccgcgcggcggcgtggaggtagaaggcgaggagggagacgcgggcgaagatgatgaggatggtggccacgttggagaagaatgcacgcatcgacagtgaagtgtgaggtgaggaaccacgaggacgacatattgttaacgaccaaatttggtaatatcagcatcggaagaggagactagatcgaggtggagtcgaaggcggagattgattcgagaacagagcaagaatcgactgaagtccatatcggctacgattaggatcggatgggtctaagtcggactaggtaagccgatgcagccgattccgacagtataatttggtgtatgacatcgggttgaattgaggtgcttcaagatgattgccgcacatggatagagtcctgagaaggcaattgtatctattaattaggatgttttatgtaacttccttagagatatgtttgggcaaaagtctaccgcaaagacttatggtatcttagagtgtgttagagatagtggtcgtgtccggtatggacatatcttgtaattcttgggtataaatagaccccgagccctatgtaatttttaacacacacgttcaatacaatttcggcgcatcgccacctttttgctttagttttgttttcgacgagttcttactttcgggttgagctgcatcggttttgatcttcaacaagaggtaaaacttgttatgacgacttgtgttctcgagattagtgcttccatctttatgacactctaatcttgcctatataattcgtcgagttattatatatcttacattagctttggcaatatcgtcatctaacctacaatcggctgacatctgttaatagaaggcagccgattaggttaaatagcgatgttgtcctagattatataaaatatctaccactttatgaaacatccagcgtcttgattgtctagatattgttcttcttttcatacttaatgttgcatcagttgagtttgatctattaagtcgtgcttagaatatcaatctctagcatgtcctctggttgccgattagggtagtatcggagtttcagccgatcttatctgatttaaccatattcgatctatgtgcctaagtgacatgttaaatccgccctttatgtcaagatcttactgcatttaagtatattaagcttttgtttggtatattatacttgttttgatatctttatgtagagtagtatcggagtattagccgatacatgctagatctatctgatcggctatgctataaacatatataatcatgttattaatatatatttcgatctaagtgatttatactgtctcggcatggtgaccgatctatcccaatcacttgatttaagtatatattaatataagaactatatatcgttaatatctacagccgatcgaatagatttagttccttactgtctatttataaccgccgatcgattcatatatgacatcggctcaaagataaatgatatgtcatcggcacctagccgatcggctattatttatagatttaaccacgaattctttgtctctatttcttgttgattacaggatcaaatcaactggcacgctcatacattcgaaggtgagctttggacctgcactggagttaagcagatctcccaggcctcgtgttttctgtcaacacatatggaggtcttgacgacacgggagacgacgaccgcgcccctatggtagaaatctacggcagagacgagctccccaggtagcaacacccttccctgccgctgatcatctccgtcgagtggagcagcggtggcggcagcagcggcgacgtccatgcacgggaaagagaaggcgtcgacgaagttggcactgtggacagggagtggatggaaaacgcgaaggagtggcatggatctaatttcccaaaattccagtggcacccagccgatatcgcgaatagtggtggcatttttctaatttggtatatttgtagtggcatgaatccaattagggatacatatacacacatgtgtgcacaacttcacctcagattttacaagcctcataaaacccaaaccttatggcaactttggccatgtaaattggtggattgggatgcactaggaaaatacaacaatgctgaggtgatctcctacctcgtcgtctcatagtcagggttagaaattttggaccaaaatttcggaaattttggtcatttcggtgacccccgatatgatattaattcggctgaaatttttgaatttttcaattttttcatgaatttggataatatttgttcaaattcaactaaattttgtttaaaattttagaaattttgaaccgaaatttctgaaatttcaggatttcggtgaccccaatagaaacccctaaaccgatagagtgaaccctgctcgtagttaggctagcaccttgttttcggccggtgacaaacaagaaagtatcatccacggacaattggcgtgagactacagctgtgttccgacttccggcacgtgggaattacaatcgaaaagctctccacacaatcaacaattgcactcttttttttttagaactcatgattttatttaaggctaatagcacgttatatgatgagttgatacaacttccatagagtaagaggagagcaagcccaaaaaagagaagctgacaagtatgcccacaagcatacgggctggtaaacatacagcacatattgcaaaagaactcctaaaagatagaaaaatgcaaaagggcctagaaaaaagcaaaggacttctaaagataaggaaaaaaaaaagcgatctggtccttgcgctgcttcttcctctaatctggtgaccaggacaacgaaaccgacatcaacaacgacggcgaaagcaagggagactgtaaaatagagctccaagccgtaaaaccatacggggctttcaccacacaaggcggaagttgacgcacgacaaaaagaataggaagaatacagtcgcacattgaagaacgtcgacagcaatgaaatggctcaccacattagtagcaactttgccggagttggttagaatggctggcatcaccttcaacagaaacaccaacctgcttgccggagaagcagacttattgcccttcaagcagcgaacaacgtgagagcaaacctggaagccacccaaaagcaggcaacaactaaggagatcttcagcagcaccttccatagaggaccaccggaacaagggagctcgacgccggtgaatcccttgcactacacacaaaaggaaaacggaatgaaccctacacggaatatatccgaccatcctatcgcctaagggtaaggaggccaacccctctccctaccctcatcagcggcgaaccaccggatcggaggaggaggaaaaggggtcaagaagaaagaggaaaaactctcaatggatctcagagtatcgcgagagggatagagaaagtcccgccccagctgatggcttcttctactgctctactacaagtgaactcgtatatcgtatcccatgtcatggatggagccctatcccagtcatggatggagaaccaaggagatataattagaacaggtagcagctaatcataggagaagtcatttggtcctccggcgtaatcttctactccttacattccaaaatataataacatagaactggatgtctcatctaataccaaattattatattttagattggagatagtaggaaatatcaacaaatatgctggttgtgtttgagattgattaaaaagaagatgaagtcacagcaagcaaaacgagaaagacattagcatatgattaattgagttttaattattacaaactaaaaaatagatttatttgatattatatatatataaacaccgtttattagttttaaaatcatgctaacaacaaccgagaataaatctatttctgagcggttacgtgtttgtaacttgaaagactaagctcggaatatgaatcgtatcattgttaacaatgatagagaaagactacacaacggtataccgttgaacagtataccacttatccctcatgccgcggccccgcgtgccggcttctcccgagtatgtcgtgtgctgctagaattatcatcacgcaggtttgttgtggtatcaaggtatagtcttgttcctgacagctagctagtacccagcatgcctaagtcatgcctttgatactagcctagctagtaaataaaactggaggtactactagcttgttgtgcatgccaaatccctgtaatagctacctacgttacctagatacggggatacggatatggatacacgatacgtcgatacgggatacggcattttccaaaaaaacaaggatacggggatacgcttttatatatatatatatatatatatatatatatatatatatatatatatatatatatatatatagtaaatttgtttggtgctccatggtgcccgggcaccattgttgaaattgagtatatacccaattcaaatgagtatgaaacttttttaattatttaggtattaacattaactacttttactaactagttcaaagcaagtttgaactgaatttgaacttatttttgttagattttgattctaggtatatagcatccatacatataattagttaggtatgtaatcatggattgtgaaataaagttaaatttgagttgttttgttgataggtataggtacgaatcaaattcttataactaggtatatactcacaattagaaaattttgaaaaatttgagtgattttgtgcatttgaaaccatggtgcccgggcaccatggtgccccatatgagtgtcctatatatatatatatatatatatatatatatatatacacaaaaaaaattaaggaaattgcatttatatataaaaaaaatacaaaaaatcaaggaacttttataaagaaatagcgatataatactagtatcagtgtagcagattccatatcaatattctgcaattttctcttctataagcaattcaaattaacaagcgattaagatcccaaaaaccacatattaatagttcaatcatatatttcttgatgactttgcatcaacattagaagccgcactaagcagtaacctctaggattgctagatgcactagcacttgtatctaataaaaacgatagtactttgtcctaaggaaaacaagaaaggcacagcagattcaagcatgaaacttttgaagataatggattacccggccaggcagtcaagcgaagaaagaaaaagttgctccgtgcttcgatgctactagcctgccactggccaccgctatgcccggcggccggcgtcggaggaagtgcctcacgcagtcacgcggcaagccggcaacagttctggcctcgaggttggcggcaaaagaggtgcgccaccaccaggctggcggcggcggctctgccgtctcgcgtaggggacgttgtggccccgcgcacggcagcgacgcgcgcggctgcagccggcgtccggcggcaacgccgggcacgcacgagagc

SEQ ID NO: 5357 - DNA, 7739 bp, Oryza sativa
tttttgagttccagattctatgtagtagtatggtgtcatgaatttttgtaatcaaaacaaacgactgaagtcgttgttcttgcagttaattttatagccaccttgttagacagtgattagggtctaaagaatcatgcaagtgacctgactcactgaaccatcccacttaactagatctttcgttcactttcaatacactgccttgcattactataaaaagaaaataattaggtgcagtggtgatttctttaccaatctgaaaaaaattacccgactgcccttatgtaatgtctgtattgtagacttgtagtagtactagtcttctatatcatattttgttgtaggagtatatacatatcacaagctgttgatccagaagaacagcgtttaaatggtaaacactaaagtgctaaaccaaggaagttttggaaatctaggattcatgctctccttacacttaggggaagtggctattggtactcagatccattgtagtcataggaggataatccatgcccttttggctgcatttcaagtcaagtttgcagaatctgtaatcatgtcaaagcaggaagtgataaactgattgattaatagaaatcttcttcttcgacctagaatgagtttttgcacacccgtgggtctggctaaaccagagactaaacctggccacctaagtaccagttttttgtgcacttaataaaaatccccattttttttactggtgtggccctgacaccctgtcatctcttgcactgctccactaggatgggaaccccccactgataaatcagatgcaactaaaactacttccggcattttagggttttagggagcaagtcaatttggctaacctaattctcccttattttcccatgcagagaggagaaaaaggaagaaccagagacacctaggtatcgagatcgtgctaaggagtgccgtgaagatcaaaaccttgactatgaacctacagagcttggttcatttcatgctgtggcacctcccggagcagatttaaggtaacagaccacaggtctcatttggctgacattttctttgcttggtttattatatgctcttctggaactcaacgtctgcaatttttcgtattacaggctagcagatgtacacaagatatctattgagaaaagcaaatatcttggaggttggtagtgcaacagtgttatactctttccttgtaagaaaatgcttttcatccttttgggaacaatttatgttgtgacttgtttttttaaacacttcatttatgtatagacaaatgctcatagatctgcacaaacggttaaaattctaacatagtttggttatgacatctgtggaaatgagaatttgaatctttctttggaactgttttatgtccacaaacttgtcgcggtttcaaatagctgcttgatttttaggttcctttttaatttgaaatatatagagctatcatatacttggtattttgacctagtcagtcagtagtatgcagtcaaggaatgaggttcgatagctcaaaactaaaggtggatagttcagttggacatgttttttaagactatgatatattgttgtagatttggagacttagatggctggcactttttctttaacttttttttgtctttcttctgaactatcatgttgattgatatttaatttcactttgtgtcttaaaggtgatttggaacatacacatttggtcaaaggtttggactatgctctacttcacaaagtacgaagtgaaatagaaaagaagcctgatgcagaggatgggaaggatacacagacaaggtatttcccacaatactgcagttttagtttcataccatttgatcatacctttttcctggtagttttgtactccctccatcccaggtaaaactgaatcctagaagcccaatgcagttttagtccaagcaacaaaagaccaaaacaccctcatcaagtacaaccatgattagcacttttcataaaaaaagttcctgcgaaattcgtgcccaactacttcctcagcctcccttcactggagatgatgcgttgatttcatttttttaattcacccggtgggtggtggacaacacaacacagggaaaatgataaagatgcaattagtgtttctcgatctctggcataggaatcgatttattgtgggacaaatgatcgaccctaggaatcaaatttttgtgggacggagggagtagtcatatggattaaggacaagctgtcagatccatgcttcatttcaaatgctgtaatatattacagtgattatcacttgcataatttttaagaaagtggggagttgattccaataattattatatgacacaacaaattgtcaagcttttttaggcctagtcctccttgtaactgtgaggtgaagttaagagatatccatttttcttttgttagaattttagtaggtgtttttatggtggatggtttcctattttctttatgaatactgtcgggcagaattattctgtgcattggaattatttataattttgctatgctttatagtggccgctggatcattctcagttaaacatgatttcctgtacagtattaaatctggatttgtattatcttaaaaaaatcaggactgtcattggaataatacaataattgtttataagcatttcatgatttgggatgtagcactatgaagtttggcctcatgtccttcatccttgtctggatgcacatcgtaagttagtatttaactaggatacacatatttgatatttaacctgtgaacttgtgttgtacaggtcaacaaaagaagatcaggcagtctcattccgcactgcaactgcaaaggtggatttccttttaatttataaaagaattggtgtttgcttcttctattatcgaccatgtaatggacactaaaagcaattattggttcattgcagtctgtctataaatggatcataaagccacaaagcatcataaagtagaatgaaatgtttcttcctggtcggatggcatttatttacaacatggtacctccttcaaagttccccattttagtgctttctgtatgttaattacttttatttttgtggtggtggtgaccattttccttaataaaatgatatgtatattattttattttcatcactcatcagaattcatccgtactaaacatgatgctactattttgtaaaaaaacgttattgttatttcaatttctaatttgtcaactctatgctatgttatcagctaatttgtcaatttctactattttatcagcttttataatatgcgtgatgcatgcctatgtttcatgatatattattgtctgtttctctgctcatcatctggagtacagtaatcaacatgctcaagctctcaattaacttcgcaatatgcaaacaagagaagaaagagaggaaggatgaaaaaaactcttccaatattatattaatagactatatagtattgctgttacatgcttacatatctgcaatgatttttatgttgtgcacatttaaattgtgattgtgatgcatcacagcttcaatgattactatatgcagaaccttcattatgaccacaatccaacttacatgtctgaattcatcactagatcatatttttgatgctaatggtttcatttgctggattcacccttccaaatgattttctgagagtaagagtaatggtgtttcatcacctattctcatcatctcgtagcatgtccagtactattgattgatgctatttgcaaataattttttccatcattcctgctttgatttgaactatgggttttagcggaagagtaattaatttcattaatgaaaccaggaggatggacttaccaatgatatcccaacaactcttcacaggagcaaagctgattgcgctgttccagaggtattatggcaatacatcatataccacattgaagtttcccgaaacttatcattttcctcagtattcttcttgcttctgcaggagatggtaactgtcagtgtggatggttctgtacttgataggattgctaaaatcatgtcataccttcgacttggatcatctgggaaagtcttgaagaaaaagaaaaaggagagggacacaaaaggtatgttacttgaaaattgaaatggattttgtgcagtggaagttgactgaaaaactaagtgacatcaggaaaatataaaatgatttgtttggaagctgagcacttacattgtgaaaaaatagaaaagtattatttggtactttttgccacaatggttgagtcttgttacaattgatttatagtcttctgtcaataatttaagtttgggtatttaagttatgaccatatgttacacgtttactttagattctgaacggattaattagttcacttaatgtatttgcatgtatgtactctctcatccatatctgcacttgctttgctcgatgaaattagattatcctgattcttgttatgcttgttatattgcagggaataacagtttagcaagtggtgactatgatgaggtagccagacctggccaaacaggttcttctctgaaacatcaatttcaaaaggacatgccgccgccgccaccccctcgaaataataacttaagcaagaatgaggaacagtctattcctgttgctagagcagatgaagatgacatttttgttggagatggagttgactattctgttcctaacaaggaaatgagccatagccctgtctctgaagatatggatgagtccccacataaccatcaaaagcagtcctatttcactgaagagaaacctgtctatgggcccatcccaccatcggaccctgctcaagcttggccacaaacggtaatccagctagtgtttagtaactccggttccattgtgcttaaagtaaaatttgagctatgcatgtccaatgttcaagacaaactaaattttttttttgcccatagttgtaccttctactgaaatagccattaattattagtatgttctattcttgacctgtatttcctaaaagttaatgcctcttatgatttcagaatggatacgatgctattcaagctcaaatggtagctgctggatatcaaggggagtggtcaggctatcagtatggtgaacaacagatgccttatccagaacagtacatgcaacaaagcactcaggactatgatgtattagctgatccaaatatagcccaggatccaaggttgatgactcaagcagataaagatagaggtcttggttctgttttcaaacgtgatgatgaaaggcttaagcagctgagggaaaaagattcacgggagaaagatcctaattttatctcagatagttactccgagtgttatcctggttatcaggagtataatcatgagattgcaggcagcgatgaagaagatgatttgtcgaagatggacatgggtggccgggtaagtgagagtactgtattctgaatgctttttttttcctgtttcccttcacaatagcagacataacttgcttttgcggaattcttgagctcatgtttactgtactttttaaaaaatattttaccatctatttccaaattcgttataatatatttttcttttatgtaagaaggtagagccagctctacctcatagccatttcattgatagaaatgaacggttacagagttgcctgaagaaaggtgaagcaggaaaaaaagaaaaaaaagggaaaggagatagaaggaggaaaatatacaaaaaattacaagaagctaaaattacattaacctcatctgattgtctcagaccagagattgatttttgctctggtgttgggattggcccggttactccatagttctagagcatcgatgatttgttgaattatgtctgaaataccagtttgccatctttaaaaaatcctgctgtttcttgatttccaaagtgtgtgcataggctgcaaaccaagtgggttctatgccctgattgttatgatagctgacagtaactttctccaagaaatttggggctgactctgccaaattacatagatgtaaaagtccaaatttctcctataagcttgtagctgccttgcatctcttaggatgatatggtccttgattgactctgccaaattcattctaatgtatgatactatgattcctttgcaggctaaggggcgtcttcataggtgggactttgagacggaagaggagtgggccaaatacaacgaccagaaggaagcgatgccgaaagctgcattccagtttggagtgaagatgcaggatggcaggaagacgaggaagcagaacaaggaccagaagctcacgaatgacctacacaagattaacaagatacttgcgaggaagaaaggtgacaaagatggaggggatgatggtgggcattatgatgatgatctacctagtggcaagaagcagcgcgcctgatgcaagccactaatagtttatcctgcgagaggtgtaaaaatgtatttgtactaggaattacagcgccatgaacaaacgacagttgtaatgttcagcgttttggccggtgcagaagggaataagaatggggagctggaacggtgaaaatatgtagtttgtccatttttataacagaacaatcggtaatttgctttgttctactatgaaaagagaaaacatcaacgaatgcccaattttctgacaatgtacgcgttaagtcatatcctttaaaatggaaaagtgatttcatccctcgaggggatatcccctcatttcgtgcatgccacctaagggtgtgtttagttcgcgaaaaaaaaaatttttgggtgtcacatcggacatttagccagatgtcggaaggggttttcggacacgaatgaaaaaactggttctaggactggtagccatcctccagggcctgcttacctgagcatctccgcgctggcttcgactccctggtgctcctagtctcttggcaactgtggaaggaacataaccatatgtggcttggtcatatgtggctttagctagtattgctgcttttgggaacttgtcaggagtgtagcgtggctcggcccattctcgttgtttggagtttgtgtttagccgccgtagttttctaagcttcagccttttattttgcattttctcccttcctctggcataagccggtctggctgattgtgttgtgtaactataattgttttcttctaatatattgacgtgcaatccttctgcacgttcgcgaaaaaagtatttcacatcaacctgttaactgaacatcttagtgtcagactcggatgaggaacagcgaggatacgatccgtatggtttcatccacaaaatgctcacactgtaatgcagaggcaattagcgcccaattatctttcatgctgcgagtttgcattccacatttggaaaaactttccagggttgctttgcctaaccaccctctgattaacactcacctagtgcctaattcttttgcccttcatgacaacctaaaccccagcttcagagttggcacaaacgagtcttctccctacacgtaccagaatgccatttcccagctagtatatgcacggtaatttggcacgtgcaacctctgcaatataatcatccgaattccatcacgtagatttctgatttatcacatattttcacacgtgcgaagcatgccggaattcattttctacgcacgtttttgatttttttttttcatttttaaatttatttttttaatatttacagaaatattatatcagcggaaagatttacaaaaatggaccttgccgccctccat

SEQ ID NO: 5358 - DNA, 8561 bp, Oryza sativa
tgcgccgccgccctccgccgggcgccgccgcccgccgtagcgcgtggccccgccgccggccacccgccgcggtcgccgccctccgccggacgcgaccccgccgggcgccgccccgccgccggccggcccgccggatgggaaggggaagccggccgggaaggggagagaaggggaggagaggaggaaggggaggagttggagaagagagttagagaggatagatctgaggagaggtgtgagattcgatctgtctaagttgtaactgtggaggagagggtaagggatagggattatatactacgtgtttaattttaatcccggttggtactaccaaacaatctttagtcccggttctttttggatctaggactactgtggattttgccggaccgaccaaagatggtttctccaccagtgggactaattacatgtatatctcaataaacacattagtcccttaaccttattcatcattaatcaccaaaacccactagagggataaatgcaacttcaacgacctctcagggttataatcttacatttttttcctgctctaaatatgaactttgtgttttctagtgtgagttgttaaaaaaaaacccttcttttgcaacagttactactatatacagacatactcactccgtgggtaaatgtaaggatttttttggttatttatcaagattaacaataaaatgaaagatttgtttttctcaccccatcggtcaaaatttttaatttttaattacttcctccattaaacaccagactgattaataaaatgcttggattctcgtgtattaaaatcagtgtcgtacaaatgtttcaactgtaaaaatacatatacgtacttagaaacgaagggagcacacggtaaaattgatgtgagctcaagatcgatcaacaagctgagaaaatatttcaacctgagaaaatttctcaatcatatcatttctataaccataattttctcgaaaacagaattaaaaatgttcaaaccggccaaagcaaaagcggtaccgtagatatcggaaaatcgagaatgaaactatttggtatcaatcgaaaccaataataataccagaaacatcaactttgtatgaatatataatatgtaaaacaaattcaaggttacactaggtatattacaaattgtctatctttaaccttgcactcaagttaggaatttggttgaggaattgaccgacctctaaactatgagccaaatgaaaaaaaaatggaccatagatattgacgtatttataaaaaaggtaatttctataagaacatgtaacgtttccattttcaatttcattgtatcattttgttttcatcggtaaccattttcacatggctcaactagtaaaagttaaaaaacaaacttcggttacttttcatgattcttttcacaggattaaaaaaaacgtgtgtacgaaaaatgagagagtggagctgggaaagtgttgcaaagaacacagccgaaggtacatgcattgtcgctcatggaacctctgcatgtgctactacatgctcagaatgtcataaccgacatggtgctagctgctagtacaatatgttagtaatactagtacctatagtaatatatagaataacactacagtagtgtacacgagaatatatctcatatacacaagttttttgtgcacaccaaccaataaatatcatggaaaattaaaaaaaatagacatatacttttaataatattgcacatatctgcaaagtctcatattcaaattcattatattttagccataacaaaaagagtgaaaattttgatagtttaaagagtaaaaacctctccgaattttatttttttgttacgactaaaatataatgaatttagacataaaatttcacatatacgtgtaatgttattgaaagtatgtgtccaattgtttataaaatttcttatggtatttgctaattggtgtgtatggagtgtgtgtaggaagtttttttttagagaagggtttttttttacctgtcttctacatccagttagatatatgtaggttttttaaatcaaaaatttagcctatcggaaacttagccctcaaataatctaatttgaaattcgctcttacgtagatttaaactcagaaccttgatatgctactcaggtcactgcagccactaggctacatgtccttttccttcaaatttcaaaccatacattgatattgtacagacatatatatatatactctccgtgaatgtataaatgcaccatacatacaggttactgatgagaacataactggatgtttgtcataaaatttagtcaaagtgaaaagaagttataggccatgcgcttcacagttttgttgtaactaaaacctagtgcatgcatgctccctaccatctactcattcttgaccatgcatgttacttggagcggagtacttacttgttcagggagattcctgtgatcgtctacatggagctgcttgcatggatttgacgtgtccggtcacaacgctctcgatcttaatcattggagggtttttttcccttttcttttggatcatgtatggcggggaatgcattatttggtgtcaggaatttatagctggatccacaggaatttaggcaagttgttcaattgcatgagtataataatgcagtgatcggaattaatatatcctttgtaaaaaaaaatctaactctagctacacatgttcgtaatcaggaatggatttttttagatagagggtgtatattcgagcaacttttgctgcttgtggtgaggcagcaggaatcgcctataaaatagtactaactggctttcttgtgttcaactctgcaaccaccaatcaagccgttctccgtatagctacaagagcttcaggacatgggctgttttgccaccttgttgacaaggcaacaagatgcatatagatcagcccagctcatacttcagtgccaatgaagtgactagtgaggaaaaggaggaaaatatatactagtattattttatctttggttaatttgagagccgcataaataagtaaataaataaatattctctgtcccatattagtaggtaatatgatacatctcatttggtttatattactatattttaggatgaaataagtataaattgcaaatgcagatattatatagagttgcgacttgtaaaacagtgagaaaaattggcatgcgtgatgacggcatgccaaactttagctcaagattctctctcaggccgagtttagttccaaattatttcttcaaacttttaaattttttatcgcatcaaaactttactacacacataagcttttaactttttcgtcacatcattctaatttcaattaaacttctaattttagcgtgaactaaacacacctgaattaggaagtgaggaagaagagaccgtcctgcagctgctgcaggccaaggcaaaggtgcatggaccatggtgatgcgagcacacacacctttccttataattttggcgggcacatacaacagtaggtcctggatgatgagatgttgggaggagtggccaaccaactgcacggaaatcgaggagtagcatagcactccccaaaggtcaaaaaagggtcaaagagcatatcgcaatccaacgaacaaaagccaccaaaaccatattcttcggcctctgctctattttgtctccccatcacctttttctcctcatcttttagtccaaactgttccaacaacaacaaacatgtcacagtagtgtcatactggatactattagttgcagagtggtgccagtacaaccgtagtgggagtacttcatccgtattaaaatagggtattaaaatataatgatttttagattatttaaaaaatattaaggttagatcaaatgatatatttttaagttgtttcatttattaattcttgaattttgaattatttagattttctttttaataatctattttactttaaaatttcaaaatcaatacaggaatactttatattatgatattatataaaatatgaatcctaaccttctttatagagtattttgttagaaccataaaggagtattatgtattatcagggggtgggcatttggtctgaccaaaattttcggtcacggtctttggtttttcggtcatttcggtctttgaaaagtaaataccgaattttgacgtaaaaatgtcaggaccgacaaattcaatctcggtctcggtctaaccgaaattcagttcatatatgcaaagaaataatggaaattttcaacacaaaaaaaaatccgtaagcacatatgagtaaagactcttattaggttgcatgcctagaagaagtatggatgtgaaaattagagtttaatgctattaaacttagtggatcgtaggttacatttagacattttttttgttaatttagtatattcggttaaccgaggagactaactgaattgactgaacaaaattcggtctttcactgcttatgaccgaattgatgactgaatttctgagtctcggtcttttagttttggttttttctgcccacccctatgcattatactttgttgtattttgaaaaacgagtcctaggatgggtctaattttattgtagattgctatattttgaggagagagtatatgaggatgagtcctaccccatattcctatagtacgtattactaggaatatgaaccgtattagaatacgtctaattttgttttagattgatatattttgatacggtggtctatgagatgagatgcctttgtcaaaggtccacgacggcattcatacgtgctagtactactcatgggcatgaatggatgctttcacgtgatgggtcaaacccgtagagaatcttaaacagtgtcacggtagttttcgtcaaactactaacgttgtcaggcgataaagatatactagtataatgctcgtcaccagtactataatattgcacggaataacagtgtgtatactggcctggtggcatttgggatcggctacaggcataaaaaagctggacgctggaacgagaattcatggccatatgatgcagatgtgcccggctcctgagaaagttgactacggctagttctttttggagggttggttgttcagtagtgacttttgtgtactaacgacacataaaaattgaccttagaatacacgtactgagtatctagcagtgccggtatctttagactagtttattgatcggattatctacacctaacataaatagcttaaaacaaatggtttaaatactagaaagaaaatactccctccgtcccaaaatgtttgacgccgttgacttttttaaacatgtttgatcgttcgtcttattaaaaaaaaattaagtaattattaatttttttcctatcatttgatttattgttaaatttacttttatgtatacatatagttttacatattttacaaaagtttttgaataagacgaacggtcaaacatgtttaaaaaagtcaacgacgttaaacatttagagaagaagggagtatatttttcaaagctagaaatacttcctccgtttcacaatgtaagttattatctagattcattagcatcaatataaatgtgaaaaatgctaaaatgatttacattgtgaaacggagggagtacgtgtcagtatttcggtaaaatagttgaaagcagctgtgcttgtttacaaccacgagaccacacggagtaataccgagcatcaagccacatcgcacaatgcagcatgcgcctcttctgtacatgccgctgctgctgctgctggctcccctgcctgcgcgcatgtgtcgcgtcaaataaccgcgagaaaagcaaagcagacagccactcacccagtgtcctgcatgaaactcggagcgtagcggacgacgaatcttgcgtcacagatcgccccccaacagcaacagccacaccgatcccccgccccgtactccactatacgtaggccacccatctcccaacccggcgtcgcgtgggcgtggctcgtctcggcgccggttgcacacacacggtggatggatgattggatgatgtgctgccgacgaggcggggagggcgtacgcgcgtaggaggatggtgtacgtacgcgtggggtgtgggtgggggtggcgggttgtcgagcgaggcaggcacatgggccggctgctggctgcggctggtggagttgaatggatggggattctgtccgcgacgcatatggcgagacgcgcgcaggcaggcaggcagaggcagggtttgtccttggctgagactgggatggatgggatgggatgaggaggggccagcattccgatgcgcggcctcgaccaaaactgaccgcctcctgtacggttctttagtgctcaactgcgcaacgtcaagcatatcgtaccagactactactcctcctcctacctatagaagcagcatttttcaaatcaaatcaagcgaaaaagtacttgaggaacgcagggcttgccgttactctaatggaccactagtattttcgtggagcatttgagaaagtttagaagtaaataccgctataatatggccctgtttagtttccacacaataaatttataccctatcacatcgaacatttaacacatgtatgaagtattaaatataggctaaaagaataactaattgcacagattatgatcaatttgcaagacgaatcttttaagcctaattgcttcatgatttgataatgtgttgctacagtaaacatttgctaatgactgattaattaggtttaataaattcttatcatcgtttactgacggattctgtgattagtttttttattagtgaccgaacatcccatacgacaccctatataatactcgatatgtcacgccaaaactttacgcccctgatctaaacacccctatcttcgtcgtaaaatatcttaatctagtaccgtgtctgttcagatttgtactgtatctaatatgttacgtctcatgctagattaatttattctgagacggacggagatagtagttgccattaccatctttttcctaaaaattagtttatttttcacacatctcacatatatcaatacaaaaccacattgattaaaatacctctactttatcaaattgcaataccataatttctcattttatctactctcaatataattatattctattttgcacaaactcctatgcaataattaatttgaaaataaaacttattttatgacaaatgaaggatgctacaaataaacttaatatgagactgcgcaagtagtgttgtcgtaatagctttttttactctccctctctctctttgtgaacttaatactccctccatctcaaaatgtttgacgccgttgacttttttaaaaatatttgaccgttcgccttattcaaaaaatttaagtaagtattaattattttcctatcatttgatttattattaaatatacttatatatatatatatatatttacacatttcacaaaaaaaaatttaataagatgagcggtcaaatatgtttaaaaaagtcaacatagtcaaacatttagggaataagggagtatatctatcttgcttcttgcagtattgtataggagtagaacaatctcttagtatatggtactgtagtcaatactttataattttttaaaattctcttctctacatagcattatagttagcttataatagctcactactacgcctacgttatccttgcgtttactataataaacccgtctactctatactctggtctcgtctctcatgtgcacgatgaatatagtaggattattattattattattattattattattattattattattattattattattattattattattattattattattattattattattattattattatgtataggggatcatacttccgggctatacatagccgtctcatggtaggtataatccgtcttcaagtcaaaagacacgagtgacagtgagtgattacccgtgatactcactcactcatcccagatcattccatcccgtgcgtttccagccttttccttttctccgcgcgctttccgctggccttcgctactccactttgcatgttataattgggtgggtagcggccgacctctccgtgtcggtgcggcttctcgtgtgcgcatcgatcgaccgatcggcacgcgaggattccgggattcgcacgaccagatcgcggcgccgcactcgcgctcgcgcctgtgaatcgagatggcctcccgtcccgtcccgtgccgtgcgtgccggcggccgatcaaagcggtgaacggcggcacatggacacgcacgcggttgagcattaattgggtccgaggctccacgtgacaacgagccaagcaacgacctgtgatgaatgctaatccgggaagaagaagaagaagaagcagggattgatcgccgattggccgtcgctgtcgatcggtcgatggtgaggtccaaatcagcgtcgttatccgccgcacctccatctccatgcacacacaggaatcgacaggtttgctgggctccgcgcgagtaatataatccagctttccgcttggatattttgcacgcaacgcaaacgagggtaaattt

SEQ ID NO: 5359 - DNA, 25538 bp, Oryza sativa
ttctcatggttaccctgcaacacttttagtttttcacccctaattatcaccgtcaacgcccgctagacggggcagggacaaccggacaagacaaccaagcgtaataatactaccaaacaacgaacatgcagagataaaccaaaattaagcggagtctgctacatgtgcgctcacaaatgagaagtcagaaccatatgcgtcagcaaacaaattcttcaaattacatagtagtacacaactgaaacaagctgcccatttcgcagctgctatatatttacaccaatcattctgtatgaaacacacaaatcaccgtcataatacaggctaagctattgttaccatgaccggatatacacttggatgtagaggttgcaatgattttcactatcggaaaaaaaaaaagagctactgttacctttgcccagctcttttcgctaacctccgcaattgaaaatcacagcacagtggtgcagcttaacttcttgccaaccaaactgtactaatgtactaccaaaaatgtgtcctccccagctcagctacctagcttatgagttatgaaagctttgcttcagtaagagaggacatggccatccagcagtactcctttggcttttatcacccagtgttgagtcttttagctcccacacttgaaacattgtggggcatcaccatctttcttctcaagaacaaggcatagaggagttcattccatgcatcagggacaccaggcaggcaccagtggctgcaatcctgcctgtgatgagatgcaggccctgaaggactcaggtacaccgagaggtgcccgtctttacgcagagctgtcatctgagtcacattcagtatatccagcccgacaagcttggtcgtgatgctgttccccagtacatgatttatgggttcaagcaggtcagcccacggttccagcgatttaattggagttacatctggtagagtttccaagtggcaggtccctccagtcttccagtcaccacctctgtaagaaatatctaatctagttaaagaaatagtttgactgaatatttgaaagatactatgatgtttgttcacaagtccaacaataaataccatcagcattgtttcatgatgctaacaatatattggcacaattcacataaaacaatgaaacaatgtatggtcaaaagcatctgatatcattcgatacaacatacacaatcaatcaagactgtcaaataatgtttgagcaaggaattaaaaccaagggaaacactcactatttgagtaattagagttggtgattcacagacctgaaatgcacaggagcatatgtacggaagatgatctgggtcttgtttgtgttaacttcattgcgaagccaatgaaacaatgtctgcatggatctttggtaagcatctctaacagtcatctccattttgacctcgttgccttcttggaaataggcgccactggtgcaagacataacagtaagaatagcatgatctctcagccataagacattaagtagagaatgctgttcagtcaatagaattcaaacatttatgcttaccctttgattgttttctcatggttccaccagtgccccgtgttaaagatcaaaagatcagcatccttccacttaccccggccagacatccaatccatggcatctactctaattgtatattttacgactgcaggggctccagctggtgcacgaccttgaaggactatgaaaggagacctgtaatactccacagtgcaattgtactctctaaacttgaaaattaagaaacccatgtgttttgtaataggattcccattaacttcaaagatggagctcttgtcaggaacagcagcagcgagcatacaaagcagagactcccattggtttcttgcaatcgaatccccaacaaatacaactcttctgtttctgagtttctctagcatatttctggcattaaatctaagaaacagaaaaggagacgaaattagagtgagacaccagcattgctaatatgggcatttgaatttattgataatggtacatctcagtccacaggtatcaagggagtaccatacaaggtcacaaaataatgaacttacaaggtcacaagcatgctctttccttataaaataattcactgagaaatcaaaaggcatgcaatacattaaaaaacataagtacaacgagattatgcttctaacaaaaaaatgcgagtccttttacatggtactatgtaacacatccctaatgttataatattccacctttgcaaaatttcatacaattagcacttatgaaggatgacaaacttaccctccaagtatagctactgacatttatggtgacaagaatcaagattaaatattcttttcaaaaggtagaaatctaatcttggaaccactttacttttccaaattgaatcaagcaaccacttaactgcaacaaaggcagttagaacacaacaaaacagagccctcaacaattaacaggacaagaccacctctccatcgaaggtaaagatgattgcaacagcatgacagtcgcagatcaagtaaacaatactgatttaataaaatatatcttctgcaggactaagcaataaccatacgggtaacattgtttcctacttttgtaatcatgtgggaagcaaaagggcatcgaatttccaatcgtggcgcacagttccaaagtggagttggtcgttgacagcatcatgatcatcccatgttccaataatctaattttaaccagggtgaagattgtaaaatgcacgcccactgatccaatctcagcaagaatatcccactggaagattgaagtcagaagcactaacccaaacttaatcctcatcatgccagcagagcagcatgtttgggttctagattcaacccaagtttatttaagtccgtcttaatttctttgcctttataagttaacactcaagttgtagaacattccagcagacaaaattaagtagcacggtctccaatccacatctccttaattaatttatactaatcaattaatcattcgccatctccgcaccgttctagatgcttggattgcagcaagagatctcattaaagatttcttcattgatcttcgtcaagctctcgaagtaaacatttactaaaatcgatttctatctaaacctccaaactcgccaccccaatccaacaatggaatcaatggaagcataatatgcaagagtaccaaagatgagaggaagaagtagaaatcgatggaagaggaggaagcaaacccaacctggggagatcgcagcgggaggggcgccatcgccacttggtgtaggagtcgtcggggcggccgttctcggagcagcggaagccgacgtcgaggaaggggcaatccctggaggcgtagagcgggtagccgtcgtcccacacccactccccgtcgaacaggtcgcactcctcgcctccgccgcctccgccggcgccgccgccgcggggctcctcgatggagaccccgccgctgaggagcttcttgggcgccgccagcgccgagccgacggcggccgagcagcggagcgaggcggcgcacacgagcaggagcagcgcggcggcggcggccagcatcgcgaccagccccgccgccccggccttctccagcggcctcctcatcaccccccgcgccagccgcttcgccgccgacgtcgaccccaccatcatcgcatcgatcgatccccccaccgacgaagcagtagcaccggcactagtagtaccactactactacctgtatactacctcgccatggccatggagcttacgcgcgcgggaggaggggagacgagacgaggtggcggagaggaggaggagacggagacacctcgagggagaagacgaggaggtatttatgaggaggtcatttgaaagggaaatgcacggagtttggctgcttccaattggacggaaagcaatgtgattactatttccctatttcataatatataagttattatagcatttcttacatttatattaatattaatgacttacattgtaaaatggagggagtagtactcctctccatcctataaaaaaaactacttaacctaatattgaaagaaaaattttctaatacaacaaatcagaacagatagaaactcatccaatactaaattatttttccaatacaacaaatcagaacggatagaaactcatccaatactaaattattttttttaaagtagaacttaacctattactaatataatatcgtttcgattcaggaaatattatattttatagtagattaatatatttttgagacgaagtaagtacaaattagtagtgtggtttgtggcaattgtgttgtgcgtgtggagaggggaaggaagaagtggatgggagggggagggttgaagttgaggtgtggggcctataaattcggctgtgtttggaggggttaagtatgagtcaagtcaagcacgatctatccctcggtcatcaaaaaatacttgctttaggtcgagcgcaagttaaatttgattaccatctgtctaatataatgtcaaaagatgtactggtattttattttaaaaaaactttgtttaattttaggccgctaccttttaaccacatcgatcattttcgatcggggcagttgctaaaccattttcacacaagcttcattgtccttgttggcttgtgaaaaatctagaactctattttttgactacagagagtacgtctacttgtgtgatggtaacgattccttttggtccttcccacgttttgtttttaactgcgttgttagactgtattgcgtatagattgtgacaaccatcgagtttgtaatcaaagataattgattttggtggggattagtagtagtagtgtgggttggggcaaagaatgatgcatcgaaagatgatgagggtgttacgaaagcaaggttgttggcttgtccttgtacgcaacgcaaacgcaatcaagtttaatccacctggtcatctcgataacagcaaatacactactaaacgagccatgatccaaaaccaatctttttttttttttggaataagttcaccagaggttcctcaacttaacaacgagattttttaaaatccctcaattacaaaactagaaatattcattcctaaactcactcaaaccgttcaccggaggtcccatgacagtatttgcacctggttttattgacgtggcatcctagtcagaaaaaaaataataataatatgtggggcccacatgtaagtgagagaaaaatgtggggtcaataatccagtcagcaatcttcttctcagtcgccgttttctttgccacggatggggagcggtagtggctcgcggccggaggcaggcggagcggcgggcaaccgcggcggtggcgggcgagcgacggctctgggcacgggaggagcaaaggggcgggtgagcggcgaccgcggagcatcggcggtggtaggcgagcgcggctgcggagcatcggcgttggcggcggcaagcggtgggcaagtgtggcagcgggcgagcggcggctccgggtcgccgccatcagagttaataccgagggagaaggagggtacgttgggagcctcataacttcgccgttgctcctcccggcggcgctccttatcgccgtcgctgtcggagtcgatgccgagaaagaaggatggcgcatcgggagcctcataacgcttttgttcctcccctccattgccgccgtcggtgaggtgggactcgtcgccgtcgccctcgaaatcgatttcggcagaggggggaccggcggcggacgagcgcgatagaggggagagcggcggcgagcaagcgcggaagaggggggaccggcggcggggcggagcggccggaataggccggcagaggggggacggcggcggcgcctgcgatgcctccgccgactccgcaccgagtcgagcgtgcaccgtctctctcccctctcccaccatcgccgcccctactcatcgccgtcgccggcgtctgcatcggcctcttatccgccgccgagctcgccatcgcgccagccgtctctttccccctctcccgccgccgcagcccctgctccgccgccggccgcctcacatcgagtctaccaccgcgcctactcaagagaaggagagaagagaagagaaaaagaaaagaaagagagatgtggggctacatcattttctctcacttacatgtgggcccccacatatttatttttttattttttgctgactaggatgccacgtcagcaaaaccgggagcaaatactaccatgggacctccagtgaacggtttgagtgagtttaggggtgaacatttctagttttatagttgagggatctcaaaataatctcgctgttaagttgagggacctccggtgaacttattcctttttttttgggccaaagccttgtccctacacaagcctagttagttagcctaggaaaagtacaccgaaggtccatcaacttgtaatcgggttacaaaatcacccccaaccacaaaaccgttcattttaggtaccgttcattttaggttcctcggtggttttgacccggttttatccaacgtggcggctgagtcagcgtggggaggaggcctgcatgtcagacagtccacgtcagccacttcttaccctccctttcaactcacttcctctctcctctcctctccacgtcgatggccggcggagagcagccagggcgcgacaggacagtgtgacgagcgcggtcgtcggtgcaacagaggagcacgtcgcggtcgagcgccgccatggcctcccttgtctctgacgcgccttcatcaccgctatggcctcccttgtcttcaccgcgtagagcgaggagcgtgcgggcgaagtgatgcacgaggcggtcactaacctcgccccgagggccggcggcggcaagcacggcatccgcgacacggcgtgccccatcgaagtccccccggtcgacgaggtcagagcacgcgagctctgcagaggttggtcggctggtggggaggaggcctgcgaggtgaggcggaaccgtcggcgaagtcctgtaagccatcgcagcccaccaccgccacaccctcgctcctgcacgcggcaggacgctcgtccgcacggcctgccaggacccgaccagcgcgaggatgccgtgcagttgctcccctgctggacgccgcccgctgcagatctggcgcccgcgcctcaacggcggcggtgttggggaggccctcctgctccggcggcgtgggaggacgaggcggaggcggatggcgccgacggggagaggaaggatgccgccgtcgtcatccatggccgcacgtggagagacgatggaggctggcggtgtgggagggcaagcacgggttgacgaggcggaggcagatggcgccaacagggagagggaggtcgccgccgtcgtcatccatgtccgcacttggagagacgatggaggctggcggcatgggtggacgaggcggaggcggatggcgccgacggggagagggaagtcgccgccgtcgtcatccatggcgacacgtggaaaggcgacggaggccggcggcgtgggagggcgggcgcgggaggacgaggcggatgcggatggtgccgacggggagcgcgaggacgtcctgctcccacatcgtcgcggctgccgccggtcgccggcctcccgacatcctcctctcctgcctggcgccctcgccccgccggccgtcttgctcggattgagaagaaaaggtgagagaggaggaagggggagaagaggtgaaagagagtgatgacgtgaacaacctgacatgtggggcccacgtgggtcccacgctgactcagccatcacgtcggacaaaactggggtcaaaaccaccgagggacctaaaatgaacgattttgtaagatgagggatgtcatatatctgattttgtggttggggacgattttgtaactcgattgcaagttgaggggccttcggtgtactttttccgttagcctactcagacccagtcacttctgggccaggccgtgataccatagccttcttatgggccgtataagcccaaacactgcctcctcgtgggcctattgggctaatactccaaggcccaactagctcccactccatcagtccacaagtcaccatttcaccaaccacctcgagtaggtaaccggcggcggcagtttgacggcgggcgccgtgccaactccggcgtcctcctgccgccaccgcagttcgacacctccgcccatccacgacgagacacaggtatacggcgctattcctctccaccccagtaaccacagattgggagcagatcacacgaaggaattgtgtgaaaggactggacaaatttgtttcttcgtcaggcttgagagttcagaagcaggtgagaacacttgtatagtttctacgacctcttcttcttctttaccggaatcatcagggatcaaggattttgtctgcatcacggctgtacattgatgaatccaattgcactagtccatgtctctctaaagtcaggccatgaaatgccatcacgcttgagaatctagcaacttttgctttgctagctatctatccagtccagggtacgtggagtagttggttggcctttctatcatcttttaattcgctgccatgacggttgaggtagacagcattctatctgcacctgcattattgttgatccctttctcgtcgtttttttggttttgttttgttagagcaggtaaaacagcaaactataaatcagatataaccacatatcaaaaagaaaaaagaagagagagaagaaagcaggctacagatttgtagccggctgcaacacagacttcaaaacgttatgtgtgtatgagaggtaggaccgggcattaatggtgtagtatatttttataattaactattataagaatagactattagattagctatagatgatttggagtcagtagctggctatactattaaacttgctcttatctttctatctttttgaccttttagcagccagttgaagctagacatgttcacccataagcatgtgaaaatggaaataataaattaaacaataggactaatgtaaaggtgtccaattataaaatgatatgcaaaatcatctaagtttccgtaaccgcagccaccttggaagaatcgtggactaggaatagagtatttgtctgatttggactttggaaactatgggcacatataccgttccacgcatagttcccccgagatgatcgcataagatgcatcgtccaagtatgaatcaagaacaaactaattagagccattttggtttgaagttaaaatacacccctaccaaattattggcactttaaatagtattttggttagtgtttggttttgctactaaaatgtgacaataacatatataacttgccaaaacttgggccataacaaaagtttgcttaggttttggcatggtggcaaaccatgcaaattctaaggaatcacattaaagaggcttagtgctccctgaaaaggtgctcacttcattctattttacctgttgttttaggacatgttatatacgttaatttgatcattgtctttttgactatatattcaataaatattatataactgcatgaaaatatctttattgataaatctttttttaatgaacgcaaaagatttgcttccattaagcaaagacaaaaaaaacagtcttctgataaattatgtcatgtctttttcacatattaatttttaaagtaaatttcacaaaactacagatatttgactaaattatcacaaaactatagatttaaggtgatttatcacaaaactacagatttaacaataaatttatcagaaaactatagattttaggctaagtatcgctaaactatggatttactaatgaaattatcacaaaactatatattttgggttcaaatccttagcactaatgctatgtttgagttatatatatctaagttttgtgattaaattgatattaaatatgtaattctgtgataactttgttactaaatatgtagttttacgattttccacttaaactgtagttatgtggtaaatttagtgttaaatctatagttttgtgatacatcatgttaaatttgtagttttatgaaatttactctaatttgtaatattgaaaatatcaagagtttactccttgcgttttatgttataagtcgctttgacttttttaaagtcaaacatttttaatgttctatcaagtttaaaaaaaatatagcaactttcatatcactaaattagttttagtaaatctagcattgaatatattttgatagtttctttgttttatgttaaaaatattactatatttttaatataaatttggtcaaagctaaaaaaagtttaacttagaaaaaaaattacaatgacttataatagaaacagaggtagtagaaaatatgcgacgttaaataatttgataaataaatagagaaattttatggttctggagaggtaccaaagtaccaaaaattttattgtaaaattcagtaccttcttatacctagttagtaagagataccaaaatttacatgagaaattttatgagaaaaaaatacattacaaatgtggtaacttcttaagggcagtaaaatcacttgaataaataggagtaacatgttgacaagtgcatgacactcattgggtacgtgtgagttggcaattacagcgacaagattctttttgttttcttgtagactgttttctaattagttgtgcttcacttgattctagcaatcgccttctaggcgatagcaactgaaatgaatggagtaatatataactctaggtgtgcttcttgccaactttgcttgcatgatttcaactcagataaacagataaagtattgtaagataattacagtgcatgtctttctcatgataaggaaagggtgaaaacaatagtgctgtgtccaattcacaagttactagtactggcataagatattttgctgaaaatttcattctgaaaaggatgtgataaacccatggtctgatcaaaatacgctacttaatcgaatagaagaatagatatgcaaactattgctgacagcgttagagatgcaaagtccagcccacttaatcgaattttaactaaaggtgacaagtccccatgcatttgagcaatttgcagaacatttcaatgcatttggatcagctaaagaaaaatccccttcgcactgaatcacatggttagattctctctgcagtccacgagtactgcaaaataaaaatcagcaaatctgtgggtctttaccagtcttatctaatcctgtgtgcgcccattggtttccatttattaatgaaaaataattctttgatcagtattcagtataatgtatagaccttatgttagagagagatttaaacacagatacattgaaaaattggacatgtttcttgaattgtagtcaccttgctacctactgcaggtgctgaattctgaattgctgactaggtaactattgtccatttagattagtcatgatgatatttttttagagtaaattgcactttggtccaccttttattatccacgtttcaatttgaaccacccttaaacctatctttttaatttggaccgggtaaatttatcattgttgcgatttggactaccatgaacaactttttctcgttatgtctaaattccctttcggtaaacatatgagccatacatagaggagttcggccgtatatcagagctgatgtgtttaaggtcgtgctgaaaaagatcattcgtggtggtccaaatcgcaacaatgataaatttatttggtccaaagtgaaaagatgtgtttaaaggtggtccaaagtgtaattcgctctttttatatttgaaccttgttctgagccaaattaatacagttgttaacgaaaatttgtcattgccaaatgcttgaccgttcatttacctgtcatgtcaccttgtcaaatccttgccagttgtcaatgattatgtactcgttggtgacccaagaatattcttcagaatttctttttgttttgagcaatgaacatggcgtctgatgttggatgccactcgatctagcaagctgggtttgtttgttactcctttttcttaaacataaatgtgactatcagcatatatcatggcatacgtaagcttgctcttacctagtactcccattgattaaattacttacttgagatcaaaataatggagtatttaattactttagataaaaaaatggagtgttaaattgtctggtgcttacgatctacagacatggactgatagtgatggataaactgaatagaccaaacacagtgaatttatctatccctttttcggtcagtatttctagtgcggtggtaaaatttagtgaagaattacaatatctccggttgttaatactgtacctcaaatgataatgcagcttcctctaaatcacaacaaatggcagcttcacttaagattcttattaaacttcggcaatttattaatagagtaaattaatatattatataagtttgatgttaattcttttctaaggaaaaatgttcatacatacaactgctaattaaaagaacacgtgtagcaaatgctggtattaccatgctttattcagatagtagtgagtacgaagttagtatgtttgactagtgccattaattttcaggtctattgtactattattaaaaaacattgatgatgacataaatatatcatgcagacccatgtgttattaaattaactccgtcaggtttttttccccttctaaaaaagagaagcatgagctctgctagtcactaaaggtagaaagtagagtaaggtttgcagaacttagtgcccttatctctgtgaaaaagtgttgtatctgttgatttgtttgctaacagaaaggccatttctttatacccccaccctttctaaaaaaatattgctatctaatagtataatattttcggatgaagggagtaatttttacatggaaatttatgcacattgtttcacaaatttatcatgttcccgcagtgtggttctatccatttctttctctaaagctcgaaacccttaacaagttgacataaataataagagcaccgctacatgttctatttttttcttactaaatttttactaacaatcgtcttaaccgtttgatttagatagatgaaaattaaaaaattctagatgcaattattgcgtgacacattattgttagtaataagaatttagtaagtaaaagtttatatttatagcttttccccataaataatggtggattcttgaatcttgattccctgccgtgattaagaaattaatttggtttctcgattttcttagtgcgagcacccacaatcacacataatcagtggcacctaattaacggaactgaaagtctgagatattagatgattagtgtaagtcattgttatgacaaagcattgcatggcaaggggttgccttaatggactggatgaacttggggttccacgtcagtcgttttctgcagaacagtgtggctacttatgtccactaattggcgtgtggatctgaatttgtcatcggctgcatttacaattgatcaaccagtaggggatgagggatgaaatgagtagattacttttgattaagcaagtaactaagagtcattatcaccttttatctgtataatcacataaacatcttatgtatctttctttgctgctcctccttgattgaacaggcatagctgccattaatattttcgacagagagaaaagagtcattgtcattcagatatatctaatcacggaattagggagggaaatcttcgtagtgagactctcctagtgattggtcacatactgaattcttttctgaaaggtataacaagcgggtcaacatcaagagagaacctaatctagagcattattgttgtctactccgccaaatctggtgtgtcacaagtttttgcttgtgccaacaagaccgggccaatactggatttcttttttttctccatccctttgcaaaatacggtacaaacacaagcgtttatatctacgttcttttatgaataagcgcatataaagcttatccctataaacacgtttataagattgggttggtaatatcttaatattaacaaagttactattgatatctcatgatcacatcaaccattaaaaattaattaactgtaagctagtggatggttgatctcctccagaaacgcagcatcaatagtcactcggatgcctcttttgcgctcaggatcttgagacggcgaaccacattctcctcgactgcgtgtttgctcagcaggtctggctccgtgtactgtcgtcttctggatgggttgccctctctccctcgtggcagctggttctaggactggtggccgtcctccagggcctatttacctgagcatctccgcgctagcttcgactccctggtgctccttgtctcttggcagctgtggaatgaacggaactctaaggttttcgactttgcactattttcagtcaccgtggttctggagtccatccactcggagggtcatatgtggtctttagctggtgtagccgctttttgggacttgttaggagtgtagcgtggctcagcccttcccgctacttggagtttgtgtttagccgccgtagttttctagcttcagttttttatttcgctttttctcccttcccttggcataaactggtctggttaattgcgttgtgtaactataacttttttcttctaatatattaacgtgcaatcttttcgcacgttcgcgaaaaaaaaactgtaaatacgagcattgcatcggtatactctcgatatttgagaatcggtacctatttaaacatttcgaagacaatctaaaactgcacccttcgaggaagaaaaaggcatcaaagtaaaagaagaacattttattacttggcgaatggggatgtgtgctgaacaagtaaaatatctgcccaagaggccaaaatggccgttgagcgttttcctggcttgcgtgttgttcacaataaatcgcaataaatcaaataaaaataaaactgcacacgatgcatcatccgtcaccatcttcacacctcactaattcattacatgcgtttgtttttctctttttatcatcaatatagctaaccggtctccgtgcacacaatattttctctagaaatttctaggttccgtttcttgtaatctcacatccattaattccataaatccccaattgtccatatatactagcaacagaaagttcagacttttgtttcagaaaaggccataaagttactcattttaatttctccagggaaagaaaaagtaacaaagctctaacttcccgtgtcaaatatgtgcaccaatacccacagattatacaagacatgattagcaccggtaaaaagtgggcattgacacgtccaaatgcacgagaagtttgtactttttttgttgctgttttgtttcgtctatgcaaaaaccaaaaataaaaaggaatttgtacaactgaaatgatgatgaaccacaagaaaagaaaaacattggtgtggtccccacgtaattagcaaaaaaaaaagaaggaaaaaaaacaaaggctttgtggctatttaagccgcttcttctcctccatttctccatccatccatccatgtcgtgttgttagcttcgttttcttcttgtttcatcaatccaaggagtgtggaaggccacacgccaagattatatctatgctaatttgattagcagtaggattaattcagtggctagcgtagcttgattagttggtttaattagttggagagtaaagaagatgttgggagtgttcagcggcgacgtggtggaggtgccggcggagctggtggccgccggcagccggacgccgtcgccgaagacgcgggcgtcggagctggtcagccgcttcctcggcggcgccgagccggccgtgtccgtgcagctcggcgacctcggccacctcgcctactcccatgccaaccaagccctcctccgcccaaggtactaatcatcctgttcctctgaataatacagcttttgattaattgtagctgaatttgcttaagttctactgttcttcaccatggatttctcaagatctaaccaaggacagaatcagtgattgctttcatgtgttcttcctgagtcagagtcatttactatatgcttttactctttggttagtgaagtcttctttagctagtgatgatcaactgatcatgtcataatagctctcaatattttattttattttaaaggggactcccaaatcccaagatccgagtgtctgactaaatcagagaaaaaatagtttcttatcgtaacactttgctgattgtttcgaagggaaaaaaatcacggggttggtaaaacatatgcttagaatgagcgggtgtttgggatgtggtacccatctggggaaaaaaatgatttcatctcaagtaattcagtaacttaaacaggcttttaccacaaaaaaaaacacaaaatggtttttttttctgggtacggcacacatcttgagtcaataattgggcagtttttctcctcatataaaggcaggtttgctttcgtaagacaaactgaacaataaatacaactccataatccatttctgtaggttgaggggccaagctaccaaacctcatattcagttcatagattctcatccgaattatgggtcgcatgtctgagatgataattacatgattaactatggtatagatttgtttgtttcagaagtagaatgctaaacaaagaagaatatgcagagattttttgagaactaaatgcacaaaagtaactatcaaaaatagtagttttgccttggtgctacgatatctgaatctttcttgccatggcactccggtaactaggactctcttgccacgtgttacggtatcctggcatcaaatggttggtgccttggtataaaaaacgagagcagaagaagacatgaaagaaaaaatataatcaaaatgtctatgtcgatgtggacatcatcacatatcaatggaagaagtccacatcatgccaccttccacaaacaaggtgttaattgacctaacaacgaacaagaacttatattcttcactaggaatctaatggtatttcaatgtattagatatagtttaagaaaagggataggccaggatgatctatttccaagtctttcaaaagaaaaaggagacaagatagtgttggttgttggacaacttactaggttgcttatgaaaacctctcttgatttatgcatttacctggtattattgtgctgttcacatggcccagttcatagtagagggcactaactttgcaatcagttgctaataccagaagtctatccagttttgatacccacagatctgaaaggaaaaggctggactaggtgacccatatggtcaatcaatccaccactatgatttgtgggcctggttactctttgttcatatcttatctagtactagacagattcagtgaagaagtagcatccaaggaattccactccattgctccaatttttccagtacaagcatctttgtccttattgtaactagtagtagtacaatcttcaatgtagtacaattcaatgttaggtacatcttacccagatcaaatcattgatgttgcacctaattcttttcactctccaattattcttaaagagtagaaatgctgagcactaatcaagcatactaatgctgttcctgaatgccaatatatgttcttttctcctatgttactattaagatgcatgcatcataatacagtagttatgtccttttcctttctgtaaaaacctttattcctcttaatacaaagatacacaaatcttttgcctattcctgaaaaacagtagctggttgagtaacatatgcagctgtcttgatttgtgcaggtcatttgcagcaaaagatgacatcttctgcctgttcgagggagtcctggacaatcttggcaacctgaaccagcagtatggtctgtccaagggtgccaatgaggtgctccttgtgatcgaggcgtacaagacgctgagagacagagcaccttaccctgctagcttcatgctctcgcagctcgccggcagctacgcctttgtgctcttcgacaagtccacctccaccctccttgtggcctctgtaagttttgttcatcactgaatgctgttgctgcatcacttcacttgcattgtcagtgcctgaagatttggttgattttggttacagattatgacgtgttcttgtgctgtgatttgctttttcaggatccggagggaaaggtgtctctgtattgggggattactgctgatggatctgttgccttctctgacaacattgacctgcttaaaggatcgtgtggcaagtctcttgcacctttcccacaaggtaatgtttaaactttgaacagtaatgcagcgacgaaagatgaagcatttactataaaatttgatctctaactattgatttagttaggcacaattgaccttttctttgtttctgttcactaattcatttcggttgcaggctgcttctattccaatgctcttggagttggaggcttgaagtgctatgagaacccaaagcacaaggtgaccgcagttcctgccaaagaagaagaaatttgcggtgcaaccttcaaggtaaaaaaataataataataattgatggcaacctaaatacttaactgaatacattgtaaccgactgatgtcaaatggtgttttcaaccctttcttgggtcgatgtgcatctcttctttatcaatgaaatgaggcagagcttctgcctttgttcaaaaaaaaaaaacattgtaactgactattttctcctgcatttcgtctgaactcaatagacatttttgggtgcactgttaattaacacttttgatttgatatatgcaggtggaaggatctacaatcctcacagcgctgcattaggagatttttggatctccagctgttgttgggaaaggaaaactctgtagtctgtaaatggtggtgtaacatagtcgcaaggcatgcatctgatctgtatcatcatcttccgtaaagactagtgctgccagcatggttagcacttttcagtgtttgggtgtgtgtatgatctgtatcctatgctgttcaggcggaaatgaacttcaggcccagctgtgtcagttgaatgtagttgtgttgcaaataagtttttcttgtttgttatcactgtgattgtgtcttatgcagttatgcttgttgccggatactattcataccacaaccttaaccactcctattttaacaaaaatattttaaatgtttaaaaatgtattatattattgaaatatgttacatgctaaaaattttctttacataatgatatgatctagtagtaccacctaggaataatatgatcttaccatagccatgtaagtacaccaaaccagatttacttccatattgggcattcaaacaacaagtaatttatggtttccagattccggaaacatagctggtagaaataattatttgaccatcccctaagttgcaaacgatctattgtccatacccgattttgtagcgcaagccaactaaatatctgcattttgctagaacccacgccttccaaatcaactctgcggatggcgacgctatcattccgttgaattgaaactgataagcggattttgtgctatacttcccattggctgtccttttctaaaccatagagttctctactacatctgtcaattctaaagattcatgcgttcgagcccctcatacttgaaagaactctctgagttaaggttgtgacatatgtcatttacccaccttcttgttgcaagggctcctggattgtgtggtcttcctcttggtgcttctgtagaggtctggagctaagttttgaggctttgaacactaatccaatttgatttccaaagatcgcttttcactcatcactatccagtactttggtcgatgctgcaaacaaatttcgaaaaattataggtcaggttgacacgagaactgggccagctcttagtcggcacagaagctttttgggccgcagaaatattttcgtgggcctgattcgccgatcaaagcctagcagaaatttggttgggctggtatatatggaccgctacatccaaattcatgtgagccaacatggcccgcaccttccatcaggcccatactggaataaaacccaagtgaaacaatgggcttttctcaaccagccaaactcgggggaggaggctatgtgggctgtaaggtggccggacagtggacgaatcgggctttaatttgtcaaatgtcgttcatgcaaataggctacagcccttacatgcttccacaccaaaaagaaaaaagaaaaaaagagagagaaaatttagagggagagacattcctccaaacaatttttaacaagaaaaattgtaaacgtgttagagattgaatatgagacttcgatattgaaaccacacatctcttgtcaccaggctttactaaatcatttgggatggggttactaccacctcacgatttgatggttaccgtgctaaccgcgcaattactatgaaaaccgcacggttaacgcgatgtataccgtgattttaaaaactaaaaaggttaccgtacgtgacaaccacgataactatacggttttgtaaaccttacatgtcaccgtactatcatgcttccacgctttctgatgttcgaaaggagcaaaaattttcttcattttctaaacaaaggcagaacccatgcttcattttatattggtaaagaagaaatacacacgaacacagaaagcgttcacgccgaaaacacaccatcggaacttcggaagaagcagaaatttcacccctgaattggagtagtactcttattgatcaaacaaacagagaaaatcgaacgtgagaatggattaccggaaatactagcaaaagctgcgacgaaattttcggtgaatgaaagaaatgatgttcttgatcgacccagctgggctgaatgctcaagtagccgaagatcgtcagcgaaatgggtcgacaccattgtgcacttgcctgcaggttccaatgttcagtaggcctccaaaatatctagccttttgatattctgatctctgaataataccatccccgctttctgacgtctattcaccaccatcagaaatttcctttttgaaagatccagattagtataaatcctctccttgtcttgaaagatccggatcagaaaattctcttttcagttcattattccatacctgccgaatctcaaatctgtgcttagattcagcgtaaatttttttaccgtgtaaaatcggatatacggacacacatttaaagtattaaacatagtctaataaaaacaaattaccgattccaccgatagatatttactacgagatgaatttattaagcttaattaatccggcattagcaaatatttaatgtagcaccacattgttaaatcatggagcaattaggcttaaaaaattcatctcgcaaattagtcgtaatctgtgcaattagttattttcttaacgtatatttaatactccatgcaggtattcaaacgttcgatgttacaaggtgaaagtttttgcggtgggatctaaacagggtctaataccgaatgctctttttggttttgttatttcacttaagatagatttttttttactcctatcattttaattttcatatgtataatcttacatcaagattcgttttcatgtagattcaacttacaattagacttaattataaagcacttacactcaattacaatatatcgaaattagattttatgactgttttttctctgaatttacgatttttaacatgtttttttattcattcaaaacgaattttatctattaattaaaaattgaataagatttaaacccctgaatctatcagaagattaatagatagtcccacgttcttttcctttcgaccgagtttagttacaaaatttttcttcaaactttcaacttttccatcacatcgaaatatttctacacacacaaacttctaactttttcgtcatatcatcctaattttaaccaaatttttaatgcggtgacgagttacagcgcattattacaacgccgtaaaaactgacatgtaaaacgggcaattgtggaggttgaaggtactgtggggcagggcagcagcaaaatggcatgtgcgggggccacccgaggcagcagatgccatgtgacccctgtcgcctcctctcctccatcaagctcagccgttccagcagccaaaaatttccatgctttctcacgagctcatcagagagcagctctctctactgatcaagcaaccgattctgatgcacggtaaactcgtttctatccgacggtaatatttcggctgtcaaaatgcaaactgcagctcccatcgatcaatcttcttaagaaattcttcagtttaatttacgcgtaattttatcattcttaacacttagtaagtatatagaagtaatatacaattttctaatgtaaaatttggtatctttaacattaaaatttgaagtgtaaactttagctacctaaagatttcttaagaaattcttacgtttaatttataggtaattttatcatctttggtaagcatataaaggtaatatattatttagcgtaagatttggtatctcaagatactttattagtatcctcaagtatcaaaattctggtgtaaactttatctaccacaagatatgctccaaccgtaaaatttctcttactttacataccgatgatgtttgtgttctgcttctaaactattgtatgatcatatatggaaggagagctggtgaataataattaaaccagttactagctagctaaactgaagacaaaacaaaagggaaaagatcattgcgtgcaggaaggttcggattattctagcagagtgctctttttactctaaagcagcagtagtagttagttaaagacagccttttctttttctccttctagatcgtgagaatgtgatcagatatattcatatacgtagacatcactttgcaaagtgcagtagcttaaagtatgctaattaagcggcagcatggaggcataatttgctcgatcagtgataggctgatagcacgtgatcgatgctagtcgccatgatttctggtgagttgattactccacactaatactgctgctcaatagtggtttgttcaggctgattgtactgagtacgtactctctctgtttaaaacaaaatcaatctagataaaacgtaggaaaatgaattataaggttatctaaatttattgtgtattgttacatccaaacctactcatgtaggttaatttttttagatagagggaatagtctgttcatattgcttgtattagtagactatagtaagtactttcttttgtgtatagagtagggttctatgtcggctgtaagggttgggttttgagcaatcccggctgtacattctttcttgccctaacggtggccagtcacgcttagcgacggccggtccggtgctagccttctccagggtctgtgtgttggtgttgtcggtgcgtgggtggtggtataattttctttgttttcaggttacaactgaacgcgcaaagatgtagcctagaggggggagtgaataggctttcctgaaattcacaaacaaatcgcagcggtaaaattcagcaggaccaaaacttccgggtgtggaataccggaacttccagtctgctcagattgtccggaacttccgagcaaagaaaaacctgaagatctagcagagacttaaactaatttgcatgaattaaactacaggaagacagagcagatacacaatcacagcagcatgcacagaatcatcacagagaagacaaggggaattttttcccgaagttcggatctttcaattctactctccgttgagatgctccaaagagccgggtctcgattaaccccctgcctcacctgtgcaaagaacccagaagaagtccaaggccttaaacaaaacactcctaggtcattttctagaatttgaatgaccaccaagatccaactcacaaatacttctagaaaataccacaagtgcaagttgttctaccaaggagaacctctgaaatctttgcacaagaatctttactcacttacctcgtttccttgcggaggtgaggaaaaccttcaccaactttcccgggacatccacaagattttggaagctcgcgggcaacacctatccgtctaggagaagatcttcaagagtaataagcccaagtgacaacccacaagatatccaaagtactcaaccatacctagtcttcaaaccttctccaaatcactcctacactctcatctattctctcaatctcacaagaatggctttagatttgagtggaggaagcaaagggatcttgggagaggctagaacaacctaggggatgaaagaactgaagtggaatagccaaaaagtgagctgggtgcgatctggatatatataatggctaggtgacgtctagccgttactcacatttttgaactggaagaagtccggaagttcctgaccctcggaacttccggccaacacttaggcaagtttcattcaatgcaatgtcagggaccggaacttctggccagccttctctgtccggtctggacccatttgcaaaaatggctcccaaaaatattctatcactaagaatccactaagagcactttttatatctcagaaccacacttagaacccctcttaatagtacggttttttctaagactcaatttcaaaaattaaactatcctattgaccttcgagcttcaaatccgcataaaagaatgttgtagggggtctccaagcatctcttgatcacctaagatcaccttgggacactggtggagaaaccatctttacttccggttgggaacccccctttaatcccggttttccaaccgggagtaaggatccgggactaaagatgtccatctttagtcccggttgaaataaccgggactaaagatacatctttattccctaaagagagggatctttagtcccggttgatgttaccaaccaggactaaagagacaatagcggcagtgcagatggttcctttttctttttcttttttcatttttattttctcccgaatcaagtaggcaaatccctaaatcaatccccaaatctaactaacatcccaaattcacatcaccaaatccacatcacaatcataaagttacttatacacacaaatcaaatacatcacaatatcctaagaaattactcaaatacatcacacatccaaacaatgaatcacaaatttctaacttctcagtcaaatacatcacagtgaatcatcacaaattaaaaaaaaagaagctgctgccgccgccggtcgccacgaacgacgagcgcggccccgctgcccgccggccaccgcggccgcggccccgccacccgccacggccgccggcgcccgaagccccgccgcccgccgccgcgcgctgcgccgccgccctccgccgggcgccgccgcccgccgtagcgcgcggccccgccgccggccacccaccgcggtcgtcgccctccgccggacgcgaccccgacgggcgccgccccg

SEQ ID NO: 5360 - DNA, 45874 bp, Oryza sativa
tcaaatatgcatcataatatattaaaaacgagccttttttcttcgttttttcaaaagtttcttttcacatacgtatatttatgtgttaggctaagaattttttgggtgatccgcccatgacaatatgtttattggaactgacgaatcgatattaaaatttatgacggtctcacttaaaaacacatataaacatgtcccgatttacatacgcaattgtatctttttccattgcaaacatgccggcatttctactatcacatattacaaatggtttaggagagaatttttagaagatgccattcgatttgctgcaccaccttcaggatgtgccactcaattcgcaacactttcaaaacatgccaccaaggacgtgaattgtttcattccgtgccgctctgtccctcccaagccgtgtgtcgtcatcttgctgccgccagcaagcttttccttgccatgccggcaagagctcctgtagtcggccgcactaagcttcgtcggcgatgtgccatcaaccaccaaggtgtctggacactacttccaccagctccgccatgattactccttcgttgacattgcggactctgccatagaacgacgcccgcttccacggtcttttcctcccgtatcaacacacgggtatttttctagtctttaattatatataagtagtggtgttggcaaataatagaaggagatgcgcctcaacatttgtagaaatgagttgacaattaaggggagcaaagatagataagagagagagagagagagagacgcgatgcatactagcatatgctctccgcgcaaaatctaaaactcatggtaactctgtccatgcattgacatggagggattaggattaggatgcattaggaaacacgcaagaatagtgaaagtgatgacaacccaagctcgtgtatcagtattatctcacagatacataccatgctgtaaaccactccactacataccatggtgagggatcatactatcagataacactcgttactttggcatgctagatcaggatgttcagtagctcccagaagtcagcagcaaaagaggcattatcatgtgtttctatcttctctgcttttctgcttttggaacctctcgaaccaccgtcatggtgtggtttccagaaatgaaccactatcattacatcgccttttggtgaagtgtataaggatgctactctgggctgaacgacttcgagaatagacttgtaatttcagcttggaaggatctcctcttttcctcctttcgttctctaaatctgtaacgatcttgtaatgatcttgtacttctaggcacccttttatcaatgaaatacaggtggggaaactctcccctcctaatgacatattctaaaaaaaatgttagatcaggatactaagtcttccttttaggattatcatagcaaaactaaactatattagctgagttgatatgtatcgtgaggtacggaccattctggatagctatcaaaatgtgccttactaattgatcctctactcaataatgtttggctaaattttggattgaagccaattcttttatcaaatcaatattgatgtcctacgaaattattgataataccaataaatataattggatagtaaagaaccaaaatgaccattttattgaactgaataaactttaaagtcattgaaagtttctccatacctcattgttctagaaatattgcataacataacacctccccgttaacactaataatgcatttacctttcaagacggtagaaacctccaattaattttagaatgaatgggcacattatgggtggttgaatcctaacgccaacgtcattggcccccaacaagtgtaataaatgatatttctattaagctacatcatcacctccattattatttttaacctagcatgattaatctacaactaaatcattttccttctcatttcacattatcacactgtcacgggcttgggccctaagtgggctggccatgaagacccaccaggctggaaggttaacctgctactccctccatccctaaatgtttgacgccgttgaccattttaaatatatttgaccgttcgttgtcagggttatgtatactacatacctaatagtagttgactaaatctcggcaggacgcaccacataccatgtcctatatagaaacaatctgcggatataggaggagttccggataaggaaagacaaccagagttctacatgaaaacgacaaggactactcggattgtatccatattggtttccctagttctacttggacaaggggacacctatgggtataaatacaagcccccctaggaggacagggggacaaccatgatgagacgatcaacacgatcaacacccaccatgacgagacaatcaacacccaacacaatcgacatagaagccacaacatacaagccaacatactccaagacaagacgccggatatcgacttcagggataggcatggctattcccctacggtgtctccggataccgtcaggagagacgaaagcgctatctctgatctcgccgggcacagattcgaggaggaaggctaccctgttgtcgattacgagtcagatcttcagaccgacatgtcgataacagttagataggctaccccacatattgtattggtgtgattatggtgaataaaagcaactccggctccggccaacaggatgtagggttattacctgacagctcaggggcccgaacctgtataaaaatcctcgtctccatctcttttacctcagtcttgtgtatatcctagcaccaacgttccccatactgtccaaataccatagtcgagacatcaaacgtcgacagtggcgcgccaggtagggggattttggtgctctaggatttcaacgagatgggttcaaaagacagattctccgacaacaagctactcgacgacttcgctgtggggagatctaacccgaccagagtatgtctctcgacgagatcggaaccatcgtcgtcaacaactcgatctctcgagatcgaccaaacttcaagacgtcaccgccacagagaacagtgacttgatattatcaactaggaggtctccgatctccatctcttcggaagcgacatcatcaactgatttttggtaacctcggtaatgctgctgcctgctcagaaacccggccatcgaggaaccaaaatcaacatctcgatctattcactggattcttttgggatttggatcgttctcacaccccgattaggatccaaattttggacccctgacgcatactgagaacatccatcccgacatcatgtgttccagggattattgatcacggatgtctaccaaggtatcgagaaaacaacaagacaaagatccaactaatatgcttgctcctgacgtgtacacatgcatatgcatggactcagtacgtgcttaggcatgcatgcattagttggccgacgtgtacctgcaaagaagaccaacatggctgtctaaattgcaacgtgttgattattcagataaatcaacggccgcccgtgatcaggtatttagtagattgattttttaaaaatggtctactaatttcgtagatacatccggcatgtatctacaaaggtacgcaatattttatatgcaatttatcgtacctattcagatgatacagcattgtcagatctataatttattacgtttacctagagcatgttttttatacaatatctattgcgcggatgtttccgacgttaaaccaactacggtctaacgctgggggctcactctgttttcttctgtataaatcatgcttgttcacggtttacataatgcttaatatttgcatctgcttgttgtatcctgataatactagaagatccatgcagttttttgagtacatactcgatattatctgctatatatcttgccttctaaaaaatatttttcaggaacaattgagcactcgagtaggttatggtcgagtacactccattatcgagaacattttcgacaaatgcggagttatcgcacccaacctaccaacaaagaccgacgacctatctcatagcatctgccatggctagactactcgagaaaaggttgttaacggataattcctcgcgaacgtcgtcggcctgatcacccgacatgattgcgaacggacatccggatatgctataagttgggtacgtgagtcatactagccacatgagatacacttgcaataaaccaactctagcacttccattggtgttcgagagataattctgctcgctcactggttctcgcaccagtacgcagcaatctctcacaccgcagcgtccattggtgttcgagagataattccgctcgctcactggttctcgcaccagtacgcagcaatctctcacaccgcagcgtccattggtgttcgagagataattctgctcgcacactggttctcgcaccagtacgtagcaatctctcgcaccgcaacttccattggtgttcgagagataattctgctcgcacactggttctcgcaccagtacctagcaatctctcgcaccgcaacttccattggtgttcgagagataattctgctcgctcactggttctcgcaccagtacatagcaatctctcgcaccgcaactaccattggtgttcgagagataattctgctcgcacactagttctcgcaccagtacgtagcaatctctcgcaccgcagcatccattggtgttcgagagataattccgctcgctcactggttctcgcaccagtacgcagcaatctctcacaccgcaacttccattggtgttcgagagataattctgctcgctcactggttctcgcaccagtacgtagcaatctctcgcaccttaacttcagatggtcaaggtacgactacagcagcgtagcggtcctcgtaccacgactccatgtgatcaagggattcctactcaccggttctcaaccagttgatcgtagtgatctctcgtacatttgcttcaagtggtcgagttacgactactgactggttctcgaccagcggtatagcgtttctcctactatttccacttctagtggtcgagttacgactactgcctggttctcgaccagcggtgtagcgtttctcccactatttccacttctagtggtcgagttacgactattgcctggtcctcgaccagcgatgtagcgtttctcccactatttccactttaggtggtcgagttacgactactgcctggttctcgaccagcgatgtagcgtttctcccactatttccactttaggtggtcgagttacgactactgcctggttctcgaccagcgatgtagcgtttctcccactatttccactttaagtggtcgagttacgactactgcctggttcttgaccagcggtgtagcatttctcccactatttccacttctagtggtcgagttacgactactgcctggtcctcgaccagcgatgtagcgtttctcccactatttccacttgaagttgtcaagttacgactactgctggtcctcgaccagtgatgtagcgtttctcccactacttccactttaagtggtcgagttacgactactgactggtcctcgaccagcgatgtagcgattctcccattacctctacttcaacaaagttggcagcaggtacacaatatcgccaagtgttttacccagagatcccttatcacacgacacctagcgttgaaacctatcgtactgtccctttacgccgtcttgacaaggcctccgaggaacctaagggatcttcggctggggacgcccagagccgataaggccttgtcggatcctgtagagacgaaagaccatgtaagatctggtcgtgtaacagttctcgccctgcgtattaaccaagccgtgtaatcggaaattgagttttccaacttcatggctgggggctaggatcagtgcttattcaaccaaggcaggtcaagggtccaagagccttatcctccgagaatgattctccgacgacaaggctgggggctagggacagtatatgactctacaaactgactgatcgaagtcggtaagagagaagacgctcatacacaaaacattggttggtaaatttaattcattttcaatttaccatacatattataacatgtcaccctttgagcattcgctcgggggctatttctatctaatattcttttctgagtattgatttcaggaaaattctattcgacattatcgaagatcgcatgtctctatggttctacaccaagatcgactaaggcgagtacgacaaatgtcgacaaagttccgtcgcggactctatgccttctcgatcgctcgagaacggttgctagatctcgacaaggaatacggaatgaagagatggtgtacccgccgagataaaatttcttgacttcaatccaaattctcgattacagcaagacgggagacttagtcgtacgctctgtactttctcggtcgacatcagagattgacttagacaaactctttcggtgcccgcacgaggctgacaaaggaagtccaacgttctctctaaactcaccgagaactgtcacatgagctcgataatagttactccaatgtctgcgcagttgagaatatgaattcattcatttgcatcgaagtcgggggctactgtcagggttatgtataccacatacctaatagtagttgactaaatctcggcaggacccaccacataccatgtcctatatggaaacaacctgcggatataggaggagttccggataaggaaagacaaccagagttctacatggaaacgacaaggactactcggattgtatccatattggtttccctagttctacttggacaaggggacacctatgggtataaatacaagcccccctaggaggacagggggacaaccatgatgagacgatcaacacgatcaacacccaccatgacgagacaatcaacacccaacacaatcgacatagaagccacaacatacaagccaacatactccaagacaagacgccggatatcgacttcagggataggcatggctattcccctacggtgtctccggataccgtcaggagagacgaaagcgctatctctgatctcgccgggcacggattcgaggaggaaggctaccctgttgtcgactacgagtcagatcttcagaccgagatgtcgacaacagttagataggctaccccacatattgtattggtgtgattatggtgaataaaagcaactccggctccagccaacaggatgtagggttatgtcacgcccggaatttctatccaaaattccaaacgcttacatgtgtgtgaaccctcgtccagaaatcagccgaggcacacaataacaaattgataatagagtacaattattactctaattaataagcgaataaaatgtcattacagaggtagatagttcatctcaatcaataaagatctaagcagcggaaaaaaaaagataaacggcgcagacgactccactccacaggtagcttgaccagggctacacctaatcctccacaccatcaacatcactgtagaactcttcctctgatgaatgattgcaaggtgagtatatgacatactcagcaagccacgcagcaaatatgcaagtgcacaggataacaaaggatggcacagtggggtttcatttgcataaacagcatttaataaacatttcagaatttaataaaacagttaagtaataattaaacaatattaatccaacactatacaacataccctgttgcataggcccaaccattctgaacaaccatcccggctgcacagttctatctccaaaccaagaatataccgttccaaaccaggagctaatcaaattattaccagttatagcatcttttattatgatgagaagtgtgagactaatcacgaaagacattgttagacccgcccataaccgcgggcacggcttttcgaatagttttactctggccagaggtgtaccactgtactcacaagacacagccccacaacatgtcactatgtgccttaataccaccacggtacctcggaaaggagctatgacagtacccctcgcacaacacgatccaccacagcgcacctttcctggatcataatcaatcaccccttataaacaaggcatggactccccagtgacccccgtgggcttatctccgccacttctcagtctggtgctccgcaatgaaccatgctatacaaaaggtaaagccgttgcccacgctggcttgtggttggcacggttaatgtttcacaaccaaaactcgtgaaccggtccttaattgtcatgagcacgactctcaaaaccatgtgctcacaacccaccattatcaagttttagttggcaagtaattaattaaccaatcacgattgaccatcgtgaactatcattaagccatcattaagtaatagtgaatcataagttatcccaatagtgtgctaatgtttctaagcatggctaagcaatcatatctaatatctagctgaaccaatatataaagctcaactagtcaagttataataacccaaggtatcaaggaataaagtaatcaagaacaaaagggctataacaaacaataggttaattccacccaatgacattcgaaaataaatgcaattgttgaatagaaacaatagctttaaacgggatcaacatgctcaaagggttctttgggatctgtgtgacttgccttgctggccttggaactcttcaaaatcttctcctgcaaaaatggactctccggaaacgtcggaatctaaacagaaaggagcaaaatcaccaaaacagcacataaacaagcatgaacagtacatgtggatatttttaacatgtagatctcaattttagaaaaatttagagacttgaaccaactaaatccgagctaagatgaattagttatgaatttttaaagattaaatcggattaaatcacttatatggattttaattgaattatgacgcaataatgaattattttttaaaaggaaaagggaattattgcgtcagcggctagggttcgcggtgaaccgggtgcacggcggcggctcacgaaaacgaacggctgagatctttccatccaaaacgaacggccgagatcgaccggtccacagccggaccacggaagacgacgacgatgacgtcagcggtgacatcaccaccggcggcggctcgggtgcgcaaactcgtcggcgaacgacggcgcgacgacgcgaacggaggacaccaacacgtagagggcgacgcggcgaactcaccggtgaccaaaacaatggcggaagatcaacggacggcgacggcgtcgaggaagaagcggcggcaaccttcggcttgacgacgacggcggagaggtggacgagatcggcgacggcttggtgaccacgacggcgacctccccgagcagcgacgacgaccggagcgacggcggcgcacggctggagctgcggcggcgacagcggcgctaggctacacgatgctagggctctaccggcgacgagaggcgaatgcgagggtggcggcgggtagcggcgggcttgggggtccttttataggagcaaggaggcggcggcgaaggcccacggcgaccggcgacatgaaggaaagtctagggttcggaggagagagatcgatccgaatcgaactcgaatccacgatttccaaacgattttagccgacgattccaaaagagaaaggtagaggagatcccgaagatcatttcccctctattgatttcaccggagaaggaaaggcgtgagcgaatttggaaggagacggcggcgcggctcagctagggttccggccgggcgacgacgcgaggaggacgacgagtccgacaggtgggccccacctgtcagcgggcggacgcgcgcgcgcgagcgggcggctcgactgcgggccggattgggccaggagagagagaaaaggttttgggccgactttcggcccaaagccaaaagaggatttttaaaaccttttacaatttaaattattcattaaatgtaattccatttattaaaaatacttccttagctcaaataaatctcagaaaaatctaggaattatagagttaagcaaagtatttaatgaaattttatctggccccattttatattggaatttattaattaaaattagatcttctcttctaggctttttaaaataaattccaattaaacaacaatttatatatttaggatttttagggtgtgacaggttattacctgacagctcaggggcccgaacctatataaaaatcctcgtctccatctcttttacttcagtctcgtgtatatcctagcaccaacgatccccatactgttcaaataccgtagttgagacatcaaacgtcgacattcgtcttattcaaaaaatttaagtaattattaattctttttctataatttgattcattgttaaatatacttttatgtatacatatagttttacatatttcataaaagtttttgaataagacgaatggtcaaacatgttttaaaaagtcaacggcgtcaaacatttggacaataagggagtataaacgaacagggagacatggcaaaaggcatcgatgaactgaaccaaggaacgagcctctccttctccctggatgcttcctcttcccaaaatccttttctctgaatcccaacctagctatttttccctgtctaattcttctcccagtctacgaacctgtatctcccttcaccacttggtatcttgtgcgatgaatgaaggattaaccctgagttatgctccaacatatcatagaaattaacccgctgattgagaggagcgaagatatcctgttctaataaatgaaattgacgctggttgatttgttaaaaaaacaaaaatacagaggagggaagagagctaattaaagatagggttaattggatccatgccactacaaatataccaaattagaaaaatgtcactacatttcacgatatcagctgagtgccactcgaatttggggaaattggaaccgtgccactccgttgggttttccatccactccctgttaatttcccaactccgacactcggcctcgatgcggcggcgaaggagctcggcgacggtgccatttcccaactccaatggcgagaagagttttggcaatggcggagttcctgcccctctttctcctcatgaactcgtcgtacttcctctttgcttcctcttcttggttccgtccacgtaggtgctgtggaagctgtgcccgcatgccgggagcacgccgccgtccgccagctctgacaggcagatggcacactccacctcggcccacccgccgaccatcgggactccgaacgccgcgccgaccgccctgacctatcggtgttggcgtcgtcgtcggacgccggcctaggtggctgtggttgcgcccactccccggagtcgcgccaacgggcgaggcagcggatgaggcaccgcgcggcggcgtggaggtagaaggcgaggagggagacgcgggcgaagatgatgaggatggtggccacgttggagaagaatgcacgcatcgacagtgaagtgtgaggtgaggaaccacgaggacgacatattgttaacgaccaaatttggtaatatcagcatcggaagaggagactagatcgaggtggagtcgaaggcggagattgattcgagaacagagcaagaatcgactgaagtccatatcggctacgattaggatcggatgggtctaagtcggactaggtaagccgatgcagccgattccgacagtataatttggtgtatgacatcgggttgaattgaggtgcttcaagatgattgccgcacatggatagagtcctgagaaggcaattgtatctattaattaggatgttttatgtaacttccttagagatatgtttgggcaaaagtctaccgcaaagacttatggtatcttagagtgtgttagagatagtggtcgtgtccggtatggacatatcttgtaattcttgggtataaatagaccccgagccctatgtaatttttaacacacacgttcaatacaatttcggcgcatcgccacctttttgctttagttttgttttcgacgagttcttactttcgggttgagctgcatcggttttgatcttcaacaagaggtaaaacttgttatgacgacttgtgttctcgagattagtgcttccatctttatgacactctaatcttgcctatataattcgtcgagttattatatatcttacattagctttggcaatatcgtcatctaacctacaatcggctgacatctgttaatagaaggcagccgattaggttaaatagcgatgttgtcctagattatataaaatatctaccactttatgaaacatccagcgtcttgattgtctagatattgttcttcttttcatacttaatgttgcatcagttgagtttgatctattaagtcgtgcttagaatatcaatctctagcatgtcctctggttgccgattagggtagtatcggagtttcagccgatcttatctgatttaaccatattcgatctatgtgcctaagtgacatgttaaatccgccctttatgtcaagatcttactgcatttaagtatattaagcttttgtttggtatattatacttgttttgatatctttatgtagagtagtatcggagtattagccgatacatgctagatctatctgatcggctatgctataaacatatataatcatgttattaatatatatttcgatctaagtgatttatactgtctcggcatggtgaccgatctatcccaatcacttgatttaagtatatattaatataagaactatatatcgttaatatctacagccgatcgaatagatttagttccttactgtctatttataaccgccgatcgattcatatatgacatcggctcaaagataaatgatatgtcatcggcacctagccgatcggctattatttatagatttaaccacgaattctttgtctctatttcttgttgattacaggatcaaatcaactggcacgctcatacattcgaaggtgagctttggacctgcactggagttaagcagatctcccaggcctcgtgttttctgtcaacacatatggaggtcttgacgacacgggagacgacgaccgcgcccctatggtagaaatctacggcagagacgagctccccaggtagcaacacccttccctgccgctgatcatctccgtcgagtggagcagcggtggcggcagcagcggcgacgtccatgcacgggaaagagaaggcgtcgacgaagttggcactgtggacagggagtggatggaaaacgcgaaggagtggcatggatctaatttcccaaaattccagtggcacccagccgatatcgcgaatagtggtggcatttttctaatttggtatatttgtagtggcatgaatccaattagggatacatatacacacatgtgtgcacaacttcacctcagattttacaagcctcataaaacccaaaccttatggcaactttggccatgtaaattgttggattgggatgcactaggaaaatacaacaatgctgaggtgatctcctacctcgtcgtctcatagtcagggttagaaattttggaccaaaatttcggaaattttggtcatttcggtgacccccgatatgatattaattcggctgaaatttttgaatttttcaattttttcatgaatttggataatatttgttcaaattcaactaaattttgtttaaaattttagaaattttgaaccgaaatttctgaaatttcaggatttcggtgaccccaatagaaacccctaaaccgatagagtgaaccctgctcgtagttaggctagcaccttgttttcggccggtgacaaacaagaaagtatcatccacggacaattggcgtgagactacagctgtgttccgacttccggcacgtcggaattacaatcgaaaagctctccacacaatcaacaattgcactcttttttttttagaactcatgattttatttaaggctaatagcacgttatatgatgagttgatacaacttccatagagtaagaggagagcaagcccaaaaaagagaagctgacaagtatgcccacaagcatacgggctggtaaacatacagcacatattgcaaaagaactcctaaaagatagaaaaatgcaaaagggcctagaaaaaagcaaaggacttctaaagataaggaaaaaaaaaagcgatctggtccttgcgctgcttcttcctctaatctggtgaccaggacaacgaaaccgacatcaacaacgacggcgaaagcaagggagactgtaaaatagagctccaagccgtaaaaccatacggggctttcaccacacaaggcggaagttgacgcacgacaaaaagaataggaagaatacagtcgcacattgaagaacgtcgacagcaatgaaatggctcaccacattagtagcaactttgccggagttggttagaatggctggcatcaccttcaacagaaacaccaacctgcttgccggagaagcagacttattgcccttcaagcagcgaacaacgtgagagcaaacctggaagccacccaaaagcaggcaacaactaaggagatcttcagcagcaccttccatagaggaccaccggaacaagggagctcgacgccggtgaatcccttgcactacacacaaaaggaaaacggaatgaaccctacacggaatatatccgaccatcctatcgcctaagggtaaggaggccaacccctctccctaccctcatcagcggcgaaccaccggatcggaggaggaggaaaaggggtcaagaagaaagaggaaaaactctcaatggatctcagagtatcgcgagagggatagagaaagtcccgccccagctgatggcttcttctactgctctactacaagtgaactcgtatatcgtatcccatgtcatggatggagccctatcccagtcatggatggagaaccaaggagatataattagaacaggtagcagctaatcataggagaagtcatttggtcctccggcgtaatcttctactccttacattccaaaatataataacatagaactggatgtctcatctaataccaaattattatattttagattggagatagtaggaaatatcaacaaatatgctggttgtgtttgagattgattaaaaagaagatgaagtcacagcaagcaaaacgagaaagacattagcatatgattaattgagttttaattattacaaactaaaaaatagatttatttgatattatatatatataaacaccgtttattagttttaaaatcatgctaacaacaaccgagaataaatctatttctgagcggttacgtgtttgtaacttgaaagactaagctcggaatatgaatcgttatcattgttaacaatgatagagaaagactacacaacggtataccgttgaacagtataccacttatccctcatgccgcggccccgcgtgccggcttctcccgagtatgtcgtgtgctgctagaattatcatcacgcaggtttgttgtgtgtatcagtgtatagtcttgttcctgacagctagctagtacccagcatgcctaagtcatgcctttgatactagcctagctagtaaataaaactggaggtactactagcttgttgtgcatgccaaatccctgtaatagctacctacgttacctagatacggggatacggatatggatacacgatacgtcgatacgggatacggcattttccaaaaaaacaaggatacggggatacgcttttatatatatatatatatatatatatatatatatatatatatatatatatatatatatatatagtaaatttgtttggtgctccatggtgcccgggcaccattgttgaaattgagtatatacccaattcaaatgagtatgaaacttttttaattatttaggtattaacattaactacttttactaactagttcaaagcaagtttgaactgaatttgaacttatttttgttagattttgattctaggtatatagcatccatacatataattagttaggtatgtaatcatggattgtgaaataaagttaaatttgagttgttttgttgataggtataggtacgaatcaaattcttataactaggtatatactcacaattagaaaattttgaaaaatttgagtgattttgtgcatttgaaaccatggtgcccgggcaccatggtgccccatatgagtgtcctatatatatatatatatatatatatatatatatatatatatatatatatatatatatatatatatatatatatatatatatatatatacacaaaaaaaattaaggaaattgcatttatatataaaaaaaatacaaaaaatcaaggaacttttataaagaaatagcgatataatactagtatcagtgtagcagattccatatcaatattctgcaattttctcttctataagcaattcaaattaacaagcgattaagatcccaaaaaccacatattaatagttcaatcatatatttcttgatgactttgcatcaacattagaagccgcactaagcagtaacctctaggattgctagatgcactagcacttgtatctaataaaaacgatagtactttgtcctaaggaaaacaagaaaggcacagcagattcaagcatgaaacttttgaagataatggattacccggccaggcagtcaagcgaagaaagaaaaagttgctccgtgcttcgatgctactagcctgccactggccaccgctatgcccggcggccggcgtcggaggaagtgcctcacgcagtcacgcggcaagccggcaacagttctggcctcgaggttggcggcaaaagaggtgcgccaccaccaggctggcggcggcggctctgccgtctcgcgtaggggacgttgtggccccgcgcacggcagcgacgcgcgcggctgcagccggcgtccggcggcaacgccgggcacgcacgagaggcatcagccatcaggttggaagctcgtgaggtggcgcatccctgatgcgagcgaagacggaggaaggtcgtggcgtatcgctggcgtatcgtgatttatttatttttttggaaatcgcaaatatgtgggatacgtacgggatacgtatcggagcgtatccgatacgtatccgtatccgttgccgtatccgatacggatacgtgactatgcagccgtatcagggtaacccagatagctactagtagacctgtaccctagctatgtagggtacttattatggcggagcctagtagcctagctacgtgtctaagatgagttgcatctatttgttgtgtcctataccatgcacggattagaccagacaaataattacctagattatacatggatacaatggattattctaattagatatgtcatgttgggctcttagttataccacatcttagaaactctagtatgtgatacatagatgctagattatcatatctgatatctaggtattgggtcgaatacctaggtaccaggtatgaaacctataaatacaagatctgatgctgagttatccggcctgatacctataagtaccggatccgataactaggtatcgcgtctgatacctgagtactagattggatacccgggtatcgggtatctgatctcatacctatgagtatttgttccaatatctatgtgtaacgggtcggatacccaggtaccgagtatgatacttatgaataccaagtctgatacctaagtatcgggtctgatacctatgagtaccggattcgatacctaggtcaggtttgatacttatgagtatcggatccggtatcgcgcatgatacctatgagtatcggatcggatacccgggtatcgggcatctgatcttatacctatgagtatcagttccgatacctgtacgtactgggtcggatacccaggtaccgagtataatacttatgaataccaagtctgatacctaagtatcgggtctgatacctatgagtaccggattcgatacctaggtcaggtttgatacttatgagtatcggatccggtatcgcgcatgatacctatgagtatcagatcggatacccgggtatcgggtatatgatcttatacctatgagtatcagttccgatacctgtacgtactgggtcggatacccaggtaccgagtatgatacctatgaataccaagtctaatacctaggtattgggtctgatacctataagtaccggattcgatacctaggtcgggtttgatacctatgagtaacggatctaatacctagataccgggttgatacatattagtagaggatctgatactaaatatagggtgtgatggtacgagacttcagatgtgataccactaattctaatatttatgggttatatacttctattcaacaatcaaataaaaagatggaccatgcatagctaggccagaaagtacaaccaaacttgctcacatgccgctgacatgctttgtttaggctcatgctactagctctagtgcttaattctaactttactagttgaaccaggtgtcagacccatatggacctaaagaggtgtagaagtagtgctgtattagagtatttcatagctattttgtactgtaggagaaaagagacctctcgtcagtcatcactagtcggcagcctccatgtgaaaggacagcacacgacacgcttttagagagaaaaagaatcggtgagtgattggtaagtataaattataaactataccgttgagacagtacaccgtcccatagtttaatttggaatcaaaccggcccactaacatacgagaaagactggtacattggcccgcaaatatatgggccttttatctgttcatctaggcctacccaatctcggagtttttcacaaaaacccctgatattaactctagcaacatataggtcctgatcttttctaagaagccccccttttcagtccagatatttgcataaatatcccttattttaaccgttaacatcctcagcggtcaggattatagcataaaagcccttgatactgctctagagtcccccccccccccccacgacgccttcagcgacggcgtgcccatccgactccgacgacgttcttccgcctcgccgccgatgatccccgccggccagccatgtgtcctaccctacccacccaccagcagccgattgcacctgccactgccgtttcttccctcaactgtagagtggtcagcggagatggccggcagacggcaggggggcaaccttgcctggggaccgcgcctcgcgccgtgcttggagacgacggtcacgtggttggtcgccgtgatgaagcggcttctcgacttcaacccctgcgccccactggagtcccagcagtacacggggcaaggccccggtacattgttcacccctcgcacatgacttgtttgttgaattgcctgagtggaaatcttacgcttacctgacctgcgctatgtgtttctttgatgattgagttggtacatgtgttctcctatttcatcatactttgtttcaaacttatactccatcccattttgcaaatgagatatgatgatgacatgatgtacagatgaaagaacgagctataagctggactgctagagagctggatggagaaggtcaaagcgcacaacaaggaggagctcttgcgcaagcagagctctttgctgggcactgatggtaaaccggaacaaagtattctcgaggcaactatttgaactcattggaaaatttgtcaaccgtttttctcttgacaaacttcggccaacgaacgcatcgccagcccagcaaaaagaatgaactgtcaagcattctaaaatctaaagccaacactacctattgctttatatcttagggctggtttagttcccaactttttcttcaaactttcaacttttccatcacatcaaaacttttctacacacacaaacttccaactttttcgtcacatcattccaatttcaatcaaacctccaattttgacgtaaactaaacacatccttaatatggtggtagagatgctacagtcagtagggtatgaaagatttgattggaatgaaaggtttcttgaaaggttaaatgttagtcttctgtttttgcgtgcaaggtatacttaggatttcagcttattgaagaaccaaaacttcatcatgaaagcaatatttttttagctttgtaaatcctaattgtagcaacagaaaaatgcactctatacgagagtatagaagatatttgcttcaaaacaatcttgatcacatatgaattcattttatcttttaaagtcactgattccttagcttagtagcccgttcatacccaggctaagatttaaagtggattttagtgcagaacatactaacataagacagccccactgactatttgcatagatacacattgttgatgtgttcctgcgtatttctgcctactgcaatcctttgtttttctcaccgggccggcctacttccatctccacttgggcatgttcttttacattgctgatttatcactttatttttgtactttgattatagtgaacttcatgattgctggcgtacttttaccatcatgttctcccatacaacttagactgcgcagggtgcaatgctacgattgattttcttttttaccttttgaatttaattgtacaatgaattggatgaatgcccaaaaagcaattggaagttttctgcagccagtcttagttttagcacgattagatgtgagctcatgaaaatttcgtcttttgtgatctcaactgctcaaggttcttttgctgccttttctttggactcaactttgactaagttctttgagctactgatgggcattgatgtttttcttggtgcaggatacttgataatgtaacctaaaaaagcaggatggacaatgaaactgaaagaagcaaagttgtgatgatgagatgagttaaactactggctgataacaaagttgcagtaatttctatgatccccctcatgctcctactctgtctttatatctctttatttgttttttttttcctttgcaactgtgcccttgctttggaacaaaactttgataaccatttaacacaatcgtcaaagcagaaggaaagcttatttgcaattcccttttggaactaatgacatctgtttaagtaacaacgaccaacctcaaaacttctgctgcaacattgtgtactttgttgctagactggatgaacatctagctgatgttctgttttagcattgctttacttgagacttgagagagcctgctaccagtttcacttaaccattcgtgtttatcttcccaggatttaatatgctggaattaggaagtctgaacaacattttgtggaggctactttattaaactgcggtgctgctctgtccaaacttgcgctaactgcgggagagaaggggggctagcgtgaaaagaagaggtaaagaaagagaaaggcaaaggcgcgacatgatgcctcgtccaagctttttgttgtcacgctgccaaagaggacaaggatttggccctgcttctcttcttcttcctcctcttcttgcggtaagatcactactactattaccatcaccatcaccgcatcatttgccaaaccatggaccagcttgcctttttccaggttgcagctgcctgacgcagtttagccagccactgtaaagtgcaggtccatttatctgacaaatagagtatgtgagcttaataattgtacagttttttcaaggtcaattttaggggagtaaaacacaattagttttggaggggaaatagcttttgacattgctgtgagatgaggggttggtttggtctgtggcctaaataggtattaccaaattttgtcaatgccaaattttggcaagttttggcatgactaattttggtaagtcaaaattgtgtttggattgaagccaaaatagcctaagttcactattgaaatggcatattttcttaagcatgccaaaatttggattcaaaccaaatagacactaaacactgttgaaattgacaaatattggtaagtctaatttattcctcaaaccaaaccagcccgagatggtttgtgtaggtgaactggtgaacagtttggcctgcatctgcattggtaggggcctaggagcagacaagaacagagcaaaagtgaaaagtggaagcatccagtactgtcaatctgacactggcgccacagctctcgcgaccactcctcatctcacacttaccgaagcaacaataaaaccgttctatcctcgcttcaaaaatcgatcaaaaaattcaaaaatcaaaagtgaaagaaaggaaagcacacgatgcttctcttcacccaatgcagatcgatgggggtcgtaccagtagcagagatcatggctgtgagcctgtgattgagtgatccctttcctccatgccaatcttgaatctttctagctaaaagaatcatctgtgctcttgtgctcgcagctagctgcacagtggtgacaatggcgatgctgctgttgttgcgttctttggagttcttggcgatcatggcggttgcatcgagcttggcaatgccggtggcggcggcggcggcggtgccacagccggagccggaggtgaagccgagcgacaccgacgcgctcaccatcttccggaacggcgccgacgcgcacggcatcctggcggcgaactggagcacctcgaacgcctgcgccggcgggtggatcggcgtcggctgctccggcgacggccgccgcgtgacgtcgctgtcgctgccgtcgctcgacctgcgtgggccgctcgacccgctctcccacctcggcgagctccgggcgctcgacctccgcgggaaccgcctcaacggcacgctcgacacgctcctcctcggcgtccccaacctcaagctgctctacctctcccacaacgacatctccggcgccatcccggacgccatcgcgcggctcctccgcctcctccgcctcgacctcgccgacaacagcctgcgcggggccatcccggtggccgcgctcgccaacctcaccggcctcctcacgctcaagctccaggacaacctcctcaccggcttgctcccggacgtcaccgccgccctcccgcgcctcgccgagttcaacgcctccaacaaccagctctccggcagggtgcccgacgccatgcgcgccaagttcggcctcgcctcgttcgccggcaatgccggcctctgcgggctggcgccgccgctgccggcgtgctctttcatgccgcgcgagccagccccgacgtcaccctccgtcccgtcgtcgccgcagtccgtggtgccatcgaacccggcggcgtcgtcgtcgtcggttgcttcgtcctcgccggcgttggccacaccggagtcgcgcgacggacccggcaagggggggttgagcaccggcgccattgccggcatcgtcgtcggcaatgctctcttcctgttcgccatgctgtcgctgctcgtggcgtcctgctgctgcagcaccggcggcgagagcggcggcgagccacccaagaagaggaaacgaggcggccgcgtcggcctggaggatgacgacgacggcgggatgttcggccaaggcaagggcgtgcagccaggccggccaggcagcgccggcatgcgcagcgacgacggcggagacagcgacggcgcgcgcagcaagctggtgttcttcggggtggacggcggcgaggacgacgacgacgacgacggaggcggcagcgacagcagcgccggcaggagggcaaccggcggcggctggacggcggcgccgcaccagcctcacgggaggaggagcaggttcgcgctggaggagcttctccgcgcgtcggcggagatggtcggccgcggcagcctgggcaccgtgtaccgcgccgtcctcagcgacggccgcatggtcgccgtcaagcggctgcgcgacgccaacccatgcgcccgcgacgagttccaccgctacatggacctcatcggccgcctccgccacccaaacctcgtccccctccgagccttctactacgccaagcaggagaagctcctcatctacgactacctccccaatggcaacctccatgaccgcctccacggtacacatccatgtctgatgtctcctcctcctagctgtgaatcgccatgagagtggcacgatgagctcgatctcgccattgattgtgtttgtcagggcaccggatgtcgggggagtcgccgttggactggacgacgagggtgaggcttctcctcggcgcggcgcgcgggctggcatgcgtccaccgggagtaccgcacgtcggcgatcccccacggcaacgtcaagtccaccaacgtcctgctcgacaagaacggcgtcgcctgcgtcgccgacttcggcctggcgctcctcctcagcccggcgcacgccattgcccgcctcggaggctacatcgcgccggagcaggaggacaacaagcggctgtcgcaggaggccgacgtgtacagcttcggcgtgctcgtcctcgaggcgctcaccgggaaggtgccggcgcagtacccgcagccgtcgccggtcgtcgccgccgacgccgccgcagacgcgcagaggaaagacaagaggtgctcgacggcggtgagcctgccggagtgggtgcgatcggtggtgcgggaggagtggacggcggaggtgttcgacgtggagctgctccggtacaaggacatcgaggaggagatggtggcgatgctgcacgtcgcgctggcgtgcgtcacgccgcagccggagcagaggccatccatggccgacgtggtgcggatgatcgagagcatcccggtggatcagtcgccgttcccggaggaggacagggacatctccaccatgtcgccgtcgatcggcattaccactgacgacggagatggtcgtctcagctgctagctcatcatcatcctcctcctcattgatcttcttttctgaattctgaacaactctgcctgctgcattttttctgatttctgaaatgatgctctgctcgatcttggcattctgaagtctgaaattgctactgcagctggtattatcttgagctgcttttcacttctgctgaaatgtcgaattgtcgatgtgcctgtgcttggaagatggtgcttgtgttcttgtaagataattttggattatgatgtcgaatgcatgctcctggagaacgctggcagttgctgctatactctgtttgcgtttgtcatactcctctatttttaactttgacacagtcttcgagatactagtttgatcaataatatctatataaaagtaaaatattttaaataaaaagtaaaatgttttaaataaaaagagttgtatattgttatagtttatttaatgataaattaccatcaattacattattgatttttttattttttttgctattaatagtcacaattataaatatttgacttgatatatgctaaaaatacttacttatttttggatgaaggaagtagtcggtatggttgtttctttgtttctattagcgaatgtcgttttgtgacatactaaaatgctataaaaatgagaatatgggcaatcttctactactatcacatcatcattttgttctttttttttctttgaagcggattgcgtatgttgtacaacattttggggtgtgaagttcatggcatgctcacgccagacgatgactgtagactatagtactatttcggttgaaaattagcatttgcattattattctattagttagcctgtgttcttcttgaggaggttgggaaccatccctctacacgcaaagtggtgtgatagagtaacgcatgattaaaaagaattaatatgatttttaaagcaattttgttataattgtttttacaaaacatactattaacacgaaacggaaggggtgagttgagaacataagacagatgctttccgaaagaacgattgagctaccctgattaatcaataccagtagcaaaaatgaccagcaatcctgcctcataaaacaatgacatataggtttgctaatgccaactgctaagccaaatacaaattcgtatctgttctagaagactaaaagtagtctattggaaacagaacaatccggtcaaacagaagcatcttgtatgaaaatggtagtccaggacgaaaaagaaaaaaaatgagccgacaactacgttgacatcgttaggtaaacgtaaacaaaattccttacgaaaaaaaaaaaacaaaaacacatgtagacactgtagagaccgatcagtggtccccacgagaccacgaagaccatgtccattggaagcgtagaagaaaagcggaaagagtttgaccgatgcatcggaacacggcccgccacgctggcaccagacggttttgatgggccggaccagtctcggcggctcggcccaccaccacccatccatccatccatccatcgcggcgcatcgtacggtccagagctaacccagcggcgggtccaaacccgcgtgcggcgcggcgcgtcaccatccaccgtttattcgcagctcgttttatcactacttaaccctttcttcgagatttcccttttcttggaggcgccacgtttaaagggcggagtcgctgtaattagagaagaggatttaaagagagagaaggccattctctcttgattgcttggagaggaagaagaacaagagccgccaccgccgccgttaggtttttatttattttttttctcgatctgatccgaggaggagcgaagcgaagaagggcaagatgcattcgacgaatctgctgctggaggagcccatcaggatggcatccatcctggagccatccaagcccgtaagttgctcgaatgctttgatttcgcttcagatttgtttggtttttttttgttgatgaaccctaaattcgattgatctgcggggaaaaaaatgcacagagcttcttcccggcgatgaccaagatcgtggggacgctggggccaaagtcgcgctccgtcgacaccatctcctcctgcctcaaggccggcatgtcgggtaaccaatctgcttgcttcgccatctcctgctcgatcgagctgttcttaaccttcttgtgttggtgttggtgttgtgtggtgcgaattgcagtggcccgatttgatttctcgtggggagacgccgagtaccaccaggaaacccttgagaacctcaaggtcgccatcaagtccaccaagaagctctgcgcggtgagcccccctcctcaccgccttcagatttactgcaattcgattcgatttgattcattcacggtcatggtctcttagtgtttgcttttgctgtttttgcatactgacattttgggtactctactccattggcattggcaggtcatgcttgacacggtcggcccagagttgcaggtggtgaacaagagcgaagcctccatctccctcgaggagaacggcactgttattctcacccctgaccaggggcaggaggcctcctcacaagtgctgccaattaacttcgctgggcttgctaaggtaatactccctttcagttcttttttttttccgaaatcttattacgctgtgcatgaatggttgcaagcgcataggtaggagtacctttcagtgctatttatgcaaaatcttattatgctgtgtatgaatggttgcaaatagataggtccttcttttatggaacttgctattttgtcactgcgatttccagcatatgctctgtttgatatataaaaaatgacttattgttttgtttgcaggctgtgaagccaggtgacacaatatttgttgggcaatacttgttcacaggcagtgagactacttcagtttggttagaggtaaaaatattcggcatactgcgcttagcgttctgcatttttttttcttatgtcattgtcagtaggatttgctttgtgcccacattttccgataccaaaactctaatttgtctggtttaggtttctcaaattaaaggagatgatgtggtctgtgtgataaaaaacacagcaactctggctgggtcgctcttcacattgcattgctcgcagattcacatcgacttacctaccctatctgatgaggacaaggaggtaaggaactcatttcagaatagtgatatgtatctccttatgtatttgtatttgatgtcttcctttatggaattaagtaaaatgttgtatatttttccttttggagcaccttactcaaaatctgtcctttatggaattaagtaaaatgttatatatttttccttttggagcaccttactcaaaatctgtccgatgccttaaatgcttatgagcatgtactgctttcaggttatcagaaaatggggtgccccaaacaagattgacttcctctctctttcttatacaagacatgtagaagatgtgcgacaggtaatacatttttttctcaacgttcccggtgttttgtccttggaagtaaccattcattgaaaacatggcattgctatatccaaatatgtgatctcctgtatgttttcatttggtacttgaaaaggaagttctaaacagtgctgacatctttcgtttcaatacaggcacgtgaattcctctcaaagttaggtgaccttagccagacccagatttttgcaaaaatcgagaatgtggaggtatttacaacatgcacttttaacatctctgagccagcttctgtttgttgtacagcctatcaaccccctatctatttttgcaggggttgaataattttgatgaaatcctccaagaagctgatggtatcatcctgtcaagaggaaaccttggaattgatcttccacctgaaaaggttagtatttctagcttacgtcgagcacatcagaaggcactgcttaattgtacatccgctacacttagtaccttattaacaagaattgtagttttctcaaattatggtgcaatacttgtctttggtttagttatactttatttattttgctctttgacctttgctgctcatactgtaggtgtttttatttcaaaagtctgctctgcacaagtgcaacatggctggaaagcctgctgttgttactcgtgttgtagacagtatgactgacaacctcaggcctactcgtgcagaggctacggatgtggcaaatgcagtgcttgacggtgagttgtttgagctattggtaatgttaaattttcaattgccttctgatagtttaacatacttctattgtttagggagtgatgccattctccttggtgctgagactctgcgtggtttatacccagttgagactatttcaatagtgggtaaaatttgtgctgaggtgaattttcttcctaaatatgtttttatttacaatgtttaacatgtataaggcaaaatcatttctgcccaattttcgttctgtattagtttgttagcatcatcaagttaatggcatatgacatccattgttttgcaggctgagaaggtcttcaaccaagatttatacttcaagagaactgtgaaacatgtgggggagcccatgacccacttggagtctattgcttcctctgcggtgtgttctttggttcttttcatgtttcagacttcatttaatgctgttcacacggaacacattttctcatattccattgatttaagtctatgaggcaagcattttctttttagtctgaactggttccttcactattttctaggtgcgagctgctattaaagtgaaggcgtctgtcataatttgcttcacatcatctggacgtgctgcaaggtagaaagactgaatataagataagtttgtatcttaatggaaaactaatatcatctctaatctggcatctgtactatctgcaggctaattgccaagtataggccaaccatgcctgttctatctgttgtcattcctcgtctaaaaacaaatcaactgaggtggagtttcactggcgcatttgaagtacgtgatcagcctttctttttctactatgtccatgatctgtttctaactttctatacagatgtttagcttgtcttgtttggttaacgcttagctgttgtagctcatatttcttgtatccttgttctgcaggcaagacaatcgctcatagttagaggcctctttccgatgcttgctgatccgaggcatccagtaagtttggcttctttgttgactacagaaattgcaaaaatattcatgcaaaacatacttggtggatttattttcttgcaattgaaaggcttggccttgtcatgggggctttttcagatttctaatacattacaatataacaaagcttagtagatagaagcgtcaaattttaacatgatagctttcttgcttgcatcatgttccacaattattaacacttcatatatgataaacgtaaaaacaactggtatgcttcctgcattgttaactgaaatattcttgaacttgataagctgatttgtagagaccatttaggcgcaataagccagcttattaagtgctattattctcgggtgcaaattttgtaatcatctttcacttcgtctttcaggctgaatcaaccaacgctacaaatgaatccgttttgaaggttgctcttgaccacggtaaagtttctggtgtgataaagtcgcatgatcgcgttgttgtctgccagaaggtgggagattcctcggttgtgaagatcattgagctggacgattagacaagcagcttgtgctcgtcgtcgatgatactatggcatgttttgccagattttgactaggccaaaaacgttgcttcttggctatgtataatcctatagcttcaaatgagcagtttttcctatggtgtattcataggatttgccttacagcttgaaaccattatgatttagttaaggaaattaaatttgcgcagtatttctgtatcgtatcacttagatgggcaaagggaataatgaattttggtactgaaaccttttaaaggtcgatgcgacctatttttcatggatttttcgtaatgctacttgacgtccatcaaagtgttcatctgagtctgacaagggacaatcgatggttgatcccacggtcacccaccatgtacgaaactcgagcatttcaaggaatatgcagtagtattgtctcaaaagcacatgatcacttgcttgatcctttacacatttcataccaataaaaaaattgccttgtaatgccaactctcgagtacaatcctgccatggttccgcagatcaaattggaaagagcaggcagctagtcaatacaagtaaatttcatgctccacagccattacagaaaaaaatcacggaaaacagctgacatgattgtaattagctcctacaacttcatctctctcctataccaacttttgaagtttccaatctacaagtcgcgggttttacacttgaatgtgctgtcctgtactgcagtctaaacagtgatttacacggtgaaagttaaatgaaaattattttggctcactatactcgtgccgttgccgtttgccaaagcactacggaaaaaaaatggttaaaagtattacttgtacaaaagaatgatcatcgacaaatactactaattacaatggattgaccatccagaaacaattgtgcaggagaacctgatgatacccagtatcttctgaagcttctatcagaagaggtcacaactttcctctttaggacatccttagatattgacaggtaacttaaaaaggaagacaattgttgattgaatcacttatttaagtgacacgaatggctgaactggggagggtcagaagatatccggttagtccacagattagcaactttaacaaaatagtgatcaccatcccaaatgatcacttccattcctacatgaagcgaacagagtaaattaattggttgatagaaacatctgatagctaaaaagttcctatccttgaagacgtcactgtaggacaagtattacctggtaaaacactagtcggcaggagggtatgcctacatgtcatcttgctgttgggaagggaacattggagagtggccacttcaatttcgtcaattttaatgatagattcgagaagaactttagcaacaggtgcatctaagttattgctgtcaacaaccattctaagagccgttcctagaccattattagtccatgcattcaggcagccgtcccaacaaaccaacattttactcaccattccaggatcagcaagaacccagggcttgaaggactgcaaggataaatttagaatctgtgcaactctgtaaatctccccaagagcaataaagaattggccacctgtgaaaccagcagaaagcatgttatagtcaatcttcttttaaatgatcagtgagaaaggaaatgataagctctgctcattgttccaagtttttgcaccttgggaaattactacgctgcagacatttgattgacaggattcttgccaaagcaccacaccatgctgcaattcttgagcacagaacagaagcattctgtaccaggcacggacgtaatcacgttgctcctccttggatgcttgctccaaggtatgtaatgttgacacgctgtgcttgtagagttcaactgccaaactcatgtcttccagtgcttatatttgagtatcagataagaattataaaaatttaataacccaagaaagatcgcattatgacccacgaaaacaagaagcagaaggtagaatggtaaactgcaagattaactgcacatattgtatactgaaacaaagaaaaattagttgtgtgccatctacagattttcgttgttttgtataatctacagatcagttaggaggcaattctaatgcggaatatggaaaagcactaatccattcatttccacataattatgtttatcacttatagaaaattgtgcatgtgattattacatgctatccacctaacaaaacaagtgtattgatctcgagtaacttgagaataaattgcaagatttgaccatctaatgaaatagtttattttgggtctagctcaaggaggtaattcctaacaagtactagtaataagataggcagtgtgccgaaacattatattccccataggagaatgcataccatcggtatcttttctattaaatgatattcttcctcaaaatccttcaaatgaacctctctggcactgtcaagcagttcagaaatgaatacatcctttgcagtatgttcctctatacaaaaaccttcaggtagtttctcacagatttcctggagattatggaaaatgtttaaatgacggactatattaaattcatttttttttgtgccaaacaatagtttcaagtgcttgagtgcggagcacacctgaatctcccttgcaattgctgaacttccctgttttcattagaaagcatagaactcttctggactccatgttatcaaatgaaaaggcactatcttgtgttgttttccgttcaaaaaaaatgttatcaaatgaattgcaaaattacaaacagaaaaataccagtgatttatcaactgaatgtaatcagtggttactgaccttaaaatccttcccattccgaaatattactgtcagtgtttcttccctcagcttatggtagaaatcaatcaaagtcctatcgcttgaagatttaattgaatgattttcatctgtttcaaatgaagagttctgatcactgatcattagtgtacatcacatgaaattaaaaagaggggggtgatagcaaactcaaaatagcaaaaatactcaccatttcattatttgagaacatatcagaagggctctgcacactttctgaagaactttgtgtcatgtgtacagcatcaaccagctcagtttctttgtacaggtcaagtatggctgcatcattaggacctgtggacttacaagtttcaatgtggtttgtagttcgaacatggttcaaattttcatccacactagtaaatagtgaccagtcttctgtcaggaatgatggtgatgatgctctgccgcaagacaatggcgccaagactctgtttgatggtgatgagaacgaaggaggaaggaaggacttatcaccacagaggaagcgggccaggtttcctaacaaacttttgagtgggcctgaatgggctaagtagctggcaagagaggagaggtggcgtgagtgagtggtgctgtattaatactcgaactcttgtaacgaattacttgactaatagaatctggaggcaattggcggcggaggatgcaatccggttggattggcgtgagagaaatctcatctgtgaaaattgttcttgcttgcaagttaggtagctaacatcttcctggtcacttcccaatgattttggtacatcctgtaatgacgaaattattcagaccaatcaatggaggaagccatagccatatcaagacttaatacaaagagaaaaggtttagaaagaagtaatgataggatttgcaatgctagaatatactatcaaagaagtatattcacttgtttttttgcgggaactacaaaaaaagggttatttgtgaattaaaaaaatgaattcctgcctaattctacaacacctataacaatttccaagtagaattaataagttgctaaggcagagcttcacacttgatacagatacagaatgtaagaggaaaaaagttatcacatccctttaggaagcttgatcattcaatttgaacattataatcatgatttattgattcagttttgtgagactggtcgcgacgtccgtttcagcaaaggttatcttcatctctgcaattttctaagtgggctagactatctgagcctacctttcctttatcaccagtttgcctttggtaaaatgccttaagtaaacagtttccacataatactatctcacgcgggcggctcggggagcgaaaaaccctagccgcccgcgcctccatcccttccccccccccccccacctcgccgccgccggagcttgccggcggcaaagccggcagcgagcagggaaggcggcggcgaggccttctttgtggcgttctccctcctcggcgcgacgtggacgagatgatgacgaagctccccaccggcgtggtcaaaggcggcaacggcggggatgtgtggggaggcggcggatccggcgcccccaaggccggatccggccatcccccgcctggagctggcgcggcggcggcgcgaggcggctgggcggcatgcgaccgtggtggcggcgcgcggctgccgagcggcgtggtggcgtgcggccgtggtggtggggcgcggcggctggcgttctccctcctccgcgtcagaggcggcgacgacgggcgttctgctcctccacgtcagaagcggtgatggctggcgttctgccgagcagcgccgtcccaggcgtggaggctgctaggcgacgtgcggccgtcgtggcagcggtgcgcgtagccaagcggcacggcggcggtgttccgggcgcggcggccgtgcctcgccggtgtgagcgcgagcggccaggcctcggtggctgggcaaccgatgccgccgtggtggccaggtggggagcggcggccgggcaatgggagcgccggcgggtggcaccggagccaaagcggcaatgtttccggcgtcggcgcaggcccagatggttgtgctaagggagctggcggcgataggtcgtcttcctcgttgccggtcagcaccctcacccttcctagagctcctccccttctctgtggggagtttctaagctggattgaggcggcagcttgttagcgggagaagctcaggctgctgaagcaatgccatccaatcccgggttctccttcggccagatctggcgaggaggccggcgggtggtggaacggagaggtcctgggccagttctcagggatggtggttcgatgaagccggccgacagaggggcgtcggtcgggtatggcggaagccatgtgctgccgatgttcagatggtggattcggattgggtgacgtaccatggtggtagggggttccgagcgaaagcttagcccaattctttgggccaacagtgactttgccttcgggcatagtaaccctcttgagggcactgttgaggtatccctcctccctcggcaaggagctctgggtgaaaaccttgtccagtctttggatggatgacgtcggcgtcttttggcgtcgtgaccctcgtgagggcgttgttttggagtcttcgtgtcgtagtggtgtcgttagctcggtggcgatcggtctcgcatagtgatggccggttcggtgcttggctttcctctctgtagtgtgtgtttggacggttgacacatggtttggggcgtgtgctctggtgcacatcctttctcgacagccagctgtcgatgtaaaacgtacatcctttctgccagctgtcgatgtaaaacttttcttgtaactttttctttccatcttaattacattgaatgacctttgaatgacctcctttggtcattccggcaatataaataggcacagcattatgtttttttttcttgttaaattgaactgtttcgtatgattttacatttgagtattgatcatgtacgtttggtgggaatgaattttgcatactaccccgggtttaaatatacggcatccttaacttcttttaatttattttcgtttttttaaaaaatatttatataaattagacaaatataaaaaagcatgctaaaagtacttttgatgggtcatctattatcactcttttcatttttacttacctaagtaattaaataaacattgtcgatcaaagtttaagaaaaaaaataaatagtgctgcatttagaaagggagtgagtgtgctgttcctccgatgaaagcaaatggatccttgacgttgagtgaaggaatcccttgcattcataggcaaacaatgcttatttcaaacttcattcgaaggtaatttgcaaaagataaaaaccttcccttcaaggtattcctaatggactaaaagttctaaacatcaacgcaaataaataaatgaaatcaagggacgccttgtcgttgtcgcctactcgccttgagtagaaactatagcatcaagccacatattgttcaaaaaaagtgtacccacaagcaaaaggttaaaagctctatacgaaccatagctccaatgctcacgaagcacaaaaatgtcaggagtttctaacaacaatatttgacaccgattgcgtgctgcacaactcgaatttccaacctacagtacaagatggtcaatactgcataatttttccagtaaaacatgtcctatccctactcatccttgcgtttgaacagtttaacaagatagccaattaaggagaccagccatcgccagaagagaactaggaaatttgacgccttcggtttgggttcaggccttggcccgaacagacctttgtatagctccttttgtttctggtacagagctttatcctgctccgcgagcgaccgaagctcgcgctggatctccttgtcttctggagaatacttcttggccttcaggaagtcctcccttgctgattctgtttgaccaagttcagctctagcttttcctcgtctgaacaacgctttcacgttgttttcatcctctgacaacacctgaagaatgagattatgcagttgatcatgatcagcaattctttgattcttattcaaatggtcaatcaacaggtccgtgaatcaatacaaaaccaaaatcatggttgttttacacaaatgagttggaaaagattacacaagtacactaagatcagaagagtgtctttcatgaagaatcatggacaaatatttctccctgctttagccatatgcctgttttccatatttattttgcaaatttttagtgtctgaatgacaaatcaaattcagttttttcttgtgttatacatgtaatgttaaagcatgagtgtaagagtaaattttatgcaatgtagaagaataacatacaattgtacactgtgcgatagcttcatcaaatctcttcagtttgatcaggcatgcggccatgttgagatggcagggatttttcacagctaaggccatgtctctgtacttcccaaacaattgaaacatgaaatcatcccccatgtatgcaattgcctgtaaagaagaacagctagggggattatgattgagcatcttacaatagctgaagaatgacatcagtagacaactaaccatttcatattgctgcatagcctcctcgaacttcttttctttgaaatattcattgccttcaatcttcctcctgtctgctgcttcaatcctttcttccactgtcatatcacttcgggcttttccctgtagttttacattatctgtaagcttcctaggaacctttggttcacaaatatttttttaaaaaaaatcaaaatcaagggtgataagagggatatttatcctacctctttgacatcatcaaacccaataagttcaacttcatatacaaggtctgccattggagggacatttgggaatgaaaagcttccttctttcccatagccaagctcccagttaacatgtaacaatgcacgctccccacttctcatgttactgacaccaatgcctaaaccagtcatttcctttttctctgttgatgagaagaaaaaaaaaagcttcaaagatttatactaaaggcaagtgtaattgatgctcacgtctgttcgtacaatactactcggttagttatctagttaccctgtccagcagatttattgaggcatgaaaaagaggaggtaaaattactagcaatagaaatatcatacttcgtctttagcctttgcaaggtgaggcaagtgggaaagttactggtgggaaaagttttttccccctcaaaaacctcattttgattggcattatggaactatgtgatgcaaagtaagctgtttgagttcatggaatttacggatgatatgcatatgtgcacagaaaagctgaggataaaataaaggaattaactttagtgttaccttttccaagtactagttcaattgaatgctgttcttgccaagtatcctcgaatttgtgcgaagaaccttgaacccatgctctatagtgaactgcaagacaaagattgggaaaaaaataatttgcaaaatcaggtataatatattatcctcattctaatcacaatcctaagcaaatggaacaaactgactacttatggcatacttaccaaagcatgtggcaaaccttgagggtttcttgccatggccttccttgatgacttgctttttgactttatcattaaggacttccatatcagaggtaaccacaggtggagcagtgccatcttgaggaggctcagtatgcacaaaggaagtttcttccactgttatctcatcatcgctagcacctaaacaaccaaaacacatgttcagacatagtactgaatttcttgaataagacaattcactgttctgtagtgtggccattttataaaggagattcaaagtactgtgaactacatccaacatcaaacatttgatgcgccccagttttttggggaatacacaaaaggattgcgcatcattcgatgtgggactaacccaacacggaagatatacttacagttttctagatgtgcgcccatggatacaggagtatttacatctgttttgcttagaaacaccataggccaaaggtcccagtgctacaccatctatgcctatgtacttatatggtgtagtgtcaactactcaatcaagtagcataacctaaccctgtaaagcatgaatcatgtgccaagaacagctaggttactgtttagttggtacgttacataattgcattgcacttgtataaatcttagagacttttagcaactccagaaaattggacagatttatcagaactaattgtcggtactatcgtcaaaatcaacgggatatgacataatatgctgtcatgccataataatcccgcctaactgcttacaaactactccagtagtattgaagtgcacactcgatagcacttgattcgagcattcggggttcattcggcaaggtgcaaactgcaaaatgatttgaatttgagatgaatttggcgtcctcaagagactgaatctagtttaaacccaaaccggacattttacaaccaaaggcgcctaattttccgaatcccataaaaaagcacatatatgctacgattccgcacggggattcaaaacaacagcctgccgaaccaaccgatccaactcaccacaccaaacacaagacagacacgcccccagggtgtagggagtgcgagagaaagcgggagactcactcaccggaggtagaatcggcggcgggtaccggggccggatcttcttccagcacggccatcggtgcgggacggcgggcaggcggctggtccgcggatttggaggcggatggctcgaggagacgagagcttagctcggcacttcaccgggggatcgtgcagcgcgacgacgtggtgttccctcttcactttcacttgggtggtccatccagtccaaggacggcagcgaagacagagaggtggatgagagagatgacgagccgcattcgtaccttcgtgggcttcattcaacttctaactcgttgccaagcccaactactcagtatggtccatgtgctactatggatctgtttgttgaatttttgttatatttttttgaccttttttatttttaattttaaaaataaacccttccaaaaacttattttcaaaatctgaacatttaggccacgctctggagtggcaaaacaacactgacacaccacctgcagcgccgtgacaatcttgtaatatcatgacagcgagagcagtgtgatcagataacgttgttacgctagcaagaccggcatggccaaataacactgtcatgatagtgagaccggtgtggtagtattattttgccacgctagttcgactggcatggccaaaaagattatatcttgaaaataagtttggaagggtttatttttaaaattatagattaaaaatgtttcaaaaataaaaaaaattatttggaagcttaagatcatgagaaaatagctggtttatagggatctgtagaaactcccaaaacaatggtcacaagaaaattagaattgaaaaaaaatgatacaagaaaaatagaaaacagaactattcacgtgaaatttcgattggaaaccaataatatgaccacatgggttaatgcttacaactatgcaaattgtgaacgctatgggacaaacagaaacataaccaaatgaggtagttagtgttaagtatgcgatagtcaagaatatagggataagaaatactaggatacaaattaatccattccagtaagaaatatagtaactaccggattacggtttgagaagacagtaaaccaagaaaacggtcgataaaatagcaagactatatcttttttttccccatttctgcttctcatgatttctcatggttaccctgcaacacttttagtttttcacccctaattatcaccgtcaacgcccgctagacggggcagggacaaccggacaagacaaccaagcgtaataatactaccaaacaacgaacatgcagagataaaccaaaattaagcggagtctgctacatgtgcgctcacaaatgagaagtcagaaccatatgcgtcagcaaacaaattcttcaaattacatagtagtacacaactgaaacaagctgcccatttcgcagctgctatatatttacaccaatcattctgtatgaaacacacaaatcaccgtcataatacaggctaagctattgttaccatgaccggatatacacttggatgtagaggttgcaatgattttcactatcggaaaaaaaaaaagagctactgttacctttgcccagctcttttcgctaacctccgcaattgaaaatcacagcacagtggtgcagcttaacttcttgccaaccaaactgtactaatgtactaccaaaaatgtgtcctccccagctcagctacctagcttatgagttatgaaagctttgcttcagtaagagaggacatggccatccagcagtactcctttggcttttatcacccagtgttgagtcttttagctcccacacttgaaacattgtggggcatcaccatctttcttctcaagaacaaggcatagaggagttcattccatgcatcagggacaccaggcaggcaccagtggctgcaatcctgcctgtgatgagatgcaggccctgaaggactcaggtacaccgagaggtgcccgtctttacgcagagctgtcatctgagtcacattcagtatatccagcccgacaagcttggtcgtgatgctgttccccagtacatgatttatgggttcaagcaggtcagcccacggttccagcgatttaattggagttacatctggtagagtttccaagtggcaggtccctccagtcttccagtcaccacctctgtaagaaatatctaatctagttaaagaaatagtttgactgaatatttgaaagatactatgatgtttgttcacaagtccaacaataaataccatcagcattgtttcatgatgctaacaatatattggcacaattcacataaaacaatgaaacaatgtatggtcaaaagcatctgatatcattcgatacaacatacacaatcaatcaagactgtcaaataatgtttgagcaaggaattaaaaccaagggaaacactcactatttgagtaattagagttggtgattcacagacctgaaatgcacaggagcatatgtacggaagatgatctgggtcttgtttgtgttaacttcattgcgaagccaatgaaacaatgtctgcatggatctttggtaagcatctctaacagtcatctccattttgacctcgttgccttcttggaaataggcgccactggtgcaagacataacagtaagaatagcatgatctctcagccataagacattaagtagagaatgctgttcagtcaatagaattcaaacatttatgcttaccctttgattgttttctcatggttccaccagtgccccgtgttaaagatcaaaagatcagcatccttccacttaccccggccagacatccaatccatggcatctactctaattgtatattttacgactgcaggggctccagctggtgcacgaccttgaaggactatgaaaggagacctgtaatactccacagtgcaattgtactctctaaacttgaaaattaagaaacccatgtgttttgtaataggattcccattaacttcaaagatggagctcttgtcaggaacagcagcagcgagcatacaaagcagagactcccattggtttcttgcaatcgaatccccaacaaatacaactcttctgtttctgagtttctctagcatatttctggcattaaatctaagaaacagaaaaggagacgaaattagagtgagacaccagcattgctaatatgggcatttgaatttattgataatggtacatctcagtccacaggtatcaagggagtaccatacaaggtcacaaaataatgaacttacaaggtcacaagcatgctctttccttataaaataattcactgagaaatcaaaaggcatgcaatacattaaaaaacataagtacaacgagattatgcttctaacaaaaaaatgcgagtccttttacatggtactatgtaacacatccctaatgttataatattccacctttgcaaaatttcatacaattagcacttatgaaggatgacaaacttaccctccaagtatagctactgacatttatggtgacaagaatcaagattaaatattcttttcaaaaggtagaaatctaatcttggaaccactttacttttccaaattgaatcaagcaaccacttaactgcaacaaaggcagttagaacacaacaaaacagagccctcaacaattaacaggacaagaccacctctccatcgaaggtaaagatgattgcaacagcatgacagtcgcagatcaagtaaacaatactgatttaataaaatatatcttctgcaggactaagcaataaccatacgggtaacattgtttcctacttttgtaatcatgtgggaagcaaaagggcatcgaatttccaatcgtggcgcacagttccaaagtggagttggtcgttgacagcatcatgatcatcccatgttccaataatctaattttaaccagggtgaagattgtaaaatgcacgcccactgatccaatctcagcaagaatatcccactggaagattgaagtcagaagcactaacccaaacttaatcctcatcatgccagcagagcagcatgtttgggttctagattcaacccaagtttatttaagtccgtcttaatttctttgcctttataagttaacactcaagttgtagaacattccagcagacaaaattaagtagcacggtctccaatccacatctccttaattaatttatactaatcaattaatcattcgccatctccgcaccgttctagatgcttggattgcagcaagagatctcattaaagatttcttcattgatcttcgtcaagctctcgaagtaaacatttactaaaatcgatttctatctaaacctccaaactcgccaccccaatccaacaatggaatcaatggaagcataatatgcaagagtaccaaagatgagaggaagaagtagaaatcgatggaagaggaggaagcaaacccaacctggggagatcgcagcgggaggggcgccatcgccacttggtgtaggagtcgtcggggcggccgttctcggagcagcggaagccgacgtcgaggaaggggcaatccctggaggcgtagagcgggtagccgtcgtcccacacccactccccgtcgaacaggtcgcactcctcgcctccgccgcctccgccggcgccgccgccgcggggctcctcgatggagaccccgccgctgaggagcttcttgggcgccgccagcgccgagccgacggcggccgagcagcggagcgaggcggcgcacacgagcaggagcagcgcggcggcggcggccagcatcgcgaccagccccgccgccccggccttctccagcggcctcctcatcaccccccgcgccagccgcttcgccgccgacgtcgaccccaccatcatcgcatcgatcgatccccccaccgacgaagcagtagcaccggcactagtagtaccactactactacctgtatactacctcgccatggccatggagcttacgcgcgcgggaggaggggagacgagacgaggtggcggagaggaggaggagacggagacacctcgagggagaagacgaggaggtatttatgaggaggtcatttgaaagggaaatgcacggagtttggctgcttccaattggacggaaagcaatgtgattactatttccctatttcataatatataagttattatagcatttcttacatttatattaatattaatgacttacattgtaaaatggagggagtagtactcctctccatcctataaaaaaaactacttaacctaatattgaaagaaaaattttctaatacaacaaatcagaacagatagaaactcatccaatactaaattatttttccaatacaacaaatcagaacggatagaaactcatccaatactaaattattttttttaaagtagaacttaacctattactaatataatatcgtttcgattcaggaaatattatattttatagtagattaatatatttttgagacgaagtaagtacaaattagtagtgtggtttgtggcaattgtgttgtgcgtgtggagaggggaaggaagaagtggatgggagggggagggttgaagttgaggtgtggggcctataaattcggctgtgtttggaggggttaagtatgagtcaagtcaagcacgatctatccctcggtcatcaaaaaatacttgctttaggtcgagcgcaagttaaatttgattaccatctgtctaatataatgtcaaaagatgtactggtattttattttaaaaaaactttgtttaattttaggccgctaccttttaaccacatcgatcattttcgatcggggcagttgctaaaccattttc

SEQ ID NO: 5361 - DNA, 66170 bp, Oryza sativa
cacgatgcaccttcgtggcgtttagcccagaaacgacatattctacgccacatccatcacaagcggagcctcatgaggactgtctaaccaatattactcacccattcttcccactgaaaaacctgaaaaagttgcacacaacggttggggagaggggagagagagtgtggaccgcgtcgagcgtcaccttgccccgcccacacaggccgctaaggagccgagcgccggcgagttgaggagattcggcgagccgccaccgccacccagaaccgcgagcaccagcgggctgaggagagaggggtgatgcggcgagccacagccgccgcccgaggcttagatcttgcaagcgccgggctaggccgccccgccgtcgccatcctccttttctgctgccgagcttgtcgtcgatcttctcctctccacatcgaccgtcaagctcatcggtctcctcctctccgcaccatcaagctcgtcttcctcctcttcgcgccgccgagctcgtcggcccgtctcctagatctacattgaagagggaaaggccgccgccggcgtggggaggaaaaaggggaaggccaccgtggggagagggagaggcgtcgtggtcctccttctcttcgctgccactcttcttcgcccccggagaggagcgtcggacaccgcctcggcttcccgctcgccgtcctcaccgcttgggctaccccgccgctgctccggtcgccgccttgcttcctccgccgctgcctcgcttccttttactggtggggaatggatagaggagagatgaaaactgagggtagaaaaaaaggcgggtgggacccattcaaaagaatatgcactgcgcagtatgtactacgtatctaacaatgtttctaggtatttttaagctgagttggaggctccgcaaatgtttgcgtcgcactgctaataccttaggccgagtttagtatcaaactttttcttcaaactttcaatttttcccatcacatcaaactttactactcacataaaattttaactttttcgtcacatctttccaatttcaactaaacttttaattttagcgtgaactaataaacacagcaaatataacgttattcttctctctctctttttatttggtttgattgattgatatggctttcgagacttctccactcgttaaactcacctcactcacagcttcagcagtcccacagaataatcacatctccaagttccgaccatgaaggcagacaggcaggcaatcaagaaaaacaaacgactctctgaatgggtagtccacagcacaaacaaacctgctttcttgacaccacaaacaaaacatcttcttgccccctactacaatcaacggacccgccgcctatctactggcctcacattggatgcgtttttaccgctgatgacaaaccggctgacaaaggaacaataaaaagaaacagctgtgcgtaggactatgctgctaccctcgtgtccttctctgtcgagaaaaccggcaacacattgttcaggttatggcacggcaggattattaccctaccgtgcatgagagagaagagaagaggagaacacacactcatcagagagaagaggagaggagcagaggccctacgcttaaagccgccattattgcggcctcctcctgctgccacaataaagctaccacttcaaaccagctatgtggacagctatcctaactctacgacgatcactttgaagcaaacaacaacagcaacccaagccccctgcaatgattcagtgcagttgcaccccccaaaacatggcccggaaatcgcagcctatttttttttgacctagcatacgcctaccttttctcagctgtgtgtgtatgcgcgacacgtttcgctgacaagcagctgttgaatagtcatccgatgatttatgtgagagatttatatttcctaccttcaatttgacacgattttagtaacttcattttgataatgaataatttacttttagattttataactgtagattttcataatttatttctagggcatgacagcctgagcatcttcgtaagggtttcgactacttagtcctcctgatctcctatcagttgtgaaatgaacggaacttcagggtgtttcacttcacactttagtcggttctggtggtcctagagcacattctccaggaagcccaaatgtgatctactgcggacgtcgtgacttttggagctctgttaggagtgtagtgaggctccgccgccaccctccataatataggagcaacatttagcttcccttagcggccattttctcctcttttttactttcccatggcaaagggtctttctggccgattgcgttgtgtaactaaaattctgcttcttccaatatattgacgtgcaatttctttttcgcattcgtgaaaaataattttagtgacaatttagattgttggatgggtttaagaagctcctataaacacaacaattgagccatacatacatagaagtacataccccgcctgccctacatgcatagagagcgagtagcattcccttccatccggctccatcgcttgccccactataagatccttcctcctactccatggatcgctttggagaaagctgcttttgcctacttggacaaacacaacgcaactgaaacaagttcatattaacaaaagaagaggaattgaagctggctggcttgctcgtttccaagctcatgatggcaagatgggcctagtagtttaatggaggcgtgtgattaatgatggtaatctacggcacggcatgtttttggttccaattggggacagcggattaatctaatccggagagggatgattgctgttgctgctgatgctgttggtcccaacagtggagcgcccctgatacggagcagagcgtgagtctcctgcgcgaaatccagtggggatggatccaccattcgcgacaactaacatcgaatctcaagcatcgagtgtgcggcaaataccatgccaactaaacaaaaactttgtactactatctctgtataggtgtagccctctaaaataatgacagtactaagatccgtttaggtgaagaaaaatgtggtcaggacaatggtagtatgatactgtatttacaattccaaggcttgattactagcagtacaatagtactgcatacaaaagttcagacaattgttgctctgatcatgagtctgaatgctgcatatactgcgatatttttctcaccttttaccgcggtagttgggggtggaatcaatcgttgtgagggagagggaccaagcagttctatgatcagggcaggcagaagcagtggtgcttactgtggtcataggattgaaatgtgcaattctggtgtaagggcctgtggtcattagttggcgaaaaaatttgcccccctgtcacatttaaaatattaagcatgatctaataacaaaaacaaattacatattccaccaaaaaactaacagacaaatttattaagcctaattaatccatcattagtaatgtttacagacaaatttattaagactaattaatccatcttaattcatcattagcaatgtttattgtagcatcatattgttaaatcatggagcgactaggcttaaaagattcgtctcgtaattttctagcgaactgtataattagttttttttatatttaatacactatgcatatatacaaatattagatatgacaaaatcatagagcgattaggcttaaaagattcatctcataatttcctggcaaactgtataattgatttttttatatttaatacattatgcatatatacaaatattagatatgacaacctgaaaaattttgtttgggaacccctaagccaacctgaatgcagcagctgctgctgctacgggacagcgctatcttaccccatcaataatgtaagtgcagggtgcaggaaaaggttgcaaccatggccaaaactgcagcagctcctctcctctatgacttccctcttcctcctcacataacacatggaccaccaccaccaccacagccatcatcatgatcatccatcccctctcctccattgcattgctcccacaattatcattgttatcaccttcctcaccttgggatggagtattataatctttcttctctcacaccaaggaagaaagaaaagcatggcattgagttgacaacattccactactagtggcatgtaaaaagagcactatagctagggcacacatccactgtcacagtcacagaggcacaaacaaaccatttggcaacacattttgctttgcacattgttcgtctaccatgcatcgccacaaccttatatggagcaagaaggaaaccaccaccaccaccttccttctcgaattataaagcaccaccatcatctcttatgaaaaactatagataattactatacctaccttcgccttcaaggaagttgagttctcctttaaaagaaaggtgaaaacgagctaagtaaaaagaaaaaaagaaaaagaaaaaaagaagagcgatctagatgggactcatttcccatggtgtatactggttgactgatcctgagcatctctcatctcaaccatgatgatgacgatcacctgtgacctgatgagcttcttcctccttgactcctggttggttcactttgttgaacaacagaatgaccagaagcagcagcaggaggaggaagaaagcaaaccggacactggagacctcacatcaccgagcagctgtttgggttctcgtcgctgaagtagttgtagggatcggcatgcgggtggggctgcatcgggtagtgcatcgggtacggcatcggcggccggccgtacccgtaccccatcgccgggtaccccgccggagcagcgccgccgccgtggccatggtgaccgtggtggtggccatggccgtggtggccgtggccgttcatcatcatctgctgctgctgctgctgcatcatggccatgtactgctgctgggccatggggttgccggccgccgccgcggcctgcagcatctctgggccggacggcatgccgccgccaccgccgccgccgccgccctggtagaacgccgccgttggcatgccctgcacggcgccggcgccgccgccctgggcgctccccatgtgggggtggtgggccatcggcatggtcatgggcccgccgcccatctggcccattccggggaaaccggcaccgccccccatcatgttcggcctcatcatcatggcctgctgctgcgccggcatgccgcccatcggcccaccgacaccgccgccctggccgccaccgccgccgccgccgcccttcttcccctgagcaggatggttgccgccgccgttcggggcgccgccacccttggcgttgttcggctgcccaccgccgccgccgttcttgccgttaccgcctccgccaccttggttctgcttgccaccggcgtctttcttgccgccgccgccggcggcgttgttagcgttccccttgatctgcacggggatctcgttgccaccgccgcccttcttgccgccacccttcttgtcgccgccgccgccggcgtttggtggcggcatggccatctgcttcatcatcttgggatcgtcgaagtagtcctcgtcgaggccgtcgtcgtcgaaatcgtcctcatcgtcaaactcatcgaactcgtcatcaaactcgctgccatcgtcgccgaagtcatcctcggggggaaggttgaacttgacggacttggggtccttgatcggcgcggccgccgcgaacggcgccatcttggcggcgtccatgaactgcggcagcttcagccccttcatctgcagctgctgctgcagctgctgaagctgctgcggcgtcggctgcggcatctgcggcggcatcatcatcttcacgtctttgctgccgcctccaccgttgccgccgccaccgccgccgcccttctggcccttgccgccggcgtccttgggatgccccttgccgccgccatccttgggctggcccttgccgccgccgccgccgtcaaggtggagcttctgaaactggttgttcaccgccgccaccccgaccttggaaccccatagctccgccggcttgccggccttgttgagcttcttgataatggtggccggatccaccaggccagacaccgtcaccttcccctgctcagcgtcaatgctagtctggtacacacctgcagacataaatccaacgagcgtttcacccagaaaatttcaaaccaccatataactaaaagcaatttgctcataaaaaataatctctcttttttctgttaccttcgatcttgtggaggatcttcttgaccttcttctggcacccatcacagtggatgttcactttcagcacacaagtctgggaatttgggaggaacagagaaaacacaggtttaccaaaacagcaaaaacagaggcgttttcgaagaaaacatagcaggagaggaacacaccaggtgaatgaaaaagaaaagctagctgccctgtcttaccttctgatgaaaatggcagcaaaaacaaggagaaaaacagaatgtctgtatcatggttttgagttgagaagaagcaaaaaagaaaaaactgacctgaatcttgaggacttcctccttactcatccctgaccacctcaagtgcggcgccccccaccaacacaagcacaagaggaggcctcctcacagatctggtacaaagagtcctcaaatcagggacagaacaacaacaacaacaacaaggcagcagcaaccagtaaacattgccctctctgaagaaagggagaaggtatgatgagcaaaacagacaagaaaaatgccttctttctgaagataagttaatggcctccaatataatatctctcccttcacacactcacaccaagagttagtgctatggagagagagagaaacatataggcttattagagtttgcgtgtttgcagaaaaccaagaaggatggggctactattaagccggtggtccagagaagaagggagaggaggaagaagaagagagcttaatataaacacaggcagcaccatctcctcttacccttttgtatttgctttcgccttcggcactgcagccttgcctggaagaaggcctttctctttgcaccctccacagattgtgaaggaagggaagcctggggctcttgcaaaagacttgaagagaagagagaattaaatacccactttgtcacttgtcagtaagtacagggagatgttcaacatgtgaggtactcatcagatgtttacgccgagctcgcaatgtcggttttttcttgcttttttgaaaaagtgtccagaaaatcttgtttttctgcaaatttcatattagcccttctagcctctgtaacttgcagttaagactgactctgcagcattttggtcttcggggttcttaaaaaaaaatatttttgaatgtttctcaaaagacttggtgaaaaatttagcaaattgtacgtaggatgacaccgacgcatgaaaatatgtttcatgcaaaaattaagattttacgtgaaaaaacatgcaaccaaaccatccatgcacgagcgcttgtcctattcggtcgtcatgtattccatgcattacatttacagtttatatgacaagagcaatacgacgtccgtacaaccgacatataaagaagcttttaatgattcaattgtaaacgagtagtcttggccataacgtattccatgtactccaatccattgtagtttgtgtgacgagagcattagaacgtccgtataatcgacaaataaggaagctttaactacttgcaacgcttcaaaacgggtagcggttatgattctccgacgtttattgcaacactcgtacaacaagatatacatttccgttttgtagcatatcacattatttaacgatgtagacattacatgcttgaccttacaagctatattttcggttacatacgacaacggctagtcagcttctcagactcaacaaatctgtttttgtcgagaacagaagaaataggcatatcacgttttctccggtctatcaccctatcaattcaacgtaaagataaaataggcactaaggtagtgcaaaataagaaaaatacaactactagagggtttttaccggcgaagtaacctcaaccagaattactctcttatgaaggggctaatatgcaaaacaaaaggagatgagaaggggttccctgtgctgtgctgatcacgcgcccggtcaatcgtgtaacgcgcgtagctttgggcatcgtcacgctgtgcaggcagggcaaggcgatgtggtccgtagacgcgccgcggccacgccatctcatctctatctctctctctatctatctatctgtctatctcccctggctgcgcggcgcccgcgccgtgctgccgtggcgagcgagccgtgtgcgtgtgcggcgtgggctgcgcgcgccgcgcggtgcgcggtacgtacgtcgtccactgcaaaccgccgcgagccaagccgcgcgagacgacggcaacaacaacgtacgcgaggcgcgcgcgcgcggtcacgccatcctcgcgctcgcgctagctagcgttggcgttggcgtggcgcgacgcgcgagcggcagcggcagcgcgaggcgagcgctctccatgcatgcatatccccatgtctgtgtgtcagaggagggaggtgagcacaataactactcaggctcttattgatgacgccctcttaacttggcctttgcctctctctgcactgcacctgcatgcgtttcacctcccctgatttttttgtccactctttcccttccgttactgtcttttactactactccctctctctttttttttctttttgtttctatacgcactcgtctctccaaaaaggaagaggagaaaaaaaaacgtaaaagggctggtcacaaaaaaaaaaaacggaagggaagggatggtaaagtcttggtcacgctgacctcgcgcggtgtgacggatggatggacggttcacggctcatgcgcagaattgcagggtagtattgcagttttttgttgttgttgtagcagatcatcgtggtttgacgtcgctgacggatgaggaaggcagcagggagggcgatgggtgacagtttgcgtgtcgctgtcgcagctcctgctcctgcatgccatgccactgttgcgatcgggtgcacttcactgttcactcgtaaaacacagcaccatccagcgttcgatccattatcatctactacgtgctcaattaccctggaaacagttcggttaattcagagggattgacacaaacataaatttgttaaatatttggagatatatactgtactccgtattttacatttcaagcgaacaattaaaccaagatatgtgcagttgagctgaagatatgattgcaacatcgtcatcgtcgcgagcaaatcgcaaatcgaggttacagatttgttcgtatatgcactctcatctttttgacgaagagaggcaccgcaccagccttgcatgcatgctgctagtgtgctggatcaagctagattgatgtcaggtagccaattttgaacttcagtttctcgcgaaatttgctgtcatccatgggatcgatgcagtgacctgtatacattggaaactcgcgtatatggatgcatgtatctgatgaatttctttgtatgcatttgctatctttgcatgcagtgtcttaatgccatgtctactttgattgctatgtgcctatgtttgctactgcaagaggacaaggaggtagtcgacatatatacacgtacttgaatttgtactcacatgtagtagtaattgttcatctctcgcattcaggcttactgtacaatcacaccttgcaggagtaccgcatccgtgtgactctccactactagtatttgttctatctcccatatgaaaacaagaggctttttgatcatctagtcattgacacactcgcaataaattggcttgacgtattttgcagctgtggtcgcgttaacttatcttcataaaattccaacagccaaacagaaaaaaaagataccacaccaggcacaggttcgttcttgcgtgccttgtgagtgaagaagatgtttgggaagatgaagatggcacttcgaagttttcttttggtgaaaccatgaaagggatcgatggctattgtgctgggaacaagttcctctgacatgctgttctctaacgcgtggatcgttaacatatcaatcatttaaattcagaagatagtagtaataagttagagcctcattggttactcttacaagctactccatccgtcccattttaagtgtaaccatgagttttcgcgctcaattttgatcattcgtcttatttgatttttttatagttagtattttttttgttgttatgagatgataaaacataatagtacttaactcgtgatttatgtttttgttttttttcaaataagacggacgatcaaaattgggcgcgaaaaaccataactgcacttaaaatgggacggagggagtaaagtcgaagctaaaatttgaattatcaaattttattttaaagttgattttaaggtatttttaattagtttttaaataactaaaaacacacatatataaaattcttattttctaataagtcgagctggggctggacggacggcgccaactcgtgggccaccttgtgcggcctagcaaacgtttgctaccttgtagagatgtcactagtgatcgacttttgcaggagaagttttcgtggagaagcatgcatgggccggatggattagttggtacagtagaaaaaggggcacacaagaggccagaatgtgaccgatttttttgttgagatcgacttgaggaggaacacgttgcatcgcatgcattttggtggtgtttgccgggccacccaccgccatgcatgaatcagtcggtcggtgtgacatgattttgatggatcatgcttgtcctaattaatgtgggtgccatattgcatggcaaacttataaggttgtgtttagttccttccaaaattgaaaatttgagttgaaattggtacgatgtgactgaaaagttgtgtgtgtatgacaggttgatacaatgaaaaaaagttagaagtttggatccaaagtttgaatctaaacatagtctaagtaaatcactgcagttttgcaaccggcatatatcctgaactctgcgattgaactagctggactgaatatgatcagtcgatcatgacttggctaattcggacaggtagggaaagcaaaggtatatatggtatgatggaggctggccttgcacagttgcactttccaagtgacagcaactgaactcacaagaaaacaatcggggctactcctaagttggactctgatcacgtacactacggaattgaagcaaagaggttacttgcattgtcctatataagcttggcaaatggcatgcaaatgtttacagcatatataatagcggagtggattctaaaactctaagagattccttacttgcatattatttaaatggttataaaaatattagaaaattcaataagatagttaacgtatattcaacaagacaagttgaaaaaaccaaattaaactatgactaacgtatattcacaatcaaatttgttttctttcgttacatcttatataagttgaatttgaccttgtatatttttggagtgatttatcacattttaatcgatcttgtttaatatttttacaattatttggattaaatgcaaatattattagtagtagtacattggatatgcatgtcggcacgtctggttcatgagaggccatgttgattgattatgaaagtaggaaattaaagctttgattattgttgcctagctggtttcatccatttgtagcgatcgatggcgtttgagatcattaattctttcaagctagctagccatcggtgttttggctacttttgtgtgcccatctgatgtaaacctgcgatgtataagttgtctagaactctagattcagcatgcatgggaagcagacttgacattatatccaatccaaggacgacatcgatcaattgatcgacataaaaaatactgtgcaaaacatgattacctactgctcaatagtatgatataatgaaccatattattaccctctaccaggtcccttttgcaaaagacgtgataaattcttgcgcgtaataatattaatgttgaaattacttgctttgacgttaaaattaacaacataccgagagttatcatataattaaatccacacaatacgttcgcaacacatctatatactccttgattaatgaatgactttcatcaatcaggattaaggaccggtggtagtaccttgtaagcattgctaaagcaaaattaaaggccatgatgcttatcttgaacccagcacgtgattcgacaatagagaatccccggcagggatctacccatcaggcagggtgggtagaccgattcagctacgactcgtgtcaccccacactcttaacacccccttatagtagtcatggactatcaaaattaggtataacaaggtataaacacataacaaattaagacagttataagaatgaactattaatacgatatgtattgtgttcgattgcttttatcgagtgaacttatctgttctccgccccatctatagtttagagctgcgtccgccactaatccccggctatctcgcggtagtgaatgcttgcgaaatgacccatcatgtaaatgacgagatttcaacagacttagcagtcataattatgcacatcaacatttgcaagtacaacgtttatactgcttagatggcactttacaatagatttgtttttatagaaaagatttgatttaatttagagcatctccaatagaagccgtatatgttccctacagtcaaatttgaggatttcaagtccataacccaccttaaatgactgctcaaaacaactcccgggttttacagagccccgaaaacacctcaccctcgctagttttggggcgtttttggagcccatgatccgtccctaccctcattctctcgtccagccttgcaatccgtgatgtggcactggtgcggatcaactagagctagctcctcgatgaggctttccaccacatccatctactctgcccaccggccacccacaacatgagtagccatgccacgggatctatggcgttaccggccagcacctaaagtcattgttacaatcgtccacaattgtctctgtgtcttatttattatattatgtagttatgttgagtaaaatatgtgattttgtagtcgtctaacattttcaacatacattactagtttcggattgatgtagaaatgtttcctccatatagttttgtctcttatactgtttttgattccatatcggaggaaatatatgattgatgctgtgttctccggctcgagttgggaacccttcccccattatacacaaaacaagtgacggttttacatatgattaatcaagtaatagaaaagaaaaataaaaaattgattaatatgatttttaaagcaacacacacacacacacacacacacacacacacacacacacatatatatatatatatatatatatatatatatatatatatatatatataaaacacattgtttaattggaaagcgcacacgcgaaaaacaagggagatgatcaaagttgggaaagtagactaaatagcacatcctgagactgtttttcgaccatttcgaacccttttttttcatagttggagatgctctttgatgatgtgattcggttattgggtttatcgctctcttttacaagcttcctttaaaaggcgctaaaatttcactactacaaaatattgaccaaagaactattccctccgttctaaaataagtgtagttttgcactattcacattcaacgtttgaccgttcgtcttatttaaattttttttataattagtatttttattgctattagatgataaaacatgaataatactttataagtgactaaatatttttaaatttttcataaatttttttaataagacggacagtcaaacgttgagcacgaatatctacgactgtacttagtagttcagctcatccccaaaagattctctaaatttccaacctgccgaaggaggcgacggacgattttcctcttgccgattcggaatgatttgatttgaagtgtaataatggaagcggatgattgttcatgggcatctagcagggggccctggcctggaccagctgctaggctgcccagtcgatcggccggctttgggcgctcaccaaggcccgtggcctcggcctcctcgctcgtttgggccacagtcgtacgtacagctgatgagcgccttctggtcttgtcgtcatgggcctcagggaccacgcgtatcggcgtatgtacgtacaataatacgatcgatacatacgcggcgggacatcaaattatgtttcctgattccgagtgtatttatatacgtacgtacgtacgtgtgtgggcctcagcaaacagcagtacgttcgtgtgtacaatatcgatcacacctgtatttgcactattgcagtgtgagcacagctgggaacagtgtgtgattcggtactaattaactaagggcaccaaccaaaaccaattgatgtgatcatgatgatgatggtgatcatgttttataggtacgaaattaactgatcaatggtttgttaagatgagaaattttatagtagtacttaaaaaataacttgagatatctacattaaaactgttagtatctcaatgtacattaaaactgtttgtaggtactaaattttataataaaaaaattgataccttttgatattttctcaagaacagtaaaattagtctattcagaatggtagcagcacagaaaaccacggttaatacgtccgcctgatttatttgaggctacaaatggaagaacaatcagccccaaacctgtacgtacacgcgtttaattagtattccctccgttctatagtagatgacgtttttgactttttatttgcaacgtttgaccatttgttttatttgaaaaatcagtgcaaatataaaaaaaaagtcatatgtaaagtacttttgataataaagcaaatgataaacaaaataaataataatttcaaaattttttaaataagacgaatgataaagtacttttgataataaagcaaatgataaacaaaataaataataattctaaatttttttgaataagacgaatgatcaaacattgacaaataaaaaatcaagacaagtaatatgggacgaagaaaatcaagacaagtaatatgggacgaaggtagtataattgtgaaaaaaaaaagagaattgcacgtgacaataacgtccagatcatcgagaccacgagctgtcttgactctgagtctggacagaaactgtgagagagtgagtttgtctgttttgttttgttttccgcgcgcatgtttcccaatctactaaacggtgtgtttttttgtaaaaattttctatagaaaagttgctttaaaaaatcatattaatctatttttgaaatttaaaatagttaatactcaattaatcatgagctaatagctcacctcgttttatgtatcttcccaatctcctcaatccccttctcctcaaacacacccttagctagtgtgtactactgttagtagtgtaccactgcagggttgtgtacgtgggctatgtttagtttctaaaattgaggagaagtttggagaaagttgggctgtgtttagatccaaagtttggatccaaacttcagtccttttccatcgcatcaatctgtcatacacacacaacttttcagtcatattatctccaatatcaaccaaaatctaaactttgcgctgaactaaacacaacttggtagtttagaaaaaaagttgggagtttatgtgtgtaggaaagttttggatgtgatgtgatggaaagttggaagtttgagggaagtttggtgtgaactaaacagggcactggtgagagcggccgatcagcgtcgacacaatgtaaggccgagtttagttctaaactttttcttcaaacttctaacttttcaatcacatccaaactttcttacacacataaacttctaacttttccatcacatcattccaatttcaaccaaactttcaattttagcgtgacataaacacatcctaaggcttctcacagtgcggtgagctggctcgtgccttacctgcgccatggaggattttcgcttaggtggagctaggaatcgcgactaagcttggcccctcgtccccaaacatagcgacacggtaccacgctttgacgagtccacgcgcgtccgttctttgacgcagcgtgtccttgcgccgcagccgctcggagaaatcccaaattcgccctccaaaaatccagtctgcgccgacgttcttgctgctgccgacggcgtcgtcgtcgtcattggccacaactcaatcaaatcaaaacaaaatcccaaacaagataccaagttcattcaatcccaagatcaaatcccaactcaccaagacgagaaatttctccttctccgagaaacaatctgaactagtatatgcacacaaagatgaaagctaagaaaagcagcggacatttctccttctccaagaaattttgcctaacgacaagaaggagcaggcgcaggacaagccgccgccgcacctacacccgcacctcctccgcgccaccgccgctggcccggcccacccgctccttctcctggcggcggtggctggtgctgcgcctgcgcggctcctctgtgggcgccggcggctccgccgacgccgagccactgcagctgcgaggcggcatcagcacggcgggcgagcggcggactccggtgacgcggcgggcgagcggcatcagcacggcgtcgtaggcggggacacagaggaggatgctgaccacctcgaagccggcttcccgtcgtcgtcgcgtcatcttcccatcgggacagagaagggaagggaaggaggcgccgtagccacatcccgcgctgtagccacagacggaagggcgagagacgggtgagaccgtgccgccgccccccgaagccgaccgctgccgccggggatgcgtcccgccgccaccgcgccagtcaccgccgttggggacgcaccccgccgccgcaaggggttggatagagcgaagcggtcgaggtgtccgcctgcgtgctgggttggagagaggggtaggtgaggaataaattttgctccgttaccgtgtccaaaagcctgggttcacgcccactgtgggcttcgtttccttcatcagtgtctccatccaattaagccacacatatatgggtgcttacactatgtggtggatgtctttggactaaccttttgagctaagggcacccgcaatggttatctataggctctttacaagatatccatgtcagcatattttcctacttggaagagattaaatgaagagagagagcaaagctatctactaacgtggagatagtttatagagaaaaacgagacaatgcattagagagctatagatacccatatagacatactattgaggtggtttactattaatctagtctattgctaagatgtacatgttttacagagagcaccttactttaacattacgggtgctctaaggtacgggccccatgtcttacaatgtgagaggcctaaatatgcatcatgcatgccttggcagtttggctggttcccgtttaacttcacataacaacaacgactcagcgctcggtccggatcgcaagcaacgcggccaccgcgggatgctgccggcggcaaatgctcctcgatcggggcaggaaatccacgcggattcacaaaggcgtgtgggttagtatgtactccgtactagctagcctgtacactaggatcacgcacgcacgcacgcacgcacgcacgcacgcacgccggccggcctttgttgttgttgttcctgcgccctgggcagtcaatggatggggtgtggcacgcgcgtcgtgcaaccgcggcaacatcccgtgactcgcgtgtcggtgtcagtagttaacgattggggctatttgattcaatgcttcaatttgacacaactccttaggcttgtgtttggtttattgtcatagttatagcaagccacactttctcaccgtcctaccccacatgtcataaactcaattctttgcctaactttgccacacgtgtggcttacaatttgtaggaaaaaaaaacgtgataagtcacatttgtctaacattgtctaaagtgatttatatcaatgttagttaagaaccaaacagcccctaactcctgtgactgtgtgactgcaacttgcgtttgcacgccgcgtaccatgtccgtatataggagtactgtactacacaggttgtgctcgccgctgctgccaatacagctagtagtagtagtagtagtacagtactgtacgtcaatgcccgtcatgggcgctcctgcacccagcagctagctgggtcgcgtggcttgcgtgcctctcaaacacgtacgatcgcgtgttcgtgtgcaccgtggaatggctcgcggggctgcatctgtagttgtagtaggctattttgtagtaattttggaagaaaaccaacatcagctctagcctcatgttttctctttaagtcttgaagtttgtatggttttccagtagtgttgccaaacggtatttgttgcaaatgtctgtggttaaaattcctttaggattcaacgaggcattattcccgcatttttactattcttgtttttctgaatcccatattccaaagaagcccttaacgggtattaactattgccatccaatttctatcctgaattatggtgcatacgaaattacaaaatcggatggtacatacatgtccaaatttctcatatacaatttttgttctaaaatataagcatatgttgcatatcttaactaattaagagattcgtattttttctttcgtcacctcgtccgtgcggtgattttcgctcgccctcctccccaacaaaaaaaaaccagtcggaattccatcatacaaataaaactgaagcgtatgaatcgaagacaaggacacaagaagaaaaacgataccggaaggagagggtgccgctgtcgccgccgaaccgccgccgccgtcgaagggacgctggttcgccgcggctcccctcctgctggatccgattgaggggaggctgggccgttatcgcctcacgtcccctcccctcctgctagatccgggatgccgggtctaggccgccgggccgccgccgcctcccctcccactagattcggcggaggggagggtgccaccgccgctgggccgcagcggaggggagggcgccgcgcggaagacgatggggaggggcactgcgcggaagacgacagggaggggcgccggggcaaggccgcttgatggcggcgcactcaccctcgggcaagtgcgcacaccggggaggaggcatgcgccagtgccgctgcttttctcttttcgggcgagggggcgaggaggctagggttttcaccggcgccgggagggatggggttttgtcccttcaacgtcggcaccggtcgtccgatcaaaaccctaagatcagacggccggcactggccgaaccgaattcggcccaagtagaggcgcgcgcggggaggcttccccagcccaggcccaggttgcggcccagggaggtggggagctcccgcatgtgtacataagaggccgtgggccgaccagccagtccgggagaaagtctgatttagatccctaagcaacatttttttttcaatgtacacactccgtaatcacccggtgcaacgcacaggcacttttgctagtctgaatatactcaagaacaagagtgaatatttatatccctgtaaaaatatatcaggaaattaatactattttctcacaaacagaacatatcacactgcactgaacagccagagcactcatagtactaaaaacatgcatacacaagatagcgagcaatataatggtatcacaatttcctggatcgagagggggcttcaattaggccgtgtagacgccgatggaatcgagcaattctccagagcggccgaagaagccgacgacgcggccgctggcggtgaacgacgtgccctccgcgcggccgaacgggccgtacgccctcaggttggtggccaccctcagcgacatcaccaccacgttgctgttgtacgcgccgtacgtcccggacacttccatcacgtactccgatagccccagctggatctgcatcgtcgtcacagtacacgatcgacacaattgtgaacggcacgaacattattttgttggacatggatgcatcatgttcaaaatctagtatatatataaaccacagtggaacccgaattaatatttcaccttgggtgtgcaattaatgatattcaaactctacatgaaccactgttgcttcctctggggagaagtataaggaattagggagtattttcaataccaatataattgatgcatattgtagaaaaaatagtgttaaggtatttctagaaaaaaatattatagaaaaatatgaagtagaatgctttatgcacggaaaattgacatataattcaaaagggcattcttaattatgttatatttccatgttaaaaaaaattcatatactcaccgtggttgtatcgcctccactgctactgccccatgggccaacagagcgctactgaccagtttggtcagtgtaagaaaaggacatggagtcaattgtccagccgtgacggattgttatgctttctaaacgctggggtgcaatagggatgtcgtgaggagtgcctccagttccaccccatggtccaaccttagtgggatggctttgctgaaatggattgaaagagttacttttgctttacctattcatgatgcaaatgaaatatactttttttgcacggtatgtctaaaagaagatatttctcttactcctatggtcataaatactcggacagctcttgaaaaagaaatgttggtgactgaactaattgcaaaatacatgtaatgcttaacaatttacaagtttgtgttaaattgctctttaagccaaatctagtacatgattttccaaaataccatttgaaggatatcgatgcttaaaacttatagaagtatgacaaaaaacattgtccaaaattatgagcattatttgtgactacatcagaatgagtagatggtagcaatcagagttctaaggccaaacaaaccacacggagaatagcattctttcagataacgggtaaacttccattaatacttactccctctgtttcaggttataagatgttttaaagtcaaaattgctttaagtttaactaagtttgtagaaaaaagcagtaacattttcaacccaagacaaatttactatgtaaatatattcaattatttatttgatgaaactaatttagtattataaatattactatatatttatctataaacttagttaaatttgaaatagtttaactttgatcaaagtcaaaacgtcttataatctgattataatctgaaagggagggattaaaaactaatgaaacagaggaaaaacttggtcaaaatttttgttcaactcacattgtacgtgggcatggggtactgctgggatggtcccattggcagagtctgagagcctctaggcacagggcagaatccatggattgtaatctctatgatgttgccatcgtttctccgttggtgcaccctcttctggatcacacctcctgccatggcgaactgaccggtcccaccaacaattccccattcaccgttttcgacagacacttgtcgacgtttgatgtctcgactacggtatttagacagtatggggatcgttggtgctaggatatatgcgagactgaggtaaaagagatggagacagggatttttatacaggttcgggcccctgagtagtcaggtaataaccctacatcctgttggccgaagccggtattgctcttattcaccataatcataccagtacaatatgtgggtagcctatctaactgttgtcgacatgtcggtctgaaggtctgactcgtagtcgacaacagggtagtcttcctcctcgaattcgtgcccggcgagatcagagatagcgctttcgtatctcctgacagtatccggaggcaccgtaggagaatagccatgcctatccctgaagtcgatatccggcggcgtgtcttggcgtatgtaggcttctatgttgtggcttctatgtcgattgtgttgggtgttgatcctgttgattgtctccttgtgggtgtccccctgtcctcctaggggggcttgtatttatacccataggtgtttccttgtccaagtagaactagggaaaccaatatggatacaatccgagtagtccttgtcatttccatgtagaactctggttctctttccttatccgaaactccctccatatctgaagtcggtttccgtataggacatggtatgtggtgggtcctgccgagatttagtcaactactattaggtatgtggtatccataaccataacaacactcccatcaccaaaagcgtggatcccctaaacctaagtacaacacaaataaacatgtcaattttttaattaaaacatgccctttcagctatatattattctaggcgtatcgttcttcggtgctcaagtgctatcttcgtcccgaaataaatttattttcatacatcctgcacataccaatataaaccacaaaaaaaactagaatacctctactttatcaaatctcaatgcaactatttctcactccatctactctcaatataattatatcatactttcataaactatgtttcaatgattactcaaaaacaaacttattttaagacaaatggaaggggctaaaagtaaatttaatttggaatagaggaagtactttaacaatgtgacgaatataactgatatgtaaatacaatgtaaatagggtgtaactactacgtaagtactaactaaagtgttatgtaattattgcataatggatataactttagttttggcaagggaagaaaaaatggtgccatgctcaattggtttggtgctatcactacaacttagaagattagaagaccagggtttcgatccctgccaccgtgctttgtacattttttctgctactacgcactagcacagatatcaaagtacatcctatggccaaaaaatcgactaattttcataaaaaactgatgacatatttatagcaaatccgattttatttttatatttgtttaaattgaaacgtgtcttacaataaagttatactgcctcttttcttaaatagatattgccctaaaacgtatatatagtcaaaccttgaagtcttaaataattaattaatataaaaatattatgatttgatatgagaaaacgatatcggtgtatttgttataaaaagtacattcatatggttatcatatctttctagcttttataaacatgtattccctccgttttatatcataagactttctagcattgtctatatttatgtatatgttaataaatctagacatatatagaatttcgaggaagtagtaaaaaaaaagatggtgatataatacatgtactgcgagacggtttcaatgcccaaaacgacaagtaaagaaaacacggagggaattgaagcacgggtacctttggtcctcgaagacgatggtgaaggagttgtgccagtcaccggcgtagacgtggagtccccgcgcgcgggcgacgagggagccgaggccgtcgtagatgggccagttgttgacggtggtggcgccgagccccgtggcggcgtcggcggcgagcatcaccgactgcgtcgggttgggccccaggtagagatggtgcaagtagaggttgcggaagttgagctcgttgtactgctccaccagcgccccgcacggcgtcacctgcaggctactgcctgtaattgggtacccagagctaggagggtaagccatgtctcagcaatagctgaacttagctagcttcagacttcagagatcgattgtatgtgtgttataatgttaatatgttgtgtgtgcctttgctatcgctagacagtagacagagaagaggtgcaggattgtagctagctagctgctgggagaatgtggagctggctggagtagtggtctccatctccagggcatatatatcccatatatatttgggcatacatgggtgtgtgtatcacgagtgtggctggccacatcctccatatcgatcgtcgtcctagcttgatcaaaacattggatagcattgttgattgttgaaaggtcgatgcggccatagcttgtgtgtgagaaacgtattgtatgtatctaattcatttggtggttgttctacaattcgcgtacgtgttcctttcaatcggattgaaagttgatgttctcacttaagaatgtacatactgtaaattttcatgattaatatgctaataatgagatatttgagagagaaccatgcaagtttctatggttaattgtgttagaatggaaaattggctttgtgttagttaatatgattgttgtgaggggaatatgattgtttttgttggcgaaaacaatgaaaaatgcttaggggtcttttggttagctccataagatggtgagttagctggcctagctaggttcaatttttttttaagaggggggtattgtattcaatatgcttctgcagtgataatggtcctctatcataatgatcatcttccattcaataatttgcccacaatgtaatgttatccacaaatttatttagacaaacattgaacttgatagcaatgccatgcctgttagaccaaacacagctatctccatcagtcttccaatcaagcacgtgaggtggatcatggccaagttcagcaactgtcctattaaacacaacaaaatatatatttgattcaaaattatgatttgactgaacctgcatcaacaaaatttaaaattaattgttcatccccggtacctatgccgtattggtgtcatccggatgatctgtcaagcgttgacgttcagttcaattcagaggattccgattcattctatgctgaattattctccatatcttatctggcaaacctgtttaacgtcgagaggccttgtttctcaagttatgaagtcatatgacgaattcacgatgacttttgtctagttaatgttacatatactgcgcttgatttcacaagattgtcgccatgctctagggcctattttgggagctttagattctgagaagcagctgtttggtagccagcttctgatattctggaaaaactctgaaaaccagctgtttggtagctaacttctgatattttggaaaaactctgaaacccagcttctatagcttctgacttcttagttcatttttcagaatctgtaactacagatgaaacccagcttctgacttcttagttcatttttactacagatgaaacccagcttctacagcttctgacttcttagttcatttttcagaatctgtaactacagatgaaacctagcttctacagcttctgacttcttagttcatttttcagaatctgtaactacagatgaaacctagcttctacagcttctgacttcttagttcatttttcagaatctgtaactacagattcacagcttctgacttcttagttcatttttcagaatctataactatagattctcagaagctgtggactatttggggcagcttttaagaagctgtgaattgtttggggcagcttctagcagaagcagcttttgggaaaagctgcagttgggacaacctcccccaaacatggccctagtgtctttggaagccagagatctgagccctaaatattcttcatccgacggcaacggcgtgtcattcttggtccggcagccctatctatgcagctcagcaacgcaccacggcttgctattaatccaactctaatgcaaattaacaccaccaggatttggaagtcacaaccagtgacccaatctcttgcattcaaacatgttaaaaatgttatcaaatgatcaaatgaaaacatagatgataatttacatgtgtacatcctaaatagaacctaaatcggcacgtttagccgatttaggatcgcctgtgccaatacatggcacagcagtaagcatctgataaattcttgcttctggtcctgaagcaaccacatgttactgggatccgttcttcttcatcctcagaaagctaactaatgtgagcctggagggagcaccggttcccggtctcctcttaattgttgtcgtcttccacagctttccatctctcatggtagtcgtggttgtagatgatacgttatagaactgcatacagacaagttgtgactggaacttaaaatgtttggatgaagatttaagttctcaagaattgttgagaaaatatttacctcacatacaccatgcagaagcaacctctgaaacggatcctggacattcagtacaagcacatctttaccactagcatcttcaatgaaggccctaattcggtcctgcaaatgtgaaaagcagattcaccaatatcaaataactaaggcttcttaagtactttatgtaaagaaactcaaacacaatcatattgtaattgttaacttgcacttgcattcacgtcgcacgtgagtgtatacatcaaaagtttcacaagactgataaatgttggcaaaataagcactcaaccatctcatttctgagaataataacacatttcacagtagcaataacagacaatcaggtcaccatgtttaagcctgaagcctgagcaacaggactgcttccttttcattaagaagataactatacagtaccattccaaattgcagagacagatgcaagagcgaacagaacatcatctaaaaagcttaggtacccgcactgttacttgtaagccagctattagggctagcaatgccaggagagattttctcagaccctcaaaagtgtaaatcatgttgtaaaggaatatttctagatgtatgtttagatggtccttaccttaccatgagttgtacagaaaaatcttttaaaccaaaatggttaatggtgtaataagataggtgatgatctcagaccctcaaaagtgtaaatcatgttgtaaaggaatattatagatgcatgtttaggtggtccttaccttaccaggagttgtacagaaaaatcttttaaaccaaaatggttaatggtgtaataagataggtgatgatctcagaccctcaaaagtgtaaatcatgttgtaaaggaatattatagatgcatgtttagatggtcctttaccttaccaggagttctatagaaaaaaaattaagccaaaatggttaattgtgtaataagataggtgctgatctaagaccctcaaaagtttaaatcatgttgtaaaggaatattctagatgttagatgtatgtttatatggtccttaccatgagttctacagaaaaatcttttaagccaaaatggttaatggtgtaataagataggtgtgtaatgcaattccacgctacaaccaaaaacactgtaaggatccctaaattgcacctaattgtttgttcgaacttgctcataaaaaaggtgtttgatcttttaaaactacaaaatcagaaagatgcatcaagtagtaaaacaactcccaactaaacaaatctagtaaccattgtggcaaacagaaatacaaaaagtatggcaattggtttaaagagtacaatcaaagagaaagaaaggcatacctcatatatgtcaagcagatctgggaggaaatttctctttatggcttctcttgtttggcgatctatacgatgccaagcattgagagcaatcaattcatcgctgtccacatgattcttctgttttgtagaagattgtttcatctgttgcatcaatcgtgcctacagataaaaagcacagtaagcaaaatggatccctaaaaagttcacatggtatctagatgataggcccttttttctaattacacggtcggtttgatatattattgtcaactcaaggtggacaacacagattactgacgcactagcatacctcaacgtccatgtcaatactcctgaaggcatcccattcaccatcacttgtcctacaaaatgcagaaacgggcagttcctcacctacatgtagaatatagataagtataacatacaaaaaagatgtggaacatctctgtaataatacatcgaaaatactaatttccctgcagtaaacagtcagcacaattaaagtgcacaactgaacataagcacttggaaggaaaaaaagtgtgacaatcagggaaactggatagcatacatccttcctgtaaatctatatatttttaattaatgacacacagttaacatgcacatgcagtaaggaaaataatattgtttctcattctcaatgtgaacacatcgtaaagagtatgcataacatggctcacatcttctagagaacttactactccctacacaaatctgaacattcaatggccagactgtaagacctgcaatatggagttagaaaatgtgagcagcactggagcttaccccatggtggaggagcaaaaaggcctttgatttcttcaacatgaagacgggggacaagttcaatgagcaagcgatcattcaaccacctacgagatctccggttactaacctgtgtaacattacaatctgtaaaccatcaacctgcatattcctaatgtcaaatataacaacatactgtatcaaatataacagattatttttagctgctattccgtagatcactatccatttctttgcaacagggatgaaaccataatttcatttaatcataagctaacaacccaccttcatttagctgcaaaggaacaagctaacagttttttttattctagcaggatgagccgtctcaccttggtggccatgtcctcaagaacttcaatcttcctctcaatcatctgcccacgcgacttgacggcatcgccgcctaagttcacaaaccaaagggcgcccagtgtgaaaaaaaaaagaaaaaagaaaaaaaaactcacttgcattaggagacacctcggggggcaatttcgaaggtaaaaggagagtcacctttgggggagtcgaacaaggaggcgtagaactcctcctccctcctcagcagatccgccatggtggactcccttcccgcgggcttgtcgcgctccccctcctcggcctcgaagctcgaagtgctgcggcgatggaggatttgagagggagtagaattgcggggtggatggattgcgcgtcgtggtgtttctagggctaaaatatggtggggcgattgattggggaatcgtgttcgagagaagcgatgcgcacgcagagtagtggtgaggaatatgcggatacgtggcaccggatacccgtgggctgatattagcaattgggcctaaacagcaaagcccaattaccagaaacagcaaagtccaggtttgcttcccattcatgggcctcatggctgctcatggccagtgttctagataatttttaggaaagtctatacgtagcttgtcttacttaaacttttattactaacaccatgtgttacactgtgagtacatctcgattttttattatttctatctacttacaaatggttgagcttattgtttgtaaaagttttgtaaaagaaatttagtacgtgtagcagtgctctaatttttataagtaggtgaaagcccgcgtattgctgcgggaatttagtatgtttgtgaattatgtgaattattatgtgatatacattgaaacattatgtgaattatgttggatgataatttaatatgtttgtgtttgaaaagctcttaaattataaaaactataaagatatagcatgtttgcatgatgtttaaatgtgatgattgttagtggatgatgatgtggtatcttgttaattagtggatgatgatgtagcatctttgcatgaagatatacattgaaacattatgtgaattatgttggatgataatttaacatgtttgtatttcaaaagctcttaaattataaaaaatataaagatataacatgtttgcatgatgtttaaatgtgatgattgttagtggataataatgtgacatcttgttaattagtggatgatgatgtggcatctatgcatgttaagcttaagataaaattttcaccttcctatcaacagaagacgaccaggcaaagttggcatcacaagtttcttagtagtattttcttttttttagcaagagaggagatcctctcctgttcccattagcagaaacgatacaatatcccattggagttggacacaaccaaagcaccattctgttgtactccgttttcctgtgatgatgccatggcaatgtcacgaggggaaaaaaaattcaacaaaaagcatccaatcccttgtaaatacttttacttctacttcatataatgaaattggcccggtcttatgtcggtgcgttaaaaaaaaaagaaagcatccaatccacataccaacgcaacaaaagcaaacaccgccggccgcagccgcaccgcacgacacgacgagacgtgagggccggcgcacacgacgcaagcagcacgaacggataagataaaaattgccctcaaaaagaaaaacggataagataaaacagataaatatactatgcgtgccaccaaacaggcaaacaaaaaaaaaactacaaaaagcacaggagatttctatgggattcgtctagaaagctacgattcctagttcctacccttcccggtaacttatttatcctcccaaatcctctccaaattcaaacccaccatttccttttctttaaaaaaaaactttacttaaacgctagtagtacacttccactagtgaaaaaaagacgaggagtcggagtcccccacgcttcgtcctctgcttcccacgcgccacaaatttcttcgccttcttcccacgcaacgcctcgccggagaaacaggagacgagtagtagacgactagtgcgagccaagggcatggcgcggcagcagcagcagcgggaggaggagagggccccaatgggcgcggcccagcggcggctgcgcgccgtctccggccacctccagccgccgacggagtccggcggcgttgacctcgccgccaaccccaccgccggcgagtacgcgcacggtacgtacgatcgatcgatcgatcgtctattcgtctgcactactacttgctacttactagtgatgtggtatgcatttgtgattttatccatcccgtgcatgattgatgccgcgatttggatcttggggttggattgcgtggggcctactgggcgcgcgcaccgctcgagcgtaaagtggataaagtggagaataacaagtgcaaccactcccaaattcccaattcttaagctgtagagatagcttcctctttctgaatttgtgcttagactgggcatctatgccataattccattgctgagctcggtaaccgtctaaaataattgcttagctccgagctcgttagcttttaactgactgggatgcttcttttcctattttttagtacgccgacgcatgctagttgcggtttctcaactgcactctgcatgttttaagttatctttcttgacatagcaatgctttttttttttaaagtttacaactcaatgtgcatagcttctccagtgcagggctacagtgctgtactccctgagaagttgcaaactggaaagtggaatgtgtacaggtaggttatttagtagtatatgttatactgcatttgcttatgtcatggctcaaaatttctgtttccatcttgcagatccgcaaagtcacctcttaagttaataaatagattccctgataacccagacattggaacgcttcatgataactttgtgtaagaatcctcatagtctgacttgagcatcaaacttctatttctgaatgttaatctcaacttcgacaaatctcagttatttaccaatgttatgctacgatttatcaaattcttgtcttgaattgtcagcaaacctttgagtgtaattacataccatcaagcaaaataaatgctagttatgttttccttaggaatctcccatattttttgtttctgaattgtatcaggaagatttttaggaaaatctaatctaattaggaaaaagaattattcgcaagtgagtctgttattttattgaaaccttggagttggaaaatgtttgtatgcaacgacttgaatgcaaaggtttttatctgatgtttttatgaaaactggtaaacttaaatgcctgttgcaggctacatgttttacaagagaactattagtgttcaaatttaagttctgtgataagttctcaggcaatatacccaaaattgtgcaggtatgcagttgaaacctttagggactgtagatacctgggcacaagagtctgtgttgatggaacagttggggagtaagaattggttcctggatatatatgtcattattgccttttgtagctttgttaaaatcttttaaatgatatatatgaattgttgcagctacaaatggatgacatatggagaagctagtacaagccggactgcgataggttctggtcttatttaccatggaatacctgaagtgagtcattatgatctcaacaagcaccgtccttctgattttaactactaacaggcagatcttgtcacacattgccataatgatatagcatttgtggttacacttacagattcctttttttaaacttgcattaaataattttctaaaactgaaccagggtgcgcgcattggtttgtattttataaacagacctgagtggaccatagttgatcatgcctgtgcggcatattcatatgtatccgtgccactttatgatactctaggtatgcactcatcacataatgatcatctatctccttttcatttatctagcaacaagttttatgtattgtttatacaggtccagatgcagttcagttcattgttaaccatgcgacagtacaagctattttctgtgtgcctcaaacactaagcactgtgagctttaacccttatctcaaccttgtatagttactagtctatacaatcattaaaagtcgcagttttcatgtcactgctcatactggtccttaacttagtgatgctgggaactagctagttatttccaggaaacagatctgtgctttcaggtgctgatctcatcctgcagaaactgcatgcacatcaaatactgtttttttgggaccatatccacatgcacacaaccaatgggctgagtgctgggctggggcctgatcatgaaatacattctatgtggattctgatcctatttccattttcttatttcaaacactacatcaattttggtaacactgcctagcatttaatcttgaattttatcatggtatattctatggaacgaagtgtacttatgttctgcttatgtgtaactatttattgcagctactaagctttataactcaaatgccgtgtgttcgccttatagtggtaagttcaaaccatttatagttagtatattcaatgaacggccatgattgtttaagattctctctttttctttttttttaaaaaaaacttgtttaatataggtaattggtggagacaatgcaaatatgccatctaccccaacagctactggagtggaaattataacttactccagactacttagccaggtgagtttgctaaatggcccttaagtttactaacactacttcttgcttatggtatttgttctctttttcataaaaaaaaagtatctgttatctaatgtcagtcaaccaactggcatttaaacttgttaaaaaaacactttacatgcatacctgtagtccttgagaaccacatatctagttccaaagttgtatgggcatatggttcaatatttatatgaaatctcttgggatacgaattacttggctgcactcttgcactgattaatttagtactgtttccaaaagatttatccatggcaaacaaagttgatgtgacatcttgtttccacttccattagaaaacacgtttgttatgcaattatatttatgtatgtatgagacacgttgatattttggggtgaaaactgggaacatgaatattggatatccagttgacagctgtaatgcacgtatgcatacgttagctctctaattccatttcatattttcatgtatagtaaacttgaaagctaaatgacaatcttacataataacaaattgtagggctaccacatggagtaaacattacataataacaaattgtagggctaccacatggagtaaacatctttttttcctttcaaattgttataaaaccggccccgaaatcacatcggaaaccaatccgcggaagaaaacgccataggagatccaaacacgatgatgacaccgaggcatgatatttgataacggagttcagccgaggcctacatctccggggcactgattacgggtgctcctccccgatctagcatatacagcgtatcagagttacaacgactcacggccggtagccgccggcagccgctccctctcgctatgctaagtcgccatgcggttacaacaggcacgccctctatttatgagagatcctaggatagagtccgactcatactctagtcctaatacctattacaactccaagtcctaaactgtaaccgactacgtatacatattcgacacaaactctaacacaaatcatagttttgtctatgtgctatagcagtgtgcggtgtgcacacttgctcaattcttttcttatggacacacatagtatgtgcatggtggatatatattgccttagttttagttttgcatcaacggcctgcgaaataaaaagtatgtgtgtatctatttccagccatatacattatctttgctgttagattaaaggatgctagcacattttgctcactgttcttctgatctttcaatcttcaactcagggaaagatgagttctcaatcttttcgccctccaaaacctgaagatattgccactatttgttacactagtggcactactggcacaccgaaggtaaataactcatctttctgattatttttagtttcattcaaagagctcttctaattcaaccttccaatctgtgacgatgtcatatttatttcagggagttgttctttctcatgggaatttaattgcaaatgtagcaggatcaagcctagtcattaagttttacccatctgatgtgtgagtttacattaaatctagatttgtttctttctgccatagcttaataaatttatcccatctggtaatgttttgaattataatcatgttggtatgtctttgcaggtatatctcatatctacctttagctcacatctatgagagagttaaccaggtctcagtggttcactatggtgttgccattggtttctaccaaggggtatgcagatccaaaaccatttaggttgttaattttgtagttatttgcatttgctgtttgtgtaaataataaaaccagtagaataatggggtttctgagttctgacctagcaaaggtaaatatgaataaccggggacaaatgaattaaaccactcggaaaagtaatttctaatgttagttctgccacaagttacccctagatataggagcagaattgaatcacctagtgcaatatttcaaactgttatatgacaatcattcagaggttaattgaacacaacagatgcattttatgctggacctttcacctacaaggctacaagataatattctgataatcccattgtactatttgttatggcctcatcatcttaatggatgcattatgttggctcatgctagttcacttcagctctatgttgctcatcatcatcctttcctcaccatcgtaccatcatattgtaaacctattgctggatttccttgcacacagcaagcaattagatccatatagggttatatcttatgtgtttgccagtagcaataactttgttcaacacttgacaaatatgcatttagatcaaatatccatcttacttactacatggattctttgccataataatcgtttacattcaatggattctttgccatatatctgatgtgtatattgttgttgtttctaggataatttgaagctgatggatgatctggctgcattgagaccaacagtatttcctagtgtgcctcggctatataatagaatttatgctgcgtaatccaactacacccgtaacttagatactttcatgttgggaaaaactatttctagtcatatcctttttgaggttagcattttttccccttttcagtacagctaagtggttagttgtttatcattttgtagaattacaaatgctgtcaaggagtctggagggttgaaagaaagattgtttcatgctgcatacaatgctaagaggcaagcgattattaatggtaagaacagctcattgatattaagtgtcttagttttgcaatgacttctcatttaaaaacagttcctacatgctttctgtgacttatgtcatatcccatttttttgggaaaattggaaccatgccacttttttatccactacatctacatgtatgaaatgttaattctacattttgggttattagggagaaatccgtccccaatgtgggacaggttggtatttaacaaaataaaagctaggcttggtggacgtgtgaggcttatgacttcaggcgcttctccattgtcagctgatgtaatggaattcctaagaatgtaagctgtcttcatatatgcccttggggtagcacgattattatttagaacttggattaactaatatactactgttttaattttttaacagatgttttggtggtgaagtactcgaaggatatggaatgacagagacatcatgtatcatctctgcaatgaatattggtgataggttaattggtcatgtcggatctccaaatccatcttgtggtaagatctgtgtttgggtttaactagacttggttggataaataacttgtccttttgttcacagtaattcctcactgttattgtttttgtacattatcacttctcacactcttccataacgcaaattctgtttctatttttcagagattaaactagtggatgtcccagaaatgaattacacctctgaggatgaaccatatcctcgtggagaaatctgtgttaggggacctacgatattctgtggttactataaagacgaaatccaaacgtaatttgctatatatttctatcttctactatttaaattcataaatatttgatgagtttcagcaattaaatttgaaaacctgcagtagagaggctgttgacgaggatggttggttacacactggagacataggtttgtggatgcctggagggcgtctaaaaattatagataggtaaaactgaatgatctagtgtttcatgtttaagaatttccttttgaattgagatggccttgtgcctttgtttcattatatagagaaaaaatgtatatctgatcaatctacacttttaccttcgctgcagtttcgtaatgatacctaaattagtcagttgctaaattaaattgttaagatgcatacttgaaatcttaagttagcttgtactattttcttctcagtgtattgtttgttagctgagatttgcatggttggtgataaaactctaatatgtgaaagttcaatgctatttggtctaacttgtagaatttgctgtcatttgtaattttgaatacataccatattactaagatggtagggatatctaataacaacttggtaagttcaaaactactgtgctaaaagactaaagtgaaagcaagatgttaaaccttcttagctattgatcaaagagcaaaccaaaactatcttacccactgttattgtagcagacagcacatggtagccttcaactaggaaggttgtaacacatggatgtttttgagaaatgaccacaaccctattgtgaaatacttttgtctctaattacttattatcctctttccacacattttcttaggtaatttaagcccctggaactgtatttgatctgattagttttcttattaaataaattattaattgattgtgttttaatggtctcaaggaaaaagaacattttcaagttagctcaaggagaatacatagctcccgagaagattgagaatgtctatgctaagtgcaagtttattgcgcagtcctttatatatggtaatattcatgtccttatactggttataactaccaataatttgccatatatgttctaagctgttgattcggatgcaggtgatagtttaaactcttctttggttgccgtagtagcagttgaaccagatgtgttgaaggcttgggctgcatctgagggaatccaggtaaatatgctgaccttagagagtagatattctgcaactgcacaactggtttctccaaactagcggaacattatattcttcttgcacctctttgccagttcactacacaaattatgtctctctttgtcaaaaaaaaataaataaataaaaacagaacacccacaaataaaactccttacatcttcgttggctacttatgttatgtcctttctaacctgtagcacgaggatttaagacagctttgtgctgatccgaaagcaagatctgctgtcctggctgagatggactctattggaaaggaagcacaggtttacttctcacttctcataaccttgcatgctcttaataagttatgaatcatgtgtatgattcccttattaatctctctttccttgctgcaccagctaagaggttttgaatttgccaaagctgttacccttgttgctgaacctttcacattagaaaatggtctcctcaccccaactttcaaggtaggcccgttaatacaagttggaggagatttctacaccaggtactaattctctatctcaatgacttttgcaggtcaaaagaccgcaagctaaggcatactttgcaaaagaaatcgcagatatgtatgcacaactgcgccaagcagaacagataaaacctaagctgtaactacccgagtgacaatcggagtaaaagttctagcaacaaactacaaatgactggcttggtatagtgaaggcaactgtgaatgaactctgttggatatgtccacgaatgcttgataatcatctaataggatgatcaggtaaaagaatagcctgttttatgtacatctgtaagatgaaatgaaaaaagatgtagacatgttaaatgtcatatatatgaatccattgaatttcacctgactatcataggaatataaggtaaaactttccctcttaatcctgctgtgaggcattctgccaaccacttgccaagcaatattcatatggaatggatctattgaatttcacctgactatcatatcaatagaaactatggaattgtttccctcttatattacatgtcttgatccttctgtgagaccgaggcattttgtcaggcaatatacttgcacagctgttatattagagcaggtttctctggatgaaggcacatttcgcatgaaagcaaataatcgacagctgtttattggttagcgtggagctaaccatcacgcatcctcctgcgcagacgtggtgtttcatagactgttataccaaagctttaaactgatagtggtctgttattctttctgccatatttttttttaaaaaatatattcactttccaattgtacaggtcactgaaattattgttagtttaaaatgcaatggtaccttttattcccctctcaagaactaaacatgtctgcaataataaattaacattattcacctcccgattttatatgtcaattcaaattatggttagtttaagatgaaataccttatacaggtgccctttcatggacacaacaagactaaaataaattagtaaacaaatatcattgctaatcagtttggttaggggaagacgctacttagattcagtactagatttagatagttgttcacgggaaaaaaaaacaaaaaacaaaaaacaaaacaaaagtagaagataaacaggatgatcccttctcacaaataacaacaaagttcatacaaaaatttaaagttagaagataaacgagacggccatttctctactactgtaaaaacgaaattctccctccctatcatcttacttcccttgacgtcattagataaaaacgaaccgttggatgataactgtggcaaattattcactgttggattgcatatatgttatttaaggctctagatatgtggaaagtagtactgtattagttcagtcaacatgcatgtaaaaaattaaataaaaaatggaataatccagaaatttgtggagcccttgggaaggggaacaatccaatatattaatactcaattaatactgaataagggcatgtttagttcacgttaaaattgaaattttagttgaaattggaacgatgtgacggaaaagttagaagtttgtgtgtgtaggaaagtttcgatgtgatggaaaaaattggaagtttgaagaaaaaatttggaagggctaagaaaggagcgtttcagtttcccatgcaactgagtcctctctacacaagcacccagtacggctttagctgaaacctttgcacttccatttcaaccttcacaaatcacaaacaccccaaacccagctttcatcgttttcatcttatccaaattgactgcatctggagacctggtcgaagcttgctgacgtacggcgccggatacaagctccctccgcctctttgaggccatgtaatgaggtactacctcccctccgcttccctctcctccatttcctgcatctcaatctgaggtcgcatccacctgctgcaacgagacggagagcgcttcgctggtattatcatatcatgtttatgtcgtgtttgtgttatctggggaggtcagaattgagatgttgggtttcattttcttattagacaggatatacttttgacagggcggcgcgcctgattttctagtttctctactactgtaaaaacgaaattctccctccccatcatcttacttcccttaacaaacaatagtgtttccatgtgaaaattaacccatcaagaaaacagattagataagactgaacctcataaaaccacgtaccgatcgcttaaaagactctagtgaccattagcactcttcagagcaagaataataatacagccagctgcttacttatagcctatctatcatctcactcatataatggttaactcttcactataaatatatggtctacctatctgtctcacagattttattggttcttgtgcctaagccggctgtaaacttatagctcgcttctcatctctctcctctcctctctcatccacatcagcattcagccttcttatagccctctattatacttgctctcaggacactgcacacccgttggcgttgtgctctcttattctgttggagcccatcttactatgtgtcatcaaagaacggcaattcgtcattaatatgtctcatcaccatcatcacttcccatgcattcttgtataagctcatcacaacctatctcttgatcttccaagacggccggggttgccataaattaatcaatatatagtctattaatccgtcctccaatcctccgaacaaatgcaccaccattatcttaatccaacccattgacagcgagatgtttgtgataacttcatcaatatcaatatcaagatataccggtccactattccaaaggtgtttatagagatagaatgtgcatgtatattcatagggataagtgtgcgtgtattatgagcgtctatatttgtaccgcgtttctaaaaaaaaattatcttgatcgtaccacttatacgaaggatgatcctccatgtttccattttgtagcatattgtctgtttgatactgatgagcataaccctcaatatttccatgtggcaagatatagtcaggatggacagtatatgacgttagtctagatcatctccaaatgcatgcaacgctgctattaatattctcggcttgctggtaatggagattctccgtgtaggctggctgtgtgatcgtcatcaattgatcagcagagtaccgtggctgctggtcctggttgcaccacacggcagggccctgtctgggctgcagcttgcactactagctacgctgtcgtcgttgagctgagaaatgcttggtgtgtttgcatgttgttcttcgtcaaacatcatctgcatataatggggatcaagttgacaaagtgtctccaatatgttattgaatgctcttcctgcccttgggaggtagccgcttcctgccttccttccccttgctcttgcatttgctgccgctcttcgcctcttttccggccttcttttgatcaaccttgtgggtatgcttcaacaccatcggagccaaaatggcatataaacaaaaagtaatttatgaataaaacttggtatatacgtgttgttagcgatctagtttgtagaaaatatagaagtattttcgatacaaaacaaacatacttctaaaatatattcatccagctctgctaggctggatgaaacggcccaatactgctccctcccgcagaaggcccaatagaaagacaagcccaagcagtttccagaaggcccaagtagcccaccgtcgcagccggagcaaccgcactgttcacacacgcaacggcgcaacacaaccacttcgtcgtcttcctctgctgcttccttctcctccaagcccccgctccgctccgacgacctcgccgcctccgcctacaggtgaggaggtttttctccgccgcggcggacgcctccgctcgccgttctcgcttgggtttttgggtgattctggttgggttctcccctgatcgcacatttcgacgcaggtgggcagatggcgccgtccaagcagtacagcgaaggcgggcagctccagctcatggacgccgagaggatcgaggaggaggaggagtgcttcgagtccatcgacaagcgtacgccctccgcctcatctccatcccttcctccccctgtctcgtatcccgcactgcattgcttggcgcgcctgctcgtgtgcgttcgtgtgtgttcgcgtgtgttcgcgcgtgcgagtggcagtgctcgttctgcctcgcctttcaattagtcgctgttcgacttgtagttcgatgcttgattcgcggtgaagtaaacgagatttagcattagtacgtttccactttttttttgttggtttcgattctgcttgcgagcagcgtctggatgctttgtgatgtgcgtgttgggttgcttctagttttccccccaatttcgtgcgttctggacataaattagcctcgtctcgtgacgaatttgttctggaattttcgccgctccacaattgatctctgtttttgggctatttcctgctgatcggtgtgtggatcgccacatcgcttgctatgagaggatcgattagaatttatccccatttttagtcaaatttacacgcgttttgcattaacccgtcaaaatgatcgctggaactcgtcggaattctccaccggctagtttaaacatttgcattttctgcatattagttgaatcagttgtgtgttttggtgcacttggagtgcatttagttgaaccagttgtgtatgggtgcacttggaggtttagggattaagcttgagttcctcttgcactttacgttttctggtggctccctaactctagcgagttcaattttagtaagttgtttggtgtgatcctgacatttgcctgtgtttcatgcttcatttggttcttcctgcaaattattcattgccgtgaattcaaactaatgagcatagttcctgcattactgttcatctctggtgcacttgtctacagtaatctcgcaagggataaactctggagatgtgaagaagctgcaggatgctggtatctacacttgcaatggcctcatgatgcatacaaagaaggttgtgaactcgggatcccaaaccttcatgccatctcctgcttgttccatttctggtttatgacacccatcttctttcgtttgttctatttctttcttacagtatgcttatctgatattgtttcaatatatggattcatcttgtagagcctgacaggaatcaagggattatctgaagcaaaggtagacaagatctgcgaagcagccgaaaaacttctggtgtggttctcttttcattattaaagtctgaaagcttcactgtcaattctgtgtgatacattcttctgaaattgctatatttgtttttctcagagtcagggcttcataacaggaagtgatctccttattaaggtaaggaaataggagctaatctgcatacagcatactagtgtacaggatatggtgttatagcaaactaagtggaaactattccttgcttcatggatgctctagagcttttagttactccagctgtgcacttccctgggctgtttggtttattctttttcttcttttgaagcggaaatctgttgttcgaatcaccactgggagccaggcgcttgacaagctgcttggcggtagcatatatagtcctctgattatgttatgatcagttgttgcattatgttgttctaatctattttcattcttcaaattttcaaggagggattgaaacactttgcatcacagaggcatttggagaatttcggtgcgtagacgttcttgttccttttgattctttttcctggattacaactgcagattggttgtaccaatggaatgtggccatatctgtctaatagatatggtgaaaatctagcttagcaatatgtttagtattctggttgaagttaatttgctaaggctgttgtgctcccatttttatcatttattcatgccagtatatacagtaaattcctaaatatgtttgtattctgctaacactgagaacttaatactcctcatgtgtaaacttcaggcatatacacatcaatattgtctgaaactgttttctttgatgttaatactaaattggttctactaaacattaaatttagctgagataatcttgttttgcgacaaagttgatgtattatagaatgattccttgaattgcagcttggaacaatttggctttgtgtagcacataaataaaacatcttactatttaatgtgaaccagccaaactttgacccttgatgtactttgatttaacgttcatcattcgtcaatttggttccagcttcttagctttgtaatttgtaatctgtcatctttatttttggtcctcagatcagggaagacccagttggctcacactctatgcgtctccgctcaggttcatttccgacacatttttgtcatcaacaccttactaccatagatccaatgaataattttatttattttttgtttgtgaactgcagcttccaatccacatgcatggggggaacgggaaggttgcttacattgatactgagggaacattgtatcttttgaatttactgagtaataactcagctgattcactcaatggatttatttgcatttccatatcgccccaacttgtttccttaatggaattttcagccggcctgaacgaattgtgccgattgctgagagatttgggatggatgccaatgctgttcttgataatgtatggctcttaatttgtctttaccatttcaggcctaacagatgaagctgtatgttatatttccatttatttcttgtttagatcatatatgctcgtgcatacacctatgagcaccagtacaaccttctccttggccttgccgctaagatggctgaagagcctttcaggcttctggtaggcatggctccataacataaaagaacattgataaatttgtgtatctcagttacttatgtggttgttttacctgagtagattgtggattctgtgatcgcactattccgtgtcgatttcagtggcaggggtgaacttgcagagcgccaggtattgtcaatatttgtgttggtagaaacaaaaaaaaatcataaagtagttgaaggcctaaagttatgtactaattactctgaacttgcagcaaaaattggcacagatgctctcccgccttactaaaatagctgaggagttcaatgttgcagtgtacatcaccaaccaaggtgagctttcaggactatcctgtatatcccaagaaagagtaacaccataagggatttcaaattacaagtgtcctccttgtttcagtgattgccgacccaggtggtggaatgttcataactgacctgaaaaaaccagcgggaggccacgtgctggcgcatgcagctaccatccggttgatgctgaggaaaggcaaaggagagcagcgtgtctgcaagatctttgatgcccctaacctgcctgagggagaagctatatccttttgtattatacatatacatgtttaccaaaacttcttgtgcaattggtaacttcggttcagtaggttgctaaaatattgattggtttttctttctttgttcagacttgctcctcaaactcttgtgatttagttaattgcagatgctgttttcggtgactggaagtccaaaagctttgcataacagattattaatggtgtggtgtaaaatagttgcttcccttgaccaataacacgttttccaggtaacatcaggtggaataatggatgcgaaagactgaatgttcattgagggtgcttcctgtcttcaaattattcaggtttctcctagtaaattcctgcataggccatataggtttggtacattgactaaactactactgctactttgccactgtcgaggaaatatgcaacctcatttatccagacgattataccttaaaatgggtatttttctatgcttatgagatcaacagttgtactgaaacaaatacagtattgtcttaagtgaaaaatatataagaggtttacatgatggtaactttccccagaaactaaattctttatacccgcgtgtgcacaatttatacaatctgacttattctgctgtatcagctataaggtccttaattatttgatcaaaccccaaacaattattttttgcggcttatcctgggatttttccttcaaggacgtggtctaatctctctatactccagttcttcagtcccccaatctgcaatcttcagttaaaccacaaaagaatcccagcatgtgcgacaagcattttctcgttagaagagactccagttatcttttagcatgcacttcttcaattggacagaacaaggatcattagcataatcggcatagttgcagctaagctaacaacaaagagagttggaatgaacatgccattgtacttgtagtttgatattcggtagaggagatacataacatgcttccaattgaaaagtactactcgatcttggaatagatcgatagagaaacatgcttctagctttagctttacattgatgggacgataaaacatcgtctcagtctgtacaacacaactcttggaacagacaaatcaccaatctgcctaatgcagaggatatttaggtgaacagaggaacaaaatacagccttttggccggttcatcagctggttgctcctagctccgggcacccaagcttgtcgtcatcctcctgctgtagtgctgtgtgggtagagcgcggcggcagagagggcagatgcagctgagccggagccagtcgaagatgcagcgctggtggaaggtgtgggagcacggcatcatcctcagcttctcctccgccacgaaatcctgcaagcaaacggcgcactcctcctccctcgcgccggccgccgtcacctcacgcaggccttggatggccttgctcagctcgcctgtaggacgcagccgcctcgtcggagatctgtggcgtggggtgattgatctcctcctcgttgccagatgacattgatgaatacacgtcttcggatgatgatacgtaagcttccggcggcggcggcggattttgttccaccctcaggggaagcctccggtcgccaataaccaggtggctatagataagattcccctgctcatcgaagaggggggccattgcgatagtatacttctgtatggatattcatctctccggccaggagcacgacggcggcgacgcgatcgacgacggagatgatgaaacgagtcggcggaaggaagaggaggctgccaaacctccgactcggatcctggtatgatggaggcgcatacaaatgagggggcaccgggcgctgttttagcacttagcgaaagaatgttctttaaaaaaaaacacggtaagattactagatgaaacaatttggtttaacttacacaacaaaacgatttaagtcattgaaacacataaaatccgtgtacatcaaaacaaaccccgtatatatcaagtgaaataattaaacactatctaaaatccaccgtaacatttgattcacacacaaagaaacatcacgagcatattagttgaaacattgcttttgaaccattgaaacatcaacaaagctggtgaggcaaaaatagaaatatggaatactatcgaaatatccattggaacatttgatccaaacataaagaacatcacgagtacactagttgtcgaaacaagatttcggcaatactaaaaggggtggcaattaagctagaaaagtggatgggttatgagacacaaggtttatacaggttcaggtcttctcgatgagaagtaataccctactcctgtctggggattgatctgccgagtgtattattgatcgtatgatctgggagaaaagttacgctcataagagcactcggacccctccttatataggaggaggagccgagattacaacatacaatccatgttctttatggactaggcctttagagataaattacaatcataaccgactagaactatcggatgtttccttgatacacaagttaacattacaaccgagtcctttactacacatattctaaccgcataaagtatcccttataaccagtcagatatctatgccatgtgggtatgtagtacccataatctccacactagcggaaacacacaaaaaacacaaaacctagtctaaactgcatcttcctactctccgatgaacacagggttgctcgcatcggtcttctccaccacccccatcactggatctggagaaggcaggagagggggagggcagcggagatgaggagggagtgctcctgggagagagggggagccggcgagcctcctccaccaccactgccgccgccgccaccaccacctcgtcgggcgtgcgttgtcctccgcgtcggccgccaccacggggacaaagccaccgtcgacgttgaggaagacaaaaagcggcggcggatccgacggagaaggcgacgtaggcgaggtcgtgggggagaggaggtagcgtgggcaagggagctcgtgggagaggaggtggcgccgatgggggagaggaggcgacatgagtgagagaggcacggggagcccgagtgacaaggaatgagacgtgcgggcgcccgatatttttctctcatcaggcgcctgagtataaggatgcagtgcctagggggcactcggactggctgcctgagatcaagatggatggccgggcatgcgcaagcggtcgaaccccacgcctctactggcgattctccgccaccgagctagcagctcgttgagcctggtggcggcgatgccttgccctgttgcccgccgctcatcgagtctgcaggtggaatggaaagggtgacgtaggaacatgtgaatgcaggagtcccacttggggtcgctgatttcatgcccacgtggattgatagacgatctagattattggtttttacgtaatcctagtacaattctgcttgatatttcggcccactctcgtccatgcctagcgtctaaatctaaaagtagaaaaattctcatatcaatcgcataaaacaatgggcaaaattctgatcatcaccttcactgtactcgagtcgacgaccacgacgccaccattagcgcctctgcctgagttttgattctgcccctcccgttgccagtaccaccatgaaccacaaaattgggttccccatccttgtgctctccttggtttgtcccctcgctaccatcgacctgcaggcgattgggctaaaacaagtagacttgtcgggcttggaaggtgatgtgggggaagaggaaatgtggcgaacaataaaagagttgccgggggattgagctcttgcacccgatggttacactggtctcttctttcaaacctgatggggtataatcaaacaagacttgatgagggctttggacaagtttttccaaggaaactttcaaaatttggacatgcttaattcgacaatgattattcttctttctaagaaggaggcgcccggcccttttgaaggactaccacccgatcagtctaattcacagcttctccaagttggctacaaaggttatggtgactagactggcaggctaaatgggagagctcattccttacactcagtccgccttcataagaggacgttcaattcacgagaatttcatgtttgtgaagggcatggcgttgctctgtcacagggggcacaaaccgatggtgttgctcaagcttgacatctccagggcgttcgactcggtatcctggccgtttttgctgaggttgctacagtacaagggtttcggggtgcggtggaggaggtgggtgtgctcgcttctcctgacggtgcacaccacggtggggctgaatggagaggaatgtgaatcaattaagttgatgaggggactacgccagggtgatccgctttcgcctttgctctttgtgctcgtcatggacgtcttgcaagccatggtaaccacagcaatggcttcagggacgttaagagggactggtactgctttgcagtcgtcggccatttcgttgtatgccgatgatgcggtgatcttcctccaaccaacggaacaagacacataggcaatcaaagcgattttggacctgtttagggctgcgacaggtctcaaagtgaacttcaccaagagcactatcaccacgatcagatgctcacaggagcatccgcgctcgtccagtccatcccgtgttgtcagctcgatcagttcccgatcacctacctcggcctcctgctctccctccgacagctaacaaagcaggatgttcagcctttgttagaccgtttgccaagaagttcgtgggctggaaaccaaatttcctctcgacgggtgatcgacttgtcctgattaagttagttctgttagctttactggtgcatcaaggtttaccaaaaatgatcgattatcacgttgccttttcctgaaaaacatttgcccaggagaaacttgtagttcaaactgtttcttcctcaggcctccccttccctccctatccaactccactgcctctgccatcctcttcctcccctccaagttgcattccacctattcacctacctctatcgacaccggccatagagtgcaccaccagcgtcatccgcaaggccatctacgcactacctaaagcccccggtggcgcgatccagtgaagaccaaggtaatactggctgaaggtggtggaggtcggggtggaggcattgtagacgatatgggccgtttggagggcggtgccgggaatggagactagcgtcgtctttgttctgcagtgaacgggggttatggtgactactcggagggcggcgctgggagaggcactgcgtgggatggctaccaattagagcacggcgatagtgccctgaaaggagacctgcagcatctttgcgctgtagtgaacatgggccacttgttgggcgcctccaatagaggtgctaacttcgacgtggattgctcaaggattggttccggcagaggcggctactactcgaagggcggcgctgtgcgcgatggcgaccagttggagtgccgcagcagcgtcctgaaaggagaccaacattggcacgccgcagaagacgggtgccgctcgctgcgagccgccgacggtggaggtgtccagtgtccaagtgctacaatgcccgtagattgcttgttggtcagctcaggtagagaggccatggtttgtgggattatcgggagagcagcgccgacaaaaccggttatggtatacggggaaacactcgaggtagacgctattgggaggggtcatggtcgaggacctcaaggtggcggcggcatggaggggagcccggacatggtgatgtcgtgacgagcacgacgacattgcagtggttttagtggtgttgatgctgggacacattccattggagagtactctgtttcagttaatggagccgatgacgtggccaaccaccaggatgccgtattcagcacatatgggtatgattgttcccatgatttgtatttagttggttgcgctgttatgagtcatggacacacatataggaaagacttctcctcttgttctttaagatagagtttttctacaagcaagaaaagctcagggaattttcagcagtgatggtgctcctgatctcataagtgagattacatatgtttttactgaataatttaggcccggtttcatgtttcgcgttgactcatctatatggagttatgtgattgatcaattaactcattagatgaagattttgtagggaagtgagtctcacaatttgttctaattaaaccttgcctacccaaccaatttggattcctacttgatcaattgtaaggaggtgagtgtcacaattgttctaattaaccttgcctgcccaactaattttggatttcctacttgatcaattgctcaatcctattttgcgtatggatgacttaattaaacatattctcttttcatcaagggggctgtttcggaagctaagattctaataagtagctggttggtagccaggttcgtagccagtttctgaggatcttccggcttctaacttagttcattttctggattctataactacagcttctcataatctagaacaaaagctcgattgtttaggggagtttttgattctgggaaagctgcaacaactataagctccccaaacaagtttcaagattattttagttggggtgaatgaaagaagaagagcgtgacctcttttaaaagacaaaatggatgattttgtttggaatcagtaatatgtatggggctgttcggaataagcagaaggaaaaatttctaattgagcttgtacatatttgttaacaacaaaaacaccccctgctggtaggggatttcaatattataggtaaggagaattacaatagatggagttttatttttaatgctattattgaataacataatttgagagaaattatcatgggtgggatgaatttcacttattgtaagaaccagagtaatatcacgtatgaaaagttggataaggttctagtttcaaatgatttggagtgtaagtgtcccaacggcagaagttagaagtttggagagggtcggctaacacagggcaaaatcctattactcattctggttttaaatttgaactgagttggtttcttagagaagacacagatgaggtagttagtaaggtgtggacagaacatgggactcaggggtagtattgaaagatggcaaggaaagatgaaacacatgaggaaagcacttaagggttggaatttaaattgggaagtgtctacaagaaagagaaaaagaaaattctagagcaattggataagattgacaagtggtatgaaagtaatggtatgaatgcccaaacaagaggaaaaaaagatcttggaggaacaattgagattcacagtaagggaggaaagaattagagagaatcccttatatgccactagaatttgaccagttcccttatatgccactcaaaattggcttctcccttatatgccactacttcaagttttttcacccttttatgccactcccaccactatagtgttagttgactgttagtcaaaggttagtttttttgtaaatgaccaatatgccctctcaactaaaaaatatgtaaacttcaaaaaatcataactaatttattttaaatcctttttgagtgaacaaaattttgtcagaaccagtgaaaaatgctctttatattaaaaatattgttggaaaactgcatgtttcatgcttacattgaaaatttatttgtgatggtaatggctaaaattgcatgtgatgcagaaaaaatcaattttcatatgttgtatccagtagctatattagtactaaaatacctattattggttgtatactaattctcaagggtaaatgcgtctttttacaatgaagttaacggtcaactgacggtgtactgacggcaatggcttaaaagggaggagaaatttgaaccggtggcacaaaagggagaagccaatttaaagtggcatataagggagccggttaatttagagtggcatataagggattctctcaaagaattaagtggtttcaaagaagtaaagaaaaggagattatggagggtgtgatgtgatgatgactactatgatacaaccattgctcacatcatggatcaacaaaaaggcatcatgatcaaatcctccaagtgctggaatccaatttggccacatgctacagtgctgatttcaaacagctgccaagtgtgcatatgtgcccaagaaagaaagaaaaaaagaaagaaagaaggaaaagagaaaatcaattgtatatttgagtttgttttcatatatcagtgtgtgcttgagttgtttctggtgctatcttgtggtaccgtttgtgtctaggctcgtgtttctactacattctagcctaggacaagcacaatacttgactttgaacaattattcaagtttgcattctctgatacaagcatttgctattcctttgctacatatttaagcctacccagggctccacagatttgattgcagtcgtacagctagtgtttgccaaggcatcgatacattcaaccttcattagggtgcttggttgagtcggtgtatgtcaccatctagcttgcattagtaaaaacttgtaagaacctggtaaaaagcttgagtgtgtgtgatatctgagcttctactacctagtagctgataggagcatgcatattcttatgtgtgtttcttgtttgctattaaccatggcagaattgagcaatgggatatgacggagcgtggggctcctcaccgggagaccgcgcaggcccccctttgccggttcggccgggggcgctaagtgaggttcttcgccctcgatctggggaatgttcgcgagagagcaaatgcacaagacacgggcgatgtagacaggttcgggccgctgagaagcgtaataccctactcctgtgttctggtggatctgtgtgtgaaggagttacagagagccggagagcaagagagttcaggctctagaacccctcttcctctttctctcctctacgagctcaggtattctcagagtcgtctgagcgtccccctttcttcggtgggcaaggtcctccttttatatctcaaggggataccacatgcaccacttctacctactcttcttttgggtggggacccaccctatcttgaccaaaacctggctcgcgccttcgcctggaagctaaatcacagcttgtccttgagtgaggcccagcgccgtcactcgcctgacacaggggataaccctgtcattccttcattaatgggcggagatttgcaatggccgctgtccgaatgaccctccgatgggatgagtcatacctacctccactccgccggaagcagatgcaacgtgggagcacggttgtctgccgatgacgtgaccggcgtcagaccagtcacaaaccggtcatttttgtccaccgcgcgtcagtttagcatgccgcacgtctgcccttcttcatacaatgacttccttgccatggttgcgatgaagcctggaatgaatctggccgggactgacataccaactccaggagttagcacgccggctccggctagggacgagtgcctggaggctctcatcattccgacgggacggggcgaggcgtgtgacaggccgcctgttgccacctaacccgcgatctgaccggtccgtgaccggtcacacactgcgaccggtcacggaccggataagcgtgcgctgcgctgcattaaatgcggcgtgtcgtgctcgtccaacccgcaataaatgcggttaggtgagccccgctgtgttcacctaacccatacacgtggcgccaataccacagggggtcggggcgccccagccctcggggccgaaacgggagcggcctgacccctcggggagacagagggaggggtggccacgtcaccctcgggcccgacccccccgagggggtcaggccacgtgggtgaccgcggctgcccaagcctctagtcacgatacccccggtctcatgtcaccgacaggatacgatatggttatgctcaatgtcgacttctccaccttcgacgagatatgacgacttctccacatgattcatatgaggtacttgactataattttgcacgagttgaatctaagttaacattctacgatgggaagtatgattatgttgcttatattgattgggagctagcagtagacaatgaatttaataaatatgatttttttcatgctcaaatgattaaggctgctagtaataagtttacctcttctgctttattttggtggagttatgtgagtaacaaacctgaaacttgggatgaatgcaaaaccttgatgagaaaatattttgtgagttcttattacagatgtacacttctggagaaattagaacatatgaaacaaggtgataaaactgttagagagtatatccatgaatttaaagtttgtagagtaaatttcagattggaccccttttcattaccatagttgcacaatgggcaagggtctatcaacacttttcatatatcaccatctaaccttgccaaaacatagcagtttggaccaggtgtagtggggtactgccttgagctgctaccatggctatttcacccagggtgaaagatgaggtgagcactatgcacaaggggataaacggcatatatcatgctggattagattaaaccaatggctcctatgtgctatgtgttgagaggtcagtggcaactagcaagacgattcgcatggccagacaattgactcaaatagcagccaattttgatgcttacgtgccttgttctgccgctcgtgtgcctgtagctggggctttggcgcagtcaagctgctgtgagaagaacaaagcaaagcaatgcatcaggatcggcagcgccaccgcttatgtagctatgtgtggaatacaagtacccgggtacccaaggagaggcctttgggccgtacggcatagggtgggccaagagccctaggcccatgcgacgtacttgtaaataaaagaaagagatatttccgggataagatataattctcgaggatcatgcatatctttatagatagaatacggagatctagtttcaatcaactacatactttccttgtaaccctccctcctcatcctatataagagggggcaacggtctcgagaggagagggaggtcggatcatctccaagatttcttttttgaccatttttccaccgatacagagaatcaaccacactggacgtagggtattacctcaccttgagggcctgaaccaggacaatcatctgtttcactatctctccttaatctagcgcgccccataaaatatattgccaatcatagaaatcgacagttgacgccccaggtatgggggtgctagatcgtttctttaaggagatagcttcaaccaccgatcgccgggtttgtcgtttcaatttgtttttatggtttgattaatttctaatcatagattgatgcgcgggtatttcttgctttcatgtcccgacgatctggccatccgccgcacgttggaaaaagcagttcgctgccaggacgagatcaacaggttttggccgtactgcaaatcgccgcgaccgcgaagcgaggcgaggcggccttgccgccaaccgcgcaagccgtgggcaatgcacgtctccgcgcaagccgtccatgcagccacgccggatcgtgtctgatatatgggaagccaatcgcaggcggcctggaaacacaagcaagacgtgttgatccagtcacatgcatgcgtggcttaatcaacaatcacacatgcatctatacagcaagcatatacatgcatctgtttgttccatttagactaatcttgccggttgctaatcccgaattaatctgtgattttttgcatgcatgtcgccgacggcttctacgatcggagtatgtaccggcttaagctgtccacaccgagggcacgcacggccgcacgcgggagtgcgagaccaccggccgccagccgccagctgccagcgcacgacatcgcgtgacgtcgcttggttaagcatgatcaggccgtccgtctcgattgtgtgcagctgtgcagtacatgcatgcgatgggccacatgcatgtgaccgatgattatctgggagcaagcaaatactccatgcttttctttgactttgcatctacgtatatacatatgtatttaattcattgatgctgctgcagttgtttcccctttttgttttgcacgcacgctcggggcactacgccgcacattgggaacttcatccattacccggctggcgcggctcgactgtgcccggggcacacctgcgttgtctgggcgctctacaccgacccgccacagactcgagggctttgcatctcccgttgtccgggcactccacgtcgactcaccacagatccgggggcttcgcatcccccatcgaccgtgcactccacgccgactcaccacggacccggggggcttcacatcccctatcgtccgtgcactcctcgccgactcaccacggatccaggggcttcgcctccgtcgtccaggtgcccttcgccgacctcgccacggactcggggggcttaacctccctcgttgtccgggcgctctacaccgacttcgctatggactcgggggcttcgcatcctccgtcgtcctggcactccacgccgacccaccatggactcgagggcttcgcctctcccgtcgtccgggtgccctatgccgacttcatcacggactcaggggcttcgcctccctcgtcatccgggtgcccttcgctgacctcgctacggactcaggggcttcgtctcccccgttgtctaagcgctttacgccgacccgccacggacttgggggctccgccttcctttctacccgggcgttctacgccgaccttaccacgaactcagggacttcgcctcccttgtcgtccgggtgttcttcgctgacccgctacgggctagggggcttcgcctccctcgttgtccaggagctctgcaccgactctgccacgggtttgggggcttcgcctccctcgttgtccgggcgctctgcaccgacccgccacagactcaggggcttcgccccctcgttgtccgggcgctctgcaccgactccgccacgggctcgggggcttcgcctccctcgttgtctgggcactctacgcggactttgccacgtactcgggggcttcgcctacctcgttgttcaggtgcacttcgccgaccttgccacgaacttgggggcttcgcctcactcatcgtccgggtgctctttgccgacttcaccacaggctcaggggcttgacacccctcattgcctgggtactactcgccgacaccgggtgacaagctcctcgcgcaggacggctacttagtcgctgactgaagacttgcaccgagccgaccgcatacaccgctgtcgggtgatccgctccgcgcgcaggacggctactgcgttttcgaacgaaggcttgcacctccaagccgaccgcatacgccgccgccgggtgatctgctccccgcgcaggacgactactgtgttatcgactggaggcttgcaccttcgggccgaccgcatacaccgcctcagggtgatccgttccccgcgcaggacggctactgcattgccgatcggaagcttgcaccttcgagccaaccgcctacaccgccgccaagtgatccgctccttgcggaggatagccggacgtctacgtcgatgcctagcgacttcctccccatgcaccatggctgcttcaccgccactgactgagggttgtgctccctcagcggatgcaacccttacttgatgagataaccactcggctgcaacaattttcacttagcaatattgagatgagtactcagccagtcttgtcttcaccagatggcttcaccaacctctgagtcttcgtcaagctaaatactcgggggctactgtgggatacacggtacctgggtacccaaggagaggcctttgggccgtacgacatagggtgggccaagatccctaggcccatgcagcgtacttgtaaataaagaaagagatttccgggataagatataattctcggggatcatgcatatctttatagatagaatacggagatcgagttgcaatcaaccgtatactttccttgtaaccctcccctctcatcctatataagagggggcaggggtctcgagaggagagggaggttggatcatctccaagatttcttctgggaccatttttccaccgatacagagaatcaaccacactggacgtagggtattacctcaccttgagggcatgaaccaggataattatttgtatcactatctctccttgatctagcacaccccataaaatatattgccgatcatagaaatcggcaatatgcttgtgcggatgccggatgagctaaggagctcaaaactgtccaatgtccgcccttccccttgctcgaggtccatcagcccatgcatgttcatcactagcacctctggtgtgcgagctgtgcgctcgaccccacgctccgctagctcctccctctagaataggcaacaagagttgggcactgttgcactactccttctccctacagatcaagccaccagagttgggcacgatgcagcagatagcagagagagaaagagggggaagcaatggtgttgccgcatctctgatggcccattggacgtggagaagacgagaggtggactagagtgaaacaaatggtaagtttaagtggttcaaagtgaaaaccttggctaagatatgatccaagctgcaacatgggtaaaaatatatggaccacactaaaatttactcaagtttgtatcatctatagtggtctaaaagagtgcaatgaaaacacaatgcgtagatttttcaatgggctcaattttgaagttcaggttatgcttgctaatgtggcatataatcatagacacttattcatgcttgctcgtagcgttaagagtaaaattttacaagatttcatatcaaatacgagaaagcatgaacaatgtgatttatctgttgtttctgaatctcctatttccttgtgcaatgatgatgtgcaaacattggaggagcaatcttttgtgtctcctgttactaacgttttgcagggagttcaaaacaatcaacaaaaggaggagactaatgttcttgataagaaagcggagaagtatgaagcacctacaatgtttgaaaaaagtttgcaaggtaaattaaatggtgctgagataaatgaaggtggatattctcaagatgagctgcacatgtccactcttcatgctatggtagagcaactattagtggaaccaattgttgacattcttttgtcacaagttgatttgtttgatgttccttgtgataaaaaagaattgtgtgataatgcttcacttatatcaatgccacaactagtgaataaccgtgctatttctagtgtgagttctttctgtgctgattttaagcatgtttttcacatttctcatgaagtagaggaacgtgaattgctttcttctttaaatacttagggctatgttcggtttgatgacttttgtgagctcgataattttaaggagaaattatttgctaagtctaatttgccatgtccgactaatgctatttttcatatctttggtgaatataatggtaaaggaatatatttggtgcatagagtttacatctgttcggatttagaacctcatgtagatgtggataaaacatggacgctagggagatgttattgctaatcatattatctcgagtttgtcttgttttgatttaaagaaacaggttggttttgaagaaggggagcgacaagatcgctcaatgttgctactttgtgccactgaaaaagtatcatgtcaatgctttgtttatgaagaaggggagcgagatgagctgcaagagaattatatctatgtagttcctacatactttgcagtacattccaattattaggtacatttgtttcataggagattaatacaatttgctaaagaactaatgatattacatgataaaattttgttgcgtttgttttcttgtagacacttctacgggcaagatcatgcactacgcgatgaacaccatatgaaaaaaccgatgacgtttttccatgaagaagaggaggatgatgtgactatgactactatagatacaatcattgctcacattgtgaatcaacaagaagacatcacgataaaatccaccaagtgctggaatccgattcggccacttgctagagtgctgatttcaaacagccgccaggtgtgcatatgtgctccgttttgggcccgtgagtacttaatggaaagctatcggagtcctctttcaaatggatccaacctcatctccaaattccatctcagtcggccgcaatcatatgaacaaagtgttacgtcactcataatgggtctataagcatgtaacttcatttgggatcccagcctaagtggagcccatgtggggtgcaccccatccaggtggagcacgaccatagggaccccttggtcatcctcccacccccttaaatagctaggtacctcttcagggttttttggtttttgtttagattaaagtttagcttcactactttgccgtgtaatcctgtggtcgattagattgctgatttgctcgttacagaaccctaatttatcatttgtatttaattcctattttgctattcagattgtttttatctagttcttgcttgttttctcgatttgcttgcaggaataaggttgatctacactggctagatcaacaacccacggaaaggtgtatcgatcgctaaggcgcaacacaacaacatctcgtatggttgtagttgggtcgtcaacgtttctctcaaatcgtagttatcttcaactcatcgaaagatcggatcaatcatagtcgtgagtgtctcgagtggaacgcaagatttatcatggtgataataacataaagtatttccatgctaaggctaatggtagaagaagaaaggataggatttacactccggaacaggaaggaggggttattgagagtcaggaggagttgttaacatgtcggtttccccataagctaaattctttataccttcttgtgcacattttatacaatctgtcttaaaactgttgtgtcagttaaaaaggtccctaattattttcatcaaacctcaaacatttcttcttttgttgcttatcctgggatatttccttcaagtatttggcctaatttctctatactccagttattcagtcccccagtctgcaatattcagttaaaccacaaaagaaacccaacatctgctacacgcatttcttgttaaattagacttcagttatcttttagcataaacttattcaattcaacagaacaaggattgttagcataattgacatggctacaactaacaacaatgagagctgaaattctggcaaggtttgatcagagtcaagagatgggttctacttggattgcagggaggggggatcacaactatttctggagagatacctgggttggaaactatccatcgaaaactacctttcctaagttataatttggcaccaacaaaacattgctgctaagagaggtgattacccaggggatgggtgtgctgtctctcagaaggtctttcaactctggggatctagaaaaatggctggagttatcttccctagttgagagaacagtcctgtagtgtccgatgaacctgatatactgatccggcagtagacaaaaaaaggggcctattcgcctaaatcaatgtataatatgatcactttgccctgtggagttcccccactccctcaaaacaaaagcacttcatttggctggctattagagataggattcaatcagctgctcaactgaagaagagagggtgggcaggttcagagttttgtcaactgtgtggtgaaattggaaatgctgtgcatatttgctttagctgccctattgctgtcttgtatttgtagagatgcttgtggttgggctagattacctcaaagttttgaggatttcttcgccagagtcattgggaatgatagctccaaaaaaactagaatcagatgcatgttacttgcggttgcagctgtgtgttggttgctttggtctttcagaaatgatatgatttttagatgcaaacttgtctcatctccattagcaattcccctgcgcgtgatttgtctgttgttgcagtggaagccacttctgaaggctgaagaaattccgaccctggagttcgtgaagcgatcaacgaccttcgtctagcaagagtagggattggtctctgttttgggtgctagctgcgagtgtccttgggttggtaaactgtggcagggagttttgttcaggttttgttatttgccttgttagctggagccccgggggatcttcagccggttcatcagcagggtcgctcctagctccgggcaggggcggagccaggattatatcaaaagtagggcttaatcactagagtataaacttcttgaacgaattttaatagaaaaattagtaaattccttgatattttttctgccaggtgtggggcccgggcccaagctgccccacacctggctccgcccctggctccgggcacccaatcttatcatcctcctgttgtgctgtgtgggcagagggggcggcggcagagagagcagatgcatcgcagccgccagccggagccagtcgaagatgcagcgctggtggaaggtgtggcagcagggcatcatcctgagcttgtccaccgccacgaaatcctgcagacacacggcacactcgacttctctcgcgccggccaccgtcacctcacacaggccctggatggctcgaggagtcgaggcggggaatattgtccaatccagcgcgcctgtaggcggaggaggaggcagccgcgttggtgggtggagatgtggcgtgcgtggggtggtggttgatctcctcctcgtcgtcggatgacagctgatttcgtgggggtgatgtgcgatcgacaagggaaggcagatgggaggaggaggaggcaattttccaaacaaacgcgcgaacgaatcctccgttcgttcggatagcgggccgatttctttggagatgaaagggcccaatagcccatctcatccacaggctcgcggccggcccaagcgcaaatcagacggacttccttccccacctccctccgacccgcctcggctcccatccactaccgtttgctactccggcgccgccgcggccaacctcgcgcgtttccctctccctcctccacgcactcgccttccaagccgccgcggcgctgcgctcccccacctctcttctctgccgccgcaccgctttcccccgtcgtcgtcgtcgtctcgtctacttcagcgccagcgagaagcccccttgcccatgagcttgcctcgtctccggcggctacgcgctgccgcctcctaaccacgtcggtttcattgccctgtcgctgaccctgcgcaccgccggcttcctagggcttattggacaagatgtcgtccaagaagaactactacaaggagaagctgatgcggcggaagtaagtatcatttcacttagaaagatgtaactgattcgaggtagaaacaaaatctgtatgttttgggactgtaggagaaatttattaaaagtagattgtcaaaaaaataaaaagaagaagttgcaacatttgatggtatagttactgtttgcttgtaaaatagtttttgagatccagattctatgtagtagtatggtgtcatgaatttttgtaatcaaaacaaacgactgaagtcgttgttcttgcagttaatcttatagccaccttgttagacagtgattagggtctaaagaatcatgcaagtgacctgactcactgaaccatcccacttaactagatctttcgttcactttcaatacactgccttgcatactataaaaagaaaataattaggtgcagtggtgatttctttaccaatctgaaaaaaattacccgactgccct

SEQ ID NO: 5362 - DNA, 47162 bp, Oryza sativa
gtgctatttatccagaaaaaatgatctcatgacaagagatggtggcaagttaatttgttgcatggtcagttactggtttttaagtacaaataaatgtggcttaatctcagtccttgaagtatacggaatggcacatatttggccaactccaccctgtagagttatattcatctttaggggatctggactcatgttgagttttagatgtttagtgagcattagctttaaaaaagaaggggtaataaatatagatatcgtggtgctattttgaaacagtccatatatgataatgtagatcgaaacaaaatttctcatggtctagattctttcttcaattagaaggctagtaccacacacgaatatgatactccatatgtacatacgtatttgatttggcctagctaatctgctcgagtaattatacaaaagaatctagcttagctcatccatgaaaagtagatgtataaatgtcatgacgcaaccacagcatgctataatacagttgccaatagtttccagtattgcaatccctatagctagctttaattaaacaattgaaattagtaagaacacgtgattacaagttttctagtggaatagtggcgacgaagatatgatgcttagttggtgacaatgaaactgcataaccagcatatctgcatatactttgcaaagcaatgagcaaaatgcttaatcgagcatgcatgctctatgagagagacgtaaaacgtttaccctcgatcatgcccataatgcaaattgggcgttaatgaaagctttagcttctccctttatttcggatatcaagttgtttaatttcttggaataatatatattttagggtatgtgcttaaacgatactagcgcacctagttcagcccataaggatgaaccccatttgtttatacttcagcatttctccctcacgtacgtgaaggctgtcttagaaacctgaggaaacacatatactctctcctcaagaaacatgcatatatactctctccattccaaaaaattaatatagatgcctttaacttttattttttttcacctctcaaccagtcacagccatcatattttatttagtgttgtttatacctcgttccccatttcaaccaatcacaaccatctatcattttattttaccttttttttattgatactcaattgtaaaagtctttatattttcggatgaagtgagtataacgtgggatatgatttcctttatttaactataccatatataataaattgtttgcaccggctaattcattagttcaaaagattatgctaatgaaaaaggtatggatgttatctattccattatttaaaaatatatggctaagcaatagagatgatccttgtgcagccttaaatctttgccatatacctatatgactccaagtttttcccttgtcccctgtatggctccgattttttttgtattgatccctatatagccatttagttagttctgcactagatttttttagaatgattattttacccctcccttatgtacatgagttagctcaaaaggcataattttcaatgtaaaccaaattttaaatttataactaaaggagataattatatcaccccacatttaaattttgtaatgaatttctttgatgaaaattttaaatggaattttcaccttctctctacatggggatctcttcaaaagtagttgaagttgtttaaaacatatagaaatttggtttctaataagtagaggaaaaataaatgttgatttgtgcaatttccctatttgaagttttattaaatttgattgcaattcatttgaaaattttgaattgtcaaacaattatctcccttcaattttccgtactgaagttttcgccttcatgattatgtttcactagctcttatataaagagaggagtggtaatatagtcattctaaaaaagtaatactcaactcacagtcaacttatgaaatggatattgaggagtagaggatgtgagacaaagctcggaggaatgaaaagggtagagtaccgtactcgagggcacacaaggaattttctctgagtgataatatgtttaattaacaacatgtacaagaaagcacacaccgataaacatgcattttacatctttaagaaataaacatgaatttattgaggaattatactgtacttcctcttgtccttgctttacgtattatagtgcaaaattcctcacacctcacgataaaaggtgtagtggtcggtagatctccaaattgcaggaaaaggagtggacacaaagtttttcatcaaaaactaagacaatctcacaccaatcaatcgatgtgaagcaattgagcattcatgaaatgcatgataactcgtgctgattctccatggctgctgtacttacctacatatgctccgtaggagtataaactagtgacactgatgttcttgggtaaagcttgcaaaaaaaatatgtggcacatcattgatttctcctcttctttataagtggcaactagagaattaatcctagtaacccagttttggccatgcatatattccctcttaaaaatgatatcatgattaatatagaaagagattcgagccaaaattaaagacaaggttgcttgacctcgagatgctcatgttccagaaagaagagctctgctgaagctccatcagagagagattcagagatgtttcgcctcgataggcttcagcttcaagcctgcatgcatgttcggatgttctgttctgttcgtcgcctgaagacgacgttagatatcaaggagcattttactaggttggatccgatcattgactgcacaaaatgcgatgtaaacgttgtactaactatgaaggaatcaagatggcaagagaaaagagtggacatgcatgtttccctgcaaaaagaaaggtaaggttcgtcagatacgctgatcgagttgtgcatgcaatgcaggctttgctttgctttggtgctgcatcgacatgacattttctgccccaaatggtccccaagtcaccaactaagattgttcctcttgtgattgatcagcatctagtcatggatcgatcgagctcccaaccaaaaggagagaggtttccttcattccccatcctagtgtgagtactaggaccattggaccaatccttcatgaagaaagatgctcaaatctgagctcctttttcatgttgcgaccaactcagcagcataaagaatccattcgagtttgagatgcttgcactgttgcacaggatgggagaagagagctactccatccgtttctaaacgtacttatcagccttgactcagttctatttcaaccattgaccatcaataaagaaatatagtttagtttctaaattgttaggttgtgataatgtgatggagaaaaatatatatggttaattatacctcaattccataaggtaaggtgttttagtttcatccaatttatttaacttcgacagagtttacggaaaaatacaccatcatctacagcatcaaaattagttccactataaaatatgacaatgtattaattggtagtaaaaatgtttatttttctaaatatttgatttagggtcaaactaaaacaccttataatttaaaacgaagagagtatttagctacaatatgataatatggtatgtttttaatatttgtaaaattattgctgaaaaataagggtctgttcactttgatgccaaaaaaaaccttaccaagttttggcattaccaaaattttggtatagttgccaaaatttttgcatgatttcttatatagttactaaaatttggcagcaaactaaatgtagccacttttttggtaactttatcaaaatttggtaaggttgaaaatggcatcaaagtgaacaggccatagccagaataagtagtgtgaaacagaagtagatgagaggatgaaaaaaataaagccagaataagtagtgtgaaacagaagtagatgagaggatgaaaaaaaaagtgcattgaaagaagttagttctttgacatattgacgcactttaaagatctgagatctatcactgcctctcttttgctccccttgaaaagaggagagcagggcggtccctgacaatcataagctgattcaaccttcacaataataaaaccagtaacttagtagtttgcacttgactattgtaccatgtaatgttaatgaatgcaaaagcaattggttctcacagactaggacttgatcgcattcaaaaaatacaaagttgcagagatacaacaaggctgaagatcctcgttatgctgtgagaattacatgataaggaacagtaaactgacaaaaatgtttagtgactggaagaaccatgaatatggtagcgtatactatatgatgattgccatgagaaaaccgatcctgctatgaggatgccagtttcctgagaaattcaggcactacctgaccacagcttgtaagaacctcagacaagggttttgcaagcagagcatcagcgctagaaaagatgcaatgcacctcccccacaagcacatgacagcttgcaccagcgaggatttcaatgtattcgtcaactgaaggaggcaagtctgcaaccaacacagtgtcgaagtcctcaaaatttgccgttgttatgttctcccagtctttcacaaggacattaatcagcccaacactgaagaaaatccagagaaatgtaagttgtcaaagtaaaagaaaagcagccaatctcaaatcaaaagataatggtgtgactacaattccctttcaagtaaacccccagtcttagtgaccagttttcagcttggaagagtttagggaatgttaggtgcattgcacagctcttggtttgtccccatagataggatgttcggcaataaactacatactgtaaatattttccatacctgctgcatatggtaaaagagttgccatgcgagtcattggtcacggtacaattttgcaatttcaaggatgatgacagatgctgtgcttcatgatcacttgcggttaccagtaggacctttgcagtctttctagcatgatcatttagaatttgttcaagaatttccttcacctgcatgttggaaaagcccataagcttaccatggcaggcaaaaaggcatattttaatcgcacaagagatttgtaactgtttctgttccaaaatcacaaccgtgaaaacagtacatgaggttaaaaggcttaacaacacagagaacaaggctacaagagtaagataggcagatcaaggcttagcaaggtgatctaacagactaatcttcagtaacaggaagcagattcctttaagtgatattatgaagccaggatgactgtaaaggaaaactatttttcaaaggcaagtacatggagcaaataagtaatgaactagcaatacatcagtggttattggttatgataattaccttcggtgccttttggtcctttgatgggcatatgtgtatcttttgtgttatgaatgcacctctagaagtaactgaatcattcgtacaaagccttgtgatcttttttccaccgactagttttgttgccagtgcagctacccttcggtcagacgggtcactgaatatagttatttgagggttgctcaatatggcatccctaatagaacaaagcttgtcgctgacattaaggtccgtgaaacacttcagaccatcaatcacctgtcaaatggagtttccatatttaaattaaacttgactgtaggatgagtaggcttgttgggaataggcttctaggttgtataattgctaagagtatccaaaacttggagatacaaatataatttgatatgacaacagcattcgttttgcaaactgaaattacataatcactaagatggtgaatggaagtgttacagatgatctgtcttagtacaaagaagttcaacaaccaaattaactcaccagcatcgatacgcctgatatgtcaatcgcctttaaagctattagttcaagcagcctctctggcgtggatataaggaactccggttcgcaactctttaatctgaattgagtgtgcatgaaattaacatcccctaccctaacacgcttatacgcttacagataacaatgacactgataataggattagactgataattaatttggccaaaacatacccagaaatctggtgttcaatggaagcgccgggatgcagactgacggaatggataccaagtgatttcagaggcttgcaaatcgaacgcacctgcacaaaacaccatcaaatgaatcactgattcatcatttaggaatcaatcttaagtgaattaaccaaacgagcaaaaatggcggcactaacttgcacggccttttcctgggaggggacgaggtagagtaggaaggggcaagagacgaccacagcgagcttctccttcctggcgacgatgtcgcaggctgtggagacgagccaagccgtcttctcccgggtggcgcactcgccgctggtgtcgagcacgtgcgtaggcggcgcagccgagcagcaattccagagctccacgccccacgacccggtgtcgtggatgccgccgccgccgccgtcctcggacgccgccgcgtctcggatggcgttgaggcagaccaccaggaacttggacggccggtcgtactccgccccgtccttctccctagacttggcgttcgcggcggcggcggcggcggcctccctcgccggctgcttcttggcgctcgaatccttcttcttcttcttcttcttcttcttcttggattcgtccctgcctgcggcggcggcggcgggggcgtctccggtcggctcgtcgtcgcccttccgcttcttgccgtggcggtcgttgaaggggtcctccggggtggggagggagaagcacatgccctcgcaggcccgccgcttgccggacttgcggcggcgcttggaggcgatgatgccggcgacgcgggccgacacggcgttctcgctgctgcgcatccgcttccgccgcaccttgttgcgcttccgcgccagcgcgtcgtcgcccttcgccatggcccccctccccttctcctccgctccgacactcgcggcggcggcggcgacgcgaggtgcgagacggcggcgagagagacggttagccgccgcgaccccgagcacgcagagggaaaaaacctagcgaagccactaaaaaggccgggccggtggtagtgggccacattttctagatgggcccacttaagttgcatcagttgctcggtgaggcccattactcagtgagacctatattggcccaactggagagtcaagctttagcatgcgttggcccatgagaggattggcccaccagtcagtgacagacaagggggcctttctttcgtatgggccgcataaattacgcagtggaatgattatgcgttcggccttgttggcaccaaattttagcatttctcatttttttattcgcagcagaccatacataaccatcacaatcttatgataattaaacttctggtcactcacttggtaattttagaaacatcaactcacacaaaactatactgataattctagaaactcctcaaaagaccatattaaaacttgccaccacatcttatcttgtcaaatttaccaaattattttagcttcatcgtgtagttttagttttagagtcccactccggtgctttatactcggagtagaaagtaatctgagccattgatcatatttaattgaaggcttaagatctagttctactcccaccagaattagtgggagtagaaatgtgaaggggtgttttcatccaggaaaaataattcgcgtagggtattatcgtatattatcagtctcttactcaccctatccctatcctatggattcgtatcgcatcgtcgccatttcactccatcccgacgccattcccctccatccccgcctccgtcgccgtccatctccctcgccatctatgtcgcccgtcctcgcgtctcctccccctccagcgccgttgccttctccgctccctccgtcgaagcccgtctccccgccatcgccaccttctcccccgcccgcatctccacgccgccttgtgagccccctcggtagccatcctcctcccccgctcccttctccagcgagtcgcctcacgtcgtcgcgcctccacccgtcactgccgccacgttctcctcgccaccagccctctccgccgcgtcacctccacccgccaccgccgccacgtcctcctccccatcaacccctgcccccttctccactcctctcggcgatcccgcatctccgtctgggatctccagagctccgccctatcccgccgctacccgcgtcggcacaccttctggcgagttccaccttagaccccagcaccgcgccactcgctgccgccgagccttcgtcctcctcgctatccccttactcgctgtcggcctcctcccccacgctcggctccagccccgtccatctccgcccgccatcgctcctgcagccgcgtgggagagcccccaatccatcgcccacaagcggaggacgcagcctctggatccaatggcaacgcacgcctggttccccttcgtccccatgccacctcaagcacctccttcggagcatgaggaagacttgccattggacaatagcggaaggtaatgcccggaaatttgcagtaagatgcactcccctaatgccgcccctcaactttcaatctcaagttgtttgtttttcttaaattttgatttgatttccgaggctacctgtttcctattaatctgtagcatgaaggatgagatgatccatctatatctgaacaactccaccatggcgttggcgatcccgagagaggcatgcttactgggtgctccgaggtgccatggcattgggatgctggtgggagcattcagtatttgcaaggagcaagagcaagtgcgcgaagccatcttggaaggtacgtgtggctgcttcgtcgtaccaattggatttggcacgcaatgttgtgctattgaattatgatgtctaaagttgtcatctttctgaatgaaactaatgttcacctgttgtgggggctttggaatgggtggctgttactagtggctatatttgcattggcattgttatgccaccatcaattaattacgagtagatgatgcgtggtgtctctttcctttgaactttggtgtccttttcaccaattatattgctcgttttggttcagtaaatacattgtttatttcataacagaacggttaatgttaacagcatttttacttacttactctgaaccacatgccggcgaaggggttctcggtgttcaggtgcgacattgaagcagatgcacgttggtgacgtcgactgcttactgccctgagtcaccccgaagcgtaaggtttcatataccgctccttctcaaatggatacaaatatgaactatgagtacgcggactggatggtaggcccatcatagcaaacaaaaagtttgattatgacagaaggacatttgtagaaaataagaaagataacatatagttgttgtgatctatgcaggaaggcatcgatgaatacataagaaagctagcagcgattctttacaactctccatccaacaaattttgaatcatgcacaggccatctccgaagaaatctaagatgttcagctttgtattgggaggatattctttcattaaattctgagatgttcatttatcattgagatgttttattttggagattcttagtttgtcttgtcggatgttcatttcgaataagctaggtgttaattttttaatattaaactctatctgttatttattaaatgatactcaatctcgttattcaacgatgtcagatgcggggacttattctttcttttgtaaaaaaaataatgttctgctataatatatgcgcgcggtcgattgaaaaaccatgattttttatgataagtactttctgcgagtttaaagaaacatctcgtaccacgacgaagcacctttgtgcttctgcactgcaaatcttacgtaaagaagctgctcaatgcaacatcttacatcctgtcaaactgtcaaatgtgtaagctaatgttgtatcaaaatcggatgctacggagaacaaaatgatgtgtcagtatcattttttcttggggacgacatgttccccctggaactgttcctatggtttgcttcgctcctgaatcagcatcttctggaggcctgatggctgaggatgccaaatctcccaccaccaatcctttttggtggcttcgagactccgaatagagctatcgcaattcgaagttggaactagaaaaatatggacagaatgagtcctccagcagcatgtgcattcttattgatctggtaggctctgcatgaaaaaacaaccagtttcagcagcagcagcagcagcattacagtttcagcagcaccagcagcaccagcagttcagtttcattccagcaacaacagtgcagttctagcagcagcacaatttcgaatagtagcagtatcattccagcatcaacaatagcatcattccagcaaacagcaccattaaagcatcacacaagcatcacaaaatgaagtcaccattccagttgcagatcatttaatcctaatatttaaaaaggcaactaaatttatttgttcattacactcctttaaaaataaataagcagccttgcaacgcaaacaacagaactgtgcttgcgccggaatcatctcagggtaaccaggtgcgccacagttatgctgcccagggacgtcgccccaacgctgaactgcaggaggggctactgacctcctgacagggtaaaccacagctccatgatcgtcatccaggacctattttcagaaaccaagcagcaacaagtcaagttaggacacaggaggcagctcaattctgtaattttctgaaaatggattaaatcaagctcaattccgtatttatgtaatgtttctgacaaagaattcttttatagttctaaagcattttagcttatttgcctctgtacacatctaaaataaattaagtgcctcagtttcagagtataatgcaaatgcagagatggccaaattatgccctgaattctttattctttcagtttcagagtgtaatgcagatgcagagatggccaaattcaggaagacaggtttgatttgctataaaagagtatccatctcacagatccatcaactgcataaattcattgccactctaaactattgaacaattactacagttcccccataatggctgcaaattttgtatgtatgataaaagaactaaggcatgcactaataaattaattcaatgtactactagtactactgatgaactagcaggaaatgttggatgctttaaccagttgacaaggcaatcatttggtagaaaagatcaaagatcaattgcacaagatatgatttaacttgccacctttgctgaggtttaatgttggacttatattagtaacacatcaatttcagcaaactgttttgagtggaatttcaagtgacaggtgtatttcatttgcagcttaagaccaaaattattgttcagttttatcgttcatgcttacaacttaacatacaaaatcgatttaataaatctcctattcaatttaacatccgcaaatgtagattctctagtatagttacaagctagtatacacagccatttacaagcaagtatatgcatttgtagaggaaaaattcagacaagtttaacactgaggagaggaaggggaacagaaagtcaggtggggggggaggagtggacacctgaggatttcaccgcgccaccgcttttgccggtgcttgtgtcggacagatgcgacgcgccgtgccaccggccgcgacgccgcctgccgggaggactagctgccggccgcgccgccgcctgccggtgcctgcctctgacctgatgccacgcgtggtaggaagacgacggaggaggcaaggacgctgaaggggaggagacgccaacggtgccggaggtggagagggcgggggcgacggacggcgacggagagggcagggaaaacgtacggggacggagggagaggagaaggcggcgagggtgggggaggcggacggcgactgaggaggcggacaaggcggcgacggagagggcgggggatacggatggtgacggagggggtggacaaggcggcgacgccgggggaggaatagcgacgagactgcgtgcaacggagtcggacctaatgcgatgcgataaggagtccgacctgatgtgatcgaaccaaagaaaacaatccatattaaaattacccctaaacgatattaggagattacttaattgccctttatatattagaagattacttacctgccctttatttaaacaatccatatcaaaattacccctaaacgatattaggagattacttacctgtcctttatatattagaagattacttacctgccctttaaaataaataaagggtccctattaggatttatacccatcaggtttgctttatggtttaaaacatgagaccagcatcctaaaaaataaaaaggggatgctcgagtaagatgatagagcttcagaatgctattgagttacaccgacatttgctacagagcaacattctattattacaatctacagtctattattacaatctagcactctataaaatctatcactctataaaataagtgtatttaaaaataattgaatgaaatcagcacacaaaaataaatttaaccaaatacaagatcgggagaacacattatttcggcaatgagttgaacaatccctaaatccagataccacagttcatccaagttcagtttgatgctcgattattattcatacagaggcataaataacacgcatacaaaaccgtaaataaacactcaaacaaagtaacaaacacacttcgaaaacaccactcaaatggcggctgggcgcccctactgcggctgcagctgcagtttctcgtgcagctgcggcggcgcgacgacgtcgaccctggcgacaccatccctggcgtcgccggcgaccttggcgacctccacctcgccgacgacgtcggcctcgcgctcgtggtcgccttcctcctcctcgtagttggggtcgttgcggtcgatggcggccgggaggggatcgagctggctgtcgacgatgctgtcggggccctcccaggtgaacttgccgccgcggccggacttgggcggcggcgcgccgatgccgcgggagccgttcgccgggtggcgctccatgcggtggagcccctgctggtccagcttccgctcgaagtgcctggccgtgtccgggtgccgcgtctccggcaccgccaccttctccgtcaccttcttcccctcctcgtcccggtgcgtcgcgcgcatgtacatcatcgatcttcgccgccggtaggtcggtattcacaactttctccggcgaattggttgcggtggttggattgcgatctgggtgatgaatcgatgagcgcagagacgcgggtatataagcggcgcgcggcgaggcgagcggcggaggagtggagaagaagagtgtgtggagagggggaggaggtggcggaggcggaaggcgacgcgtggagaggaaggcggtaagggatggatggatagggggccacgtcatgtgcaggtgtgtgtccaggtgcaacgaacgccgaaaggatttgttccaggtgttgcacgcagcacgcctggttggttgcatgaattgcatcgatagcgtcacgggaaatttaaagcccgtattattttctatcaagaaacacagtataaacacttagtgaaactataaacgtgcaccctacttataggctgagtttttttttccttcacttttccgacctatttctttcttttctatgcgcatgctttcgaactactctctccatttcacaatgtaagtcattatagcattttctatattcatattgattatctatctagattcatctatctatgaagagttttactcccgtccggcagtctgtaccagccagtactggtactaggaggtaccagattaaatctggccgtccaacttgaaaggatacgattggaaaacaacaaatagaagcggaacaattccggagtcacacgccgccgctttcctccctcgctgcgctctttctttcctccctccccgcatcggttctttctcatctattcctccatctgagcgcagaaacggagcagttgcgccgcatccacgccccgccgaacggttttttcccatccatctgccgtccgtggtcgcggtactggagaaacggcgcgctcgccccgcatccatgcctctgccggtgccgattttttcccatccatctgctgtccgcgacagtgtcaccaacaacgccgccgcattcacgagcgaagatgtcatggtattctgtgtcccctatccccctccctcgacagctcaagcaagtacctaacctcccccgctgccatggcgcagcctaggcccccattacggctcaaacactactccactatatggtctagttattttgtaattaacaattcaatctgccatgtttcttgtaatgaatttgtgagaaaagcacaagcttttgctggagactttaatctttgaatggaaaattttaagctcatctgtcgtccgttttttggtatgctgtttacagggcatgatctatcgttgaatggagcttttgacttaatttttgtctgctgtgaacagagcatgatatatatgtcgtattgagagccattaatattttgtctgatgtttttgctcgatctcctgtaaaatatatatcattctgtggagtgatcagcagcacaacaatggttacaagcaagtgttttcaatgaacagcaatccagctatagatgtaaaagttgaggaatcactggagtagagtgctagacacatgggcaataattactgaaaaaaagtataatttacatgattctgaaagactgaaacaaacatactcgtactagtgtgttgtaattcagagtttcagacagtgggagatagataaacagaattctgcaaattttcagccaaacagaacgaactagaacttagcaagaatctaaaattgaaggataagttagacaacccatctgaagaagctgtaatttagagtttcaaatagtgggagatagataaacagaattcacatggataggttgctgagacatcaacatgctgagtgatccccatccattaattctggtaattgacatgtacaaaatcaacaatggcaagcatagtacatattatcaaatagcttcatgagaaggaacacagctacaactactgttcctatgaaccaatttctaatgtcatcagtctcttttttctgcttagacaacttcttgaatgaattttctatgtctgaaagccggtcatggtcaaccatttccagctctagcttcattttatctcttctgccttcgttttctcaacataacagttgagtgcttgagctgtgggcaatgctacagaataaccagaggttgaagaaggatgcccaccacgaaccacccgctgccgacgccattgccgccgccacctcactgacacgggcccaagcaccacacaccgccgccaacaccacctcaccaccgcagcccacggaccagccaccaccttctcgtcgcctcccatggaccacctactcgtcgcctcccacgaatcagctgtcgctgctgccgcctccgagcgttgctcccgtcgagcaccaccgccacctctcacggatcagagctgaatcgagatggatccctacgcgaaaagacaacattacccttccacccctctaactattccagtaccacctcatgggcaaatatgtacctggaggtaccgtataatttccaccggccgatcgagctaaatgaatggctgagatttggtaccgggctggttacctgctggatgggagcaatcctctttgataaaacttctataattccaaccatttaataatttttcagatgctttctttgttttaagaaaatgatatacgtacctaccatagtatcaaaaacttattagtagattttacgaacttattttattgtaagattgatggctcaaattttaaaagtttaattaaatctttttttcgtggggagtttaattaaatcttgtaatcataatgtagtaaaatgtttataaccgtacggatattagattttgagactatgagattcatactggacacaaaccgagcaacaatgcggaggaggaacacaatgaagcaggagtacaagagaaggtcacagcgagaatgaatcacatccaaatgtcccagcaaaatgacacatccccaactctaactgagagcatataaactatcacattctgtcagattctggctaaactgttcttatgttggcctgtttcatcccccaaccaaactgcaaactactcaagacacgtgattagatagaattgaacccaaacacatgtcacgtgacagccatgccacaacaacgcatgtcaggcacgagggcaacaaaaaaataggacaaattgatcctactcttgaggagtcaagcagacattgatgtcaggtgaaggcctgtgcaccatggactgcgagcttgcagctgcaggccacccaaccatggcgaaaccagtactggagctcgatgaattcaggttcatggcgcctctactctgctccacaccggcatgtgcttgtggaggcatggatgagatcgaaacctgcggcgaacggcagccattgttgccaggagctgcctgagaaatgggcatcgcagctgtgagcacaggaggaggatgaagaggagccatcggtgctggaaatgccggagcagcagatggttgtggatgtaggcccattcttctctgatgctgcttcaggttgttgggcaagaagctccccacaatcacctgtccatggagatattgtgtttagagcttcagagaaaaaaaatggctacagagtctaccatgcatgagtgacagagttaacaacgaagttctctatcttcagttgtaaaagcatggtacttggttcgactgaattacgttatcgaaaaatcgattaattttgtccaggttcttcagttgttgttgttgtttctttacctgaatagggctggcggctcgcagcatcccagctactacaccgccgacaacacggccatcagggccggcaagcgagacactgagcccgccggttctcctccgaacgccttcctccgcaattgtaaaggagccagtcagttgaagaatctcaaagcagccctggcaaccacatatccataaatgctgccatcttagagttcagtgaggataactgtaaacacaaatgtgtatgcacgtacgataagtaacaacttcgcttcaattgttatcctacactgatataggcatacagccgctctgtctcttaggcagggccctgtttggcacagctctagctcccaactccaacttacctggagccggggctgtgccaaacggtccagatcctccattttttggagtggagctagcagatctactcctagaaaatgaactatgggggtggagctgggtttttctgctccacagctccactccatcctaaaatacctactaccctttaattttttagtctatttataaaaaatgccattcaactacccttcactcctctcatcccgttctctctcctccccccatcttcctcacgatgccaaccgagctgcgggagcgggagcgggggagggggcgataggccggcgcggagaccacgggcgggtggcgcgcctggggacaacgtgtggccggcggcgcgcggcacgcctggcgacaacaccggccggcggacgaagcgcctgggaacggcgagcggctggtaggctggtggtacgcggccagcgattttttcaattttttttctttttttttcatatctagagctgaaacgtagccaaacacttttcaacgagtcttcaactctaataggagctagctctcacttgagttagagtttggagccctaccaaacggggatgggagtgggagacattagcacaaatcacatgctaatctagtaatataccactgttttttttggccgggcatcactgactgttttctggacaacgttattgagactcgcgtacaatttgcagacttgagcgtatactccctccgtcctataaaacccaccataataccagatgtgacacattaatatgttacatacagttctagattttttttgagtaaagtccatcatcgatccctaaacttgtaccgctgtgtcatcccggtccctaaactcacaaatcaaccgttcaggtcctcaaacttgttcgactgtgtcatcccggtccctaaacttgcagatcactcgtttaggtcctccaacttgttcagttgtgtcaccccggtccctaaacaggacggtctaaaaactttatatcaaaaaataatttataactttttcatgtgaactctaatgaagacaaactttatatcaaaattgtatccctcgacgtgacctacaactttgtagttgaaaagtttttgaattaaaactgtttagggtcccaaaatattgttgcatgtttatagattttgaaattttaattttaaaattacattttgggacaaaaaatgacttaaaataaaataattcaactacaaagttgtagatcgcgtcgagggctacaagtttgatataaagtttgtcttcattagagttcacatgaaaagttatgaattatttttaaatataaagtctttagaccgtcctatttgacccaaatgatattcaaatccaagttttgggaccgggttgacacaactgaacaagttggaggacctaaacaagtgatatgcaagtttagggaccgggatgacacagtcgaacaagtttgaggacttgaacagtcaatttgcgagtttagagaccgggatgacacagcagtacaagtttagggaccggtggtggactttactcttttttttttatgggacagagggagtatgttactacagactgccggaattgtatatgtgctatcatgaacatagaaaaattgggaagaagacttcacccttgatctgtcttcaaaagtggctcgcataaggtggttaagacttaagacaccattacagaaaaaatactttctcaacttaggcaagaagaccatttattgtatctagtactataaaggtggtgatactgaaactaagagattaggtagagacaggccaaaaaaactgaatagaccgacttgagacatacccataactccatcagaagttcaggcagccgtcaaattagctcacaacatttccaagtatcatactatcacacgatgcaaggagtgaactccatttcatacctcgtaggagaaggtgctaccagacgagccaggctggttcaatacaacatttgagatggtgccattggcagcgagaatgcaaaccgagcgaggacccttctgcgagaaggacattatgcgagccgccacatcctaccaacgaattgcaccaaagaaacagtcagtgttcatcctttcataatcaaatcacaatgccaagctaactgttaaaaaaaaaacttcagttatggcttacctcccctgtggcgacaatgatgacatgaggcgtgaagctccctccagctgataacgcataccattcccctttacaagcattgagaataccaatcagacaaagcgatgtgcactttgttgtctactaccagactactccttaactgaagtttatcctcatgaaaaccaacgaaatcgcccaaaggattgggtcgattagttaaaccacctaggaaaatcaccaaataattcatacatatccaaaggtttggactgagatgaatccggacaaacacaagagcatgaacagcagaaatgtgcttattcctaacggttattgactggtaagcagtagagccctcttcagctcaaaaggcaacattacacatcatcctctccactggaccccatgcaagcaatgaaacagaaattcacccccaaaaaaaatgaagaagagacaccaataacaagaacataaacatgaaaaaaaatggaaactgggtattttccaaatccaaagaaaatcatgtaatgaactctgcatttctgaagaagcaatatatactgacctagattggcaaggatctggcgccgcccggaccctttcggccggccacgacgccgtctggagctcaacccagcatgctcgccatggccactcacctgcatgctgccgctgtcccctgcacccaaactccgcgcggctggcgttgcaatggcggcggcggcggcatcctccgctcctcctcctccatggacagctgccgccggtggaggtgacggagtgggggacatcgacgacggcgaggagggagaagaccggtaccctttcgctgctgctgcggcttcttgttgtgcagctgcttcagccatggaacaatctgctgttctgatgaacaggccgtagcctgctggcgctgctgctgcttcatggccacttgccacagcaatgcactcccttgatcttgatccctccatgtacaagcatgagagagagagagagagagagagagagagagagacaaggttttcttgcttgtttttcttggttttcttgcttggacacaaccaaaccaaggaggaagacaaacaacagtgagacagtgagacacctcactctagttttgctttgtgtctggttatcaccaggcagcacagcaagtatagtagtagctgggaaaaagaatttgaagatggggagatgacatgaataaaaatgagattttggaggtggagactgcacaaaaatggcggggttaatgtgactgtctctatctctctctcctttgaccaaccagctggattagttggacacttggactgcaaaagtgtactggagtactacagcatagggtacgcccatcttaatgaacagtacgatgagaactcatacacacagtatcttcagtcaagaaattgatagataaacgaaataatatgtgaaataaactacacaaatacatttaaagctctatttgaaaaattagattttttttctcaaattagattgtcttatatgaaaatcatgcaaaatcgcatgtagtttacaatcttgttttggagctaaagttcgagtaccaacaaggcagcaagataaatgaatcttgcaatatcttaaaaaaattaagttttcaaccgatcttgatcaaagttcgacacataagagcaagtttaatagtatagcctaccactggctccaattcagctatagtcaatttaatagctaattcatacaatagttaccaataaaatatactatacaattactatctagtcccacctatcatacacacatgcatcttgaagtccgtgttgcagctggctacaaatatgcaaccagctgctcttctctctcctctcttatctcctcaaaatgtgtttatagatggtttatagtatgctattatacttgctcgttaactctaacgagtaggttgtgagagcttagaaattcgtcgaatatatttcaaattttgaatgaaaatgtggacgtactctctccctcaatccagtttttttaatcattgttcatatttccagagtaaagagaaaatcaagcacgttggagaatgtgcctgaagttcattactttgagcaatatttattgcactgcaattaactactctatccgttacaaagccagtgtagtaattggtgatgttaattttactgttttgatcaatgtttcttagcagtacaaacacatcccgtattgtattatctattctaaaacttttattaataaataaatacctgaaagtacaaaactaagcatcttgcatgataaagctataaaaattaatcaatcttgactggacaatttcattttattagtggtcagactttagtagtgaagcagagagagtattcccgaacaatatggtctccaaaacatatttcctccttcttatacaaagcttttggatatatttttaatacgtctgtatgtattgtttagtgtgttcaaactaaataatttaaaaaaaattaatagtcaaagttaagaaattacagtaccagagagactactattaattactttcttcgttcatttgtggttcatcccatttatctcgaaataaatatatatttttaagtaatcattgtattagaatttataaaagtagaaaatgatttcattgagagttaataaagtatgagtattctaatttttcttattttgtattggtatatgtggggtttacagacattgacgtgtgaagaaataaaatggtgggaccatatataaatgaaattgaagtaaaggatccacacatttttcttacctcaaggagagcagctttccctatgctccttcctctttaaaattcccaggcttgcataaaaaggcatcaaaagcagattcttgtttactccgggggtgtttagatggggctaaaactttttagtccgtgtcacatcgaatgtttgacgctaatttagagtattaaatatagactaataaaaaaactaatttcataaatgaaagctaatctgtgagatgaatttttaagcctaattaatccataattatgaaaagtttactatagcatcacattgtcaaatcgtggtgtaattagactcaaaagattcgtctcgcgaattagtccaaggttatagaataggttttataattagtgtatgtttaatactttaaattagtgtataaacatccgatgtgacagggactttaagtccctgtttcccaaataggccctcattcattttccagcggttacagtaaaccttcagggcagtctccaaatgagactctcgtacagtacgagaactgttaaaagtgtagtactttatgagaacatcaattgacaaagcgaaacaattctgtttttgtttaaactctgcctgtacagctgtccattaggcttctgacggggtaagaccgaaagttcatttggttgatcagtaaaactggagttaattcaaagtgaacaataaagaatcccagtcaaatccatgatgtgctgcaactgtaaaagcacgaaatcctcgttgctgtaaaacgaatgaaatgatctgagtaaacaaggccactgatgccatcctagcccttattatacctgctagtatcatccatagaaagaaaatgctaaaggaatcaaaagaccagactacaactctaagagctaagagcatgtacaatagtagactatatattagccagctataaacatattttaatgagataaaagataagagagaaaagtagcgggctacagatctgtagccaactgcagcatgaactccaagacacaatgtgtgtatgataggtgggaccatatactaatagtatagtagtaagcaattattatatgaattagctattagattggctatagatgaattggagctagtagtgagctatactattaaacttgcagtatagcccgctgctagctctaattcatctatagctaatctaatagccaattcatacaatagttgcttactatattatgaatacctggtcccacctgccatacacacattacgtcttggagtccgtattgcagctggctataaatctatagcccgctgctcttctctctcttcctttatctctttaaaatatgtttacagctggcttatagcttgctattgtacctgctctaataagcaaaaggaagaaccactaagagtatgtacaatagcatgctataagctagctataaccacgtatcgagaagaaaagagaagaaagcgggctacaaatttgtagttagctgcaacatggactccaagacattatgtgtgtatgacaagtgggattgggtattaatgatgtagtatatttttatagttaattattatatgaatggtctattagattagctatagatgatttggagccaatagttggctatactattaaacttgctctaaagtaaggattctctgagtcgcttccatccacctcgctcccgtcccaggggcgacatggacggcgaaaaactctcccccgccaccccttcccacctcccccccttcgactcgccgccgcccgagcggctcgccagcaaagtcaaacggttgcaaggacggcggctgcggggcgctctccccacgaggatacccagccggcgaggacatcggggttgcttagcggcagcgagaagcgggaggcgacggtcgggcgttggcgcgatggatctggcagccggcgcggtggatccaccccccggcagcggatctggtgtccacgatggtgggggcggcgacagcggtcagaggctcgggcggcgcgacgaacctttgtggatagcggcggcgacggcgcatccaagtgagggcagccgcggatccggcccccacgcggcgggatccggcctccctgggccgaatctagccgggaagctgcagggccggcggccgcggctgcacgacaacggtggtggtggtgcgacagctaggcaactgaggctggacggcgtcggtgtcgacggcgctggatgcggcgtagtgtccgggcggctagatggcagcggtggcgccggtgacggatgtcgacggcccacatcggcggcctagggccgccgcgatgtggcttggaggctcgaccgacgacgttgagtggcccgagtggccgttggtgggcggcaaggtggcggcggagtggtggcatcgacaaggccggcggtgggtttggcggcgaggtcgtcttccttgtggttggccaggttaccactatatttaaggagctcttccccttctttatagggagcttttaggcacgggtagaggcgatggccggcctacagggaagactcaggttgccaaggcgaggttgttcccggtcagatcccataggccggattcgacgtggaggccgacaggcggcgtggcagaggtggcctgggtcagcgtgctagggagtagcggcgtggtaaagggcgctggcggcagggtcgtcttccttgcggtcgggcaggctaaccctgtttggggagctcctccccttctctgtggggagcttcttggcaggatgaaggtggtggtcggtctacaaggaaaactctggttgctgaggcaatgttgttccttgtccaggcacccttgggccggattcgactgggaggccggcgagcggcgtggcggaggcagcctgggtcagcgcgctggcggaggtgaccggtgctatggcagtcttgtcattggcaggactggaagtcggccggtggaggggcgtaggtcaggtgtggcggaagccatgtgccgccggtgttagatggtggattcggattgagcgacggaccacggcagtaggggatttcgagcgaaagcttagcccaatttctttgggccaacagtgaccacgctttcgggcgtggtaagcctcctgagggcattgttgaggtaccccctccttccttggaaaggagctctgggtgaaaaccttatccagttctttggatggatgacgacggcgtctttcggcgtcacgaccctcgtgagggtgtcgttgtagagtcttcgcgccgtggtggtttgttgtcccggtggtgatcggtctcgcatagcgacggccggttccgtgcttggcttcctctctgtagcgtgtttggacggttggcacatggttcgaagcgtgtgctctggtgcacatcctttctcgacagccagctgttgatgtaaaacttttcttgtaacatttctttctatcttaattatattgaatgacctccttcgataattccggcaaagaagcaaaaggaaatactggagtatcaaaacatatgctctacactagaaattgcagggaagtttgtatataagagagcatgggagagggagtttcagtttcctttaattttacttggaaacaatgatgtcaacagctgtaactctggagctgtacagcagctggagcaaattttctgcagcatctactgcggcatgccggcatctactgcgaaagatggaaatgtgtgaagtgcagatcaaaaggatggatacgcaatgcactagtaataactgttgcatttattgcatttcagatactggaacatgcacaaacaattcagaatgaatactacagtttttccatgtacaacatttcagatacttgagcatggccgtgtttagttgttttggtaaaaaaaatttacgtatacggacacatatttaaagtattaaatatagactaataataaaacaaattacagattccacgtgtaaactgcgagatgaatctattaagcctaattaattcatcattaggaaatgtttactgtagaccacattgtcaaatcatagcgtaattaggttcaaaagattcgtctcgcaattcacatacaaactgtgcaattggtttttttcgttcacatttaatgcttcatgcatgtgtccaaacatttgatgtgacggaaaagttggaagtttgaagggaactaaacacagcccatgtaaacaacattattcaggccacattaccaaatattcatttgcctattgttttcagctttttcatatcaagcggttagtgtctattccaaatctttttggaataggtaccttgcaaagaagcaagatctcctataactgtcacaaacattttccccttcaaaattgaaataattttctaaatataataatcctgttataacataccccctccgtttcacaatgtaagactttctagcattgctcacatacatatagatgttaatgaatctaaacacatgcatatgtctagattcattaacatttaaatgaatatggacaatgctagaaagttttacattgtgaaacggaggaagtatttgctaaacaaaataaacatgtataaaatatttaattagaaatcaatatgcccatttcaaaaatttgatcagagatctgcccaaaaatggcatgtttgtggagaaatggaaacctttatgaggaaaagggtaaaaagatagatcatactctgataattgaaacaaaatacaatgcaaaagagctgtatttcattactgcacttactttattagttgttagtaggaattattcgtctgaaaccaggaattgtaaaacacagttgccatccatatggacatcaccattcatgaaggacattacaactcatgcaaacatgggccatgcacataacaggataaatgtgctactataaattttactttcagcgtgataatgttgccagttgttagtttgttacgcagaaaataattttgaccttctttaagttttttttccctcaatcatttctattcagataaatgtttggaacagcattttctttctattacttgatctcaacaactgagcaatcataattttgttcagccaaacccacataagcaggatcactaatgacacaggtgtaatcgacatgaaaaccaatgcaaaatattgtgatagtatcgtacattactagtgattttgtgtgtagatacttgatgtgaatccccaagtcttaatataaagatgcgcaatacttgtatgtattctcgaaaagaaatttgtgtcttaatactaaaacagaccaattagaaacctgacaagtttatgaaaaacccatttttggtagacaaaaactagaaataaaaaagacagaaaaagactatccttgaagtttttggagatatttgacttggcagatgtggagtatggatcaattgatagccctctttgcttgatataagtactcacaaggagccaaaactcgccgcccaaagtttaatagtagtaatactaatagggtgattaccgataaggctttcatgattaaattaggcatgatggtggtattttatcctaacacaaggaaggggggaattctgatctcaaacttttttgcaagcctattgtagatataaaagaaaacaggacgagaggaagcagctagcacacctctgttgtttacaacttttaatatgctaaagaagtgaaaacaatacgggaaccaaaattataaagctgccagataataattaaagtgaaaacaaacagagaattcagacctagagtaccatcatatgatgctttttctaacctttcacatgaccttcaagcacccttcccagccaacaagctcccccacttggctgaggtctggggacaatacaaaaattactgaatgagttaacagatcgatgttaactcaagaaaagagaaatccttcatgacttcagatcagaaaatgcataccttctttatgataatgatatatatgtgaaaaaaaaatgtctatcacgctagctattatagatttcctcaaaatgttattagtattgttttgagattcacgctaaggtcgagtatacaatatattcaatgaaatgtggagcacatacctgtgggtttgcatctatgttcacagtaaaagcaaaaggttgtttacctcctaccttgccgatgtatatagtacatgtggcgatcgcgctcacccaattactaaatatttcagtgacttcaatgtaatatacagtagtttgtactttccaactgaggccctgtttagattctaactttttcttcaaactttcaactttttcgtcacatcgaactttcatacatatacaaacttttaacttttccgtcgcatcgttccaatttctttaaacttctaattttggcgtggatctaaacacaccctgacttgaagctgaaaaaatattggtctataaataacataatgaggatgaggactctatgatacggctttcactgacacaaaacaatgaaactaatgttattttatatctgaaacaaaataaataaactgatctatgtatagtgcagatctgggaatgacgcaaaacttcagaaatcactccgctgaacaaaacggaggtaataccgcaatacacaatgcaagcaacatgtgtggtaaaatataaacaaacataactactgaactagagtggtccaagatcaacaacttcaattaagcatctagtgagaaccgagatttcatatgcaaatacaaaatatatccttccattattcattctataatccttagtgttttcacaggtgctatcatcagtaaaattcatgcttctaacaagtcacaaaaggtgttcatcttagctctagaggttagtggtagaaaggggaaacaaatgtagtcatcatgatgaattcagggtggcaaacacattgctgcatttccagatcaacctgtgatttccgaaccattatgctaagtacacaaacacaatatggcaacaaaatgatcggcagaacaccgaattttaaattcggcgcgagagaatttcataacgaattctgggaactgcattgctgccaccccaaagaaaaatccagaccagcatacgtaccggcaacacctagcttgatttccccagacatcggagaacaagattacgcagaagatcgtgccggatcagcatcatcaacctcgctacaatgttgagtgactgtgttagtatcaagcatgaagatgagaggagcggaggagtttgtgggaagtgattgccggagagggtcaccgtctcaccgatttagccgaggagtttgagagtcgacgccgcgtccgtccacgacttggggaggagacggagacagtccgccgcagatgagggtaacggaaccgggcgattgacgaggccggcgaatcaatggtgggtttctgccgttccggcggtggcggcccgcctcgatcgccggcggccgcggctccgttcaccgtggggtgggggtggggcggcgccggcgtgatcgcgtcgtgggattggaccgattctccggcccagtgggccggatgggcccaggaggccgcatggctcgctcgttcatttcgaattggtgcgtgaaattttccgggaggaaagatgctatgttaaaatttgcatggtctgttcatgaagaatgaagatatcgatgatatcccagcatggtattttgagccaagagtgtgtttttttctgtgaaatatgtgtacaatgtctcctatgaaaacgagagagatgggaggagggtagacagggaattaattgttgcgttattcgatggaaaatcaagatttaggggatgttaggcacaactcaaatatttcttagagctgagtattcctagttctacaaattcatagatctggatcattgataatatctatataaatcattttatttttattttatataaaatataaagttttaaatcactataatttaatatacaaactctaaatccaacatggatataagatctggagctattctaagggtttgtttggtagagcgctctagctccaactaacatttctagctctatctaaaatggaattggaactggttaaagtgctatcataaaataaactagagatgtgaagctgtggtttaggttactttagacctaatctttaacttaaatttagagttagagccttgctaaataggcctaaatagaaccttagaaagttgttgaggtttaatataacaaacaagacgaagaagagttttagtttatggcttgtttggatcactaacgatttaaatcccgcaaaaaaaaaagaagtttctggttgagcaggggagccggtgagacggtgcaccgctactgaatggttccaaagaggatgatacatcaaggacaatggtgatgttaggttttggatctgttaggaagcgtaggtagcaacatataaaaaagtatattttttattgaaggtgatccaaaactgacatgaattcatacatcactatattagtttaagctgtagcgagttacatacttgatttcgaatgagctagttctgtactctacgctcttctcaccttataatggaatgataaaatgctcacgctttttaaaattctaaatggtgtattttttaataactttatatatatgactctctgagatataatttatttttaactctataatacttaattattcatttccgctctcgaataactatcataatcattcggccattcaacattcactctggaagggttagtgatttaccatatatactttgaacttaattttagctcgctgatgtttgaggcttaaaactttaacccttctcttaacaggtagtcaaatgttctagtattgcacacattttcagaccaacatacctatagttatatataccctactggtatatagtagaaagcttgccgttgcctaagtcctaactgttctttctttcgtcaagctggaccagtctggtactataccccaacctacttgggccggtagaaatgatcttatatttggccgctttacatgatgccattagccatagacaccggcaaattgccaaatcctcttacatcaaaactagttttgaaaaattgattgcaatcatctctgcagccagtcaaataggtcaacaacacgcacaggcatccaccgagtgaaatggttccgaaggatgatgcgttatcatttatcagggccaatagtgacgttatgttttggatcagttcggatttaggaggctccgtttcaaagttataagatgtcttgacttttatcaaagttaaattgctttaaatttaactaagtttgtagaaaagaaaataatattttcaactcgatacaaatttattatgaaaatatattcaattattaatttaatgaaactattttggtattataaatattactatatttgtgcataaacttactcaaatttaaagtagtttgattttgatcaaagtcaaaacgtcttataacctcaaactaacctcaaacggatggagtattatgttgtaggcttgtagcacctaacaacgagtttaatagtagagctaactattagctataaggttgaaactaatgttgaaactgatatgtataatagatgatatataatgttgtctttaattttcttctcttctctctttacctgtttaatccatttactttgaaatatgtgaaaagctaagtcttgcatgagagttaacatattttttatttgttttttatatagcatcatgtcaaacttgttattgtaattggtcgaaagggtcatgatacttcatactacaaacgtatacgacttattgttatcgaaggtgatccaaaactgacataaataattcagagtacatcattgggttagttgatatcgaatgagccaaagtatatagcaaaaaaataaataaaatgaagaaagaatgagccaaaatacttgagtgagaaggatttattagtatactttggacttaataattacctagatcactgatatttgacactaacgtgttagtatcgcacacactgtactagtatgatggaccaataatcgaacccacttcggccggtatctcacacaaacacacaagaaatgaaaccgaactttaaatttggacgcatcacatcataccgcatgacacagacacggggaaatcgccaaatccaccagcatcaaaacctgtaaattgtactggcggtactctcccgtctccactactgataaactcgtaattatccgtgcagtaatataagccagtcaaagaggcgatcaaagtggcaggcctgccaccgagacgaacaaattaaccggctgtccgcttccaccctctccatcattggaatccccgcgccgcggcgaacatcccaaccctccctcccgcaccacaacacagccatgcaacagagcatcgcctccgtctgggtagtggatcctgaattccagaggtgcatgttatcaaataattatgaaataataaaattattttattaatacccctttcgtattttagtgcatgatgccgttgactttttctttttaccaaccattcattttatgcaaattttttttgcaaatatgaacatattatgtcatacttaaaaaaacatttgatcataatccagtcacaataaaataaattataattatataatatttttttaataaaacgaatggtcaaatgtaagtcaaaaagtcattgacgttatagaataacatatggaggaagtatatgatagatcactccacaaatatgcaaattaaaacaaattaaactacgatcagttaacgtattctcatagttaaatttgttttcgttgtaacttgcacaagttaaattttatactgcatatttgtggagtaatttatcacataatatatattattaatttttttatattttttgtaactatttgaaagagcatctatgcccctagtgggttttggtttattgatgacaaacgattaagggactaatgcacttattgagtgtataagcaagtgattagtcctatgaagaagctaggaaatagacttatcgatggatgagaattaaagagaagatattgaagatgcgggtatgaagtgactacctatggcaagacggtgaagcacaagcgacgctcagttgcgatggaccatgcggtggtgaagggcaagcaaggggcttggcgccgacgaaccgaaaccggtggtgaagggcgagtgaatactgtgtcgtgatgaaccgtgcgaggccatttgaagccatggattatccacattaatcatttgagaaatggaagatgaaatgtcaaagatcaagaagatgagatcttcccgatgatcaaatgactttgacgttggtaaccctccaagtgaagaatcaatatggtgtgaaggtactcctattggtataactttgctttttaaatttgagtttaggatgctgtactattaagagggataccacatgcatataattggttaaatactagtgctcaaaatgcttcatgtttgtgtgagttgaaaaacctaagccaaaatttttaatcccgagttgtttcacttgtcacaacacttacaccgggtttctttgcaagtttttcaatatctcttgaaggttttggaccatgttttatgttgggtttgatagcccacgaaactagctttccatagagtccaagatcttcgaaatcggagttcagagtaaaaagttattgcatttttgcttgagcaacattagactatccgatttgaaatcagactatccgatgtatcggactatctgatttttcacagaacttcactctctgtctttgtttgaaaaatcctttcgagtgagtttttctaagtgtcggagtatccgatgttggatcagatagtccaatgatacagagactccgaaatttcatggaacttgagtctctgtttgaagatgaagtttttgcttctaaaatatcagatactccgatttaatatcagatagtctgatgtctcggaaaatccgaaatttcatgaaacttcgttctctgtttctccttgccttggaggtttaaaatatcggactatccgacgtggactgaaagattccccttcaacggtcacattttgggggatctataaaaaccccccactaaccccttttctagggttgcccaaactcattttattcaaatcttgttttgggttgagctttgtgctaagtgctttggatctttgagctatctccctctctatctcaaatcccccttgttctttgtgacttggatctttgtgtgtgaatttggagtttgggagtctagtgtatatttcttttgatcttgagcactaggatttgtccaagagttgtgtggtgtttattactcttggaggttgaggactcctagacggctaggtgtcgttcttgggccaccgatctacgtgtggttgttcaagagaagtttgtgaaggccggatctcgcctccgcaaggaaagagatacccttagtgaaaggaggagtccatttgtgcaacctcacgaggatagggttgaaaaagacccggctctttgcgagcccctcaacggagactagaatcccctcaaggattagaactccgggaaatacatcggcgcataaacctcggtgatatcctcactctctttaccttcttgttgcattgctttgtggcatgctaatattgttgttggttgagctcacctctttgcttgtggattgaatctagatatcttaggttgttctcttgtttgtattgttgttgtgcaggtcagatagtctgatctcagttcagactatccgatcacatagaactatccgacctgatatcagacaatccgaccctgttttgttttagcttccgtatttatttaaaaatcgcctattcacccctttagacgatatcaagatcctttcactatttaattacatgtaaatattgaaaagataatgacatgcaaataacgaaaacgatattcgagaggttagaatagttcccctccgtctgctgcgcagcgctgggcgacgggacgcacgccgaatccacccaaatcaccccaacttctcgatccaccgaataatctcccccccccccccccccacctcactcggtttcaactcccaccgcgcaaacgcaacccgtgacaccacctatgctttcgcttcgcctcgtcgcctcgcctaaaacccactcgcgccgcgcgctgcccgcacgcacccacccacgtcgcgtcacgacatgcggaagctgagcggaggcggcggggagaggagggtggtgggggcggtggcgttcgaggtggcggcactcatgtcgcgcgcggcggggctgtggcgcgcgctcggggacgccgaggtggggcggctccgcggggaccgcgtccgcctcgagggcgtgcgcctgctcgtggccgacgacgacgcggcgctcctgtccctcgcgctcgccgagatggcggccgcctgcgccgacctctcgcgcgccgtcgcgcggctgtccgcgaggtgcgccgacccgctgctccgcaggttggacgccctcttcgccgccctcgtccgtggcggccgtctcgccgacccgcaccggctgcggtactccgcggcgaggaagatggaccggaaggcgcggaagatgcagcggctcgtggcgtccacggcgctcctgtcccaggagctcgacgtgctcgccgagctcgagcaggcggccgcggggggcctgcgccgatcaggcacccgacggaagggcgcggcgagcggcggcggcggagaaggagaggccgcccgccgcgtggcgcagcagaggcaggaggtcgaccgcctccgcgcggcctcgctgtggaaccggagcttcgactacgccgtccgcctcctcgccaggtcgctcttcaccatcgtcgcgaggatcgcccaagtgttcggcctggagcccaagaacgtcgccaccatggacgacgacgccatgatctcgctcgccaccacccgcctctcatggactaattccttcgtcggcagcgtgcattccttggtctatccttcagatttcgccgcagatacacatactccccggagatcattgctcgatgcaaaatccggcaaggtctccaatggcggcgaacatgttcgtcggtttcttgtctccaggagccagagcttgagacaactcaaatggccaatggccgggaagcacctcatcggctgcatggtcagtgggagcaggtctccggacagcgagaggtggaagatccatggagatggtgatcttccactcagcttcagctactacgtgtcagccagcaacgacgattattccagcatcaattccccgttccaaggcgaccacacaaattcgaatctctcaatagtgttcgagtcgtcatcgcacaactgggtgatgaacgcgcccgcggtgacgacactcggcgccgcggcgctggccctgcattacgcgaatctcatcatcttcatcgagaagctcgccgtcgcgcctcgccatatctgcccagacgagagagatgccctgtacaacatgctcaccgatcggattcgggcatctctcagagctcgcctcaggccgatcgccaagaacatggcagcctcttcatcatcttcttcttcagcttgtgatcctgccatggctgcagagtggtctggcacggtgcagcgcatcctcggatggttagctccgctggctcacaacatgctgcgatggcaatcggagaggaatttcgagcagagaaatgttgcgtcgagcggtacaggtgtgctgctcctgcagacgctgcattttgctgaccagaagaagagcgaggctgccatagttgagctgcttgttgggttgaactacctgtggaaagctggaagagagcttgatgcaaaagctaaaaaattggtgtcaggtggtggaaaacgcgatgaattcacagattattatagtagtaataggatggaatgtcgataagatgcaactgaattggatgagcctgggatatgtaagcagaggtagcatcagattccctttgctgatttgctccttcaatccctacaattggcattatgacacgcatctattctgtaattgatgctcctgcattttagtgtataagtgtagggcagctgatcattttaatgtaaatttaccatgtaattcattagtgaagacgtatcaggtttaataaggtcaccggaacagaactgaaacagtgaaaatagacttgcactagttagtatgtttgtacatgatgcattctgaatcctgaaaagaaagaagggtatcttggatgggcatgcgtcttgtgcagcatctgcagttccagaatatgttgagaccaatttcagttagaacttatattttcaggttgttaggaagcgataggcaaataaacgataaataacaagagatcaatcacagaagacacgagatttaacgtggaaaacccttccaaaacaggagagaaaaaccacgggcgccagccagcaaaatatcttcattatatcggggtgaggttaacaacaccgaacaacggcttataacaggtatatatgaaggtgaaaccctaaaaggataacgattcgtaacaagcctctggcgacggacctccgcttcactccggtagaaactggcctttattatgtgcaaatgaatttggatcacaacttaatataggttgcactaaaattgctacacttaaacagtatcgtaatattggtctcagattaagcccatcaaggaaaaaattgttgggctttacatgggccgagctggccatcagaacatgatcaaacggcccacaggaagggcttcctgctccaactcgccgtcgccggccaccgccgcggcgatctctcccctgtcccctcgtcggcgatggcgctctcgtcctcccggccgcgccacctcctccgccctctcctccggggcctccacgccaccgcgcaggccctggcgaggccggagccgcacgagttctccaaccccagcgagcacctcggcagctggggggagcccgctggggatccccgcgaggcgtgggcgcggctggagcggctgcgcaagggctacgcgcgcgacgtgcgggctgcgggggcagtacgcctacgaggcgcagctgctcggcgccgagcggcagcgcagggcggaggcccgcgccgaggccgcccgcctcgccaccgacgagcgcaaggccgccgccgcgcagacgcgcgccgccgagcgccgcgccttcgaggactacttccttcaagccctcgtaaacatccctcctagtcccgcttcatcccccttcttttgcgttgatcacccgttgcacatgagttgcttgttgaattgccggagtgggagtcttacgattaccgtgcgggtttttttagaggatcaagtgaattacgttacttgtttgtagaaatgaatctactaatttaatttttttttctggtacgatatgttaaaaatatcagcgaaatgactttataactgagatgagatgatgtacagatgaaagtaagaggtgagaagctggagaactggagggagaaggagaagctcaaagcagataagagggcggaggacagggagctcttgggcaggaagagctctgtgtggattgctgataatgaactggaaaatagaattctcaaggctatcaaatttaccacgcctctctaaggacaacttttgctgctaaggtaacttgaattcgttaaaatttgtcaatcattccatattgcaacacgaagaacgctacctatgttttatctctttttgaaagaagaccgatgctttatggtgttatcaatcagtggcggagctggagcacaattgaggggggtgcaccactttgccatatgtatggtggcataacactctagataatggtatttaaatattcctagacaacttttaactacaacatcagtgagcagcgaggaaaagtgcttaccgaaataaaagatgaaaggaagccatggagggaaacataaaaaaatataaaaaaaacaatcgatctatgaaaaatgtatcctgaattgttcaaaccctaatatgaaaaaaaaagaattataaacagtcacatagttcaaacaacgctatttaactttgagatttgcttggaacaaattaatcaaactaactagatcagaaataagaggagaaaaatcgatacctttaatttttgtggcatatttagatgagcaaatcttagcaagtggattgaactgcttcttgccatgctgatcgatcggttcctccagctacacgtaagagaagatgtcgacggtgatgggatgacggcggatctgttgcctgagggcattaacacgagtcagcgagtggtcctgatggcgattagagaaaaggaaaagaagagaaagagagatgggtctctgcgaacgaagtgatcgaggcgtcggtcctggcatcgaggacgagtgctggcgatctcagcgagcagcctattctcagccttctcctctgcgtatgggccaacggggggtacactgagttgggccaaggggggtgcccctatggtgaaacttaacggtaagcagtaaatttagaaattgggccaggtgcctgggaaccccccctggtccattgtgctccgcccctgttatcaatagaaaatgctgcagattttagagcggtagccctatgtaatattgccatcagttccattgattctgtctagatacagcgtaacttgaaattatgtgtattctgaactggataacttccttcagaagatcggggcttcaaagacagtatcttctgatacactattcatgcagtaccagtgtaccatctgtgcagtaaaaatcagaattttatttgaacttgctaaattgtaattgtggccaacagaaaaaatgcatgctttgtagtctgatgttttttttttgaaaaccatgctttgtagtctgatgtactaaaataggaagtctcaagagtatagcggatgttaactttaaagcaatcttcattacacttgaatcattttaactcttaaagtcactgggtccctgtgcttaggtagccactgactttggtgggtattacataattatacactcttgatcttccatgtgtattttttgtttatgcctattgggaatgctccttgcagtcttgtggttaagttactgatcattggcatacttctaccatcaaattctccaatacagcttggacagcagagggcataatgctatgattaacttttcatctttccaatttatccgtgcacttgagttagatgaatgtccaaaatgcaattgtatattttctgcagtcagtagttacatggtttagtacgtctgctcatgacaatttcttcttttgtatctttaagatacttttcctaccttttcgttagactaactatgactatgttctttcagataccgagaagcatcgttgttttccttgcacaagatactagataatgtcttctgagaagcaggatgtgggatgaactgaatgagttcctggaactaatcacagctgtctaagcaataacgatcaattttgaaaattccgctgcagcattgtatgttatgttggtggtggatgaaagtctaggtgaagttgtgttcaagcattccttcgcctgagagagacagctttcctcatgttcatgttaaaaaaaattctttcgcaattgaaattactttagcactagctggataaactgatttgtgaagttcaatttcgttgtggacaaactactgccccgattttcccataagatctcctataattgcatagtgcgtaatattttgaattttgcttttttttttgtatgtgtgtgcaggagatgttattgtgtgtgagtatatcaattcatgtaccactgtgccagtgcagctaattgctagtattatgtgttcatgattatgggcaaacataccatgtgttcaaggatatactccctccttccctaaatgtttaacgccgttgacttttttaaacatgtttgaccgttcgtcttattcaaaaacttttgtgaaatgtgtaaaactatatgtatacataaaagtatatttaacaataaatcaaatgatataggaaaataattaataattacttaatttttttaataagacgaacggtcaaacatttttaaaaaagtcaacggtgtcaaacaatttgggagtatatggatggtctcatcaatttttgcagcacagctacttcatgatggagtgactctgaactttatagtgtatttctttctcattacaccaggagcctatcatggtctgtactctgtaccttccacaaatggctgcaataccagatcaaattcaagatactacccctctcctctttatatataagcggtgttggtgaagcgagaagagataccccaacatttcatagaaaccagatgatcgagtagagtacagagagacaagagattcatgttagcacaatctaaacctcatgacaaacataacatgtccatgcaaatcaaatggaagtagtactacgaatgggatggattaggagacacaactacagtgaaagtgacggctttgggtatagctcgtagtcccaaatctctccgcgttccaatcactgcagtatggacaagctacataggcctagtggtgtgccagatgtaagagcgagtataataagatgatgtaaatgggctatatatattcacatatatttgtgcttatgtggagcagaaaggagaggagagagaggaaaagcggcctatagattttatagctcgtagtcccaaatctctctgcgttccaatcactgtagtatggacaagctacataagcctagtggtgtgccagatgtaagagcgagtataataagatgatgtaaatgggctatatatatattcacatgtatttgtgcttatgtggagcagaaaggagaggagagagaggaaaagcagactatagatttatagccagctgcagcacgagctccaataaaccatgtgagagaaatgcggggaatgcactaatgatgtaatatatatctatagttgactattgtattagtaggctattgagttagctatagatgatatgttaatttttgaaactagttggctatattattaaactgattatacagttcttaggagctattgcgttaattaaaaaaaacttaccgttgatttggtgtatcgtattatcgcaatcacacatcgtgttgagagtccctataaataaccataaaaatatatctgttgatttagtggatcgtgttatcatgatcgtagatcatgtacaaatcccatacatatcgtaatacacacacacacactatgtttcacaaataatcctatatactatatactatgtttatagctattggctttaacaaggtgaagtgccaaaaagctattggcttcctttgttcctttactctgctcaggaatacggcaggattacattagctcggtaggcagtagtgagcagggtttacgattccgacaggcccttctgtttcaggtactggcggaatacggaatttcgcaaaatccggtgaaaaaccagtaaattctgaacaaatttcataaaccaaaatttgaatacaaattccctaagtttgccgacaagttctcgaaaaccggtcggttttggcgaaattctgatcgaaatcatcgaaatcagtaaatgttttcctttttttatttccggtcggtttttgcccatgtaagtgttttccttttcttgattatttattcttttctttcctgatgtaagtttcagtaaatacatacaatacatcatttttttcgaaaatttatatcccaataggttctatgaatatcatagtatttataagattttatttgatttttcttttttatcaattcaaattttaatttggatgaaacttctcgaaatctcagacgatttctactttcgagcctcgtcgaaacgtcgaaatttcacgaaatccggtcggttttcgtcggaaccctggtagtgagtacatgcccaaccaaatgctactattgcagcccctttgtagtgagtgcagtttaaactacgtcaagtgaaaaatactacactctccttaactatgagaggaccatagagatattcttcattaatggaaggtagcaaaataagagaggaaataaatacttatcagtagtttttcacagcttcctggaaagttactcgggaggtgatcgatgatttatagagttttttgctctttgttttccatgacaaaaatcaaaacttcacaactgtcatgtatagcagtgatgattaggtcagccatgagcatttgcaaggctagctaggaactggaggcgtttggaaatgctgcaaggcctcaacacactctcacatagaacaaagctcctaacactgttgcagatctttggacaattgacaagtgctgggatgcccaaaagctcaattcaatctttgagcagcaagcggttaatatgatattgcaggtaccaatcatccaagacaactctgaagataaacttcgatggaaattcactcccaatggagagtgcaattccaaaagtgcatacaaggagatctggaaaagagaagcctcacatggatctcaagtaagtgaacatgccagaacaatcttgaaacaggtttggaaagacaagtgtatgcctccaaagattaaaacctttgcttggagattgctgatgggagctcttcctactgcttccaggcttaatttcagaatcagtgaaatttctccaaattgcattagatgtggcatgattgaaaatgatttccatcttttcttggactgcccttttagcaaaatcacctggataatctcagatatcaatctgaacactgacattttttctgataatgtctcaatggctcacattattgcttgcattgtaaataattgctctaacaaagcctcccttaatagaatcttctcaatcatgtggcaaatctggaaagcaagaaatgatcttaaatttcaggggaaggtgctcgagccaacacaagtctgttttgcagcagaagctatgatcaacacttactcttgcttgattgagcaacctcatttgcaggataacatcgaccagagcccttcggagagaagaatggaacagctgcctgaaggtaacagatgctatgttgatgcctcctgggaacataataaagcatgcattgggatcttttttcatcttcctgctactcacaatgctcttttcattaaagctttttgtcacttgactgaatcccctttacaagctgaactgcttgctttgcaattagctatggagattgctttggttttgaatttcacagacacaatcttcctcatggattgctcaacggtggtggacacagcgaagaaaggaaacttccatgaagatccaagccattggagtcttttacctatttggagtcaaatcttaaccttcttaccaggacatttgctcaaggtccactggattccaagacatctcaacaagttggcagataagctagccaaggatgctagagggaacccttcatcccctccaatctttagttgccaaaacattgctcatattgcttacccatccaatcaatgttttgcttctaccctaagatctagcctgagggctcgaaattgtactgtcaaccatgtactttgtttctgagcttaataaaacgcatggttttcaaaaaaaaaaagaacacatagaacaaagctggagatggcttcctcctctgccgagtgagacacgttgttcccctcaagactatcgctccaatttccttttctctggtctgaaagtggttgaaaattacaaatccatgggaccaattgatgtgttactagttttgcattacatgtacatcataacatactattcatttggctacataacttggcacacggaagaaattaattaaagacaacttcaattccggcagcatagtgagttagtgactggacagagtaaacgtttgaacatacatcgattccagttttggctatatggagtagattactagattaattacttatatcttttacagtgatcagttcttgtatttctgtgagcactgaccattccacaaagctgacgaattcaccattgttgtcacgatgatccataaagagatcgagccatatatatatatttttgagagaacagtcaaggagttcttacacttcactgtagaaaaagagagttgatccaatttataagaaaaattgaacctaaaactctggcattgacacactgaacctaagaacaatagttgaacaagggaaaaaccctaaaacgaagccttcgagaaggacacgccgacagaacggtgacatcgcctgatccaaatgaatctaaggtttttatccggagaaatcccttaatgtgaaatagagcatatctctcagcatggaattcgagaggaaatcctagacggccgttttccacccgttgcccataggattaacgcgattcaattgcaattatttccataattacgtgattacgcgtattgatcggtagcgccaaatccttccatgtttggattgcccccgatctccctcagcgccatactaataggggaggccggtatcgtggatagatgacgatctctccacgatcatcttctccccgaaaatcccaaaaacctatccgatcaactgagcgctggagggagaacgtgtggtggttctgggacagtgtaggtggcgaccggaaggccatcgctaccccacaagtgattaccggcaaccccttcgggatcaagccggtgctcacactgcaactgctaccactactacctctacaccaacaagaacaaggagaaccgcatcaatgacttcaaataatggtcagttaaaccccaattccgcattagggtgatctataggcttagcaaattatatcttagtagatcgcaaagtctacaaatattgcccacacaccaaaactacctacaccactgcacaccgccaactacacaccgcaacaacgtgcacaccaccaatcgagccatatatatacacttggtcgatacatatgcataatggagcagaaatccaaagggtccagcccacagccaatatagtagaattatttacggtacaccatactagtatatatatgtatatgttgcagatgcacaatccaaacaccacaaaggcacaaactgggaagcaatggatcagtcataaccgggaataccagggcgtttccacggacagaagtcatggccagagatccaatccaagtcggccgaacgaaaatttgaccggtggtcggtggcaatccagctgggctgtgttcgtgcgtacgtgtggcttctggattggatatgacacagctgtgcgtccaatcgagggttttattcactcttcttctcgtgattaactaactccctatggacaaaggccacacacacatccaatgtatacgaaaaatcgtatgtgtgtgccgagcgtatacacgtagtatgtccatgtgtgaagaggtatacgtacgttgtatgtgccctcgtaaaagattaatggttggttgaaatggacgcattgttgttcttggcaatatgtgtttaacacctactctctccattctaatctagaagtggtctttttttttcatagagggtgtaccctgcagtagattttatattttaccccctccatttcacgatgtaaatcattctagcgtctaagattcattaacatcactataaatattgaaaatgctagaataacttgcattgtgaaatggaggaagtatcaaagtttctaacagatcgtgtgtccaaatatatgggctctataaattgtagttactctgatgccctcttttcttattacaccaagtgcctaacatggtctgcaccatggacacatggctgtaatcaggggtggatccaggaacaaaaaaattggagaggctcaattgcgcagttttttcaaccttcagccatctagagacttttagtttatcattcatagtgaaaaaataaaaggggtgctccggagggtattcatgagtcttgtgggtgt

SEQ ID NO: 5363 - DNA, 9717 bp, Oryza sativa
tggaattgcaagattattttccccagggccatgcgctcctccccacctatgccttgtcgagttgtcatcttgtattcatgtcaaatgtattgcaatgactgccaccaccactcgatatccaactaggtgtgctctaccatattaattagcaccatccccatctcgccatagacgctaacctatgtcccttctcacagagccacaatgggctagcacttgagcccctccatcgctgccaaggtaccatcaacatcgagctgctgatggcccctatgccacatctactatgcatgccacaccgttgcccctctgtgcctggccatcaatcctaaccgttagctctaccacccctttgttttccactagcatcttcgccccttatttgttcatgcgttgctccacatcctccataaacggcatgatgaggtaattcatttttattgtataacttaaaaaataagtagagaagatatgggaatgcgtagctactttttgagaggtccgcttgtcctgcaccagcgaaacaaccgggactaccaggtttgcatctatttataggaattgcattagagttgctcaacgaaagagccagccaacgatctctatgctgcaccatgcgtccctgcctagttttctttgccccctgccaccataaatacgcacccagctgcaacatggatcaccaaacacatcgatccattcctttcaagaaacaagaaagacaacaccaacaaactagctagctcgccaatggcctcgttgtactccttccggctcgccgtggcagtggcggcattgttggtcgttggctcatgcgccactgaggtcgccttcaaggtcggtgagggctctagcggaaaaagtctagagctcgtcaccaacgtcgccatctctgaggtggagatcaaggagaagggcggcaaggactgggtggcgctcaaggagtcgtcgactaacacctggtcgctcaagagtgaggcggcactcaagggccccttctccgtccgcttccttgtcaagaacggcggctaccgtgtcgtcgatgacgtcatccccgaaagctttacggctggctctgaatataagagtggcatcaacatctaagtgatagacatgtgtgcttttttttttgaaataattcttaacctctctataatcctttttttttcaaaagagagatcaagtctgcattcggggaagccaaaaattaagtttctatggttattttgtgaaatatgccatcaacaaaataaagcattccatatgccatgtccgcatgttgctgcagaggtatatatccagacgattttgagtatattactgtaacatgctgaaaattagatattttctaattatgtatcatgccggttcttatgttcttaataaccttctaaatctaggaaattatgattagagggaccttctagaactaacttgcataaaacccctctttgatatttaacttcttttgtgtttttcatttaaaaatatatttggttaaattgaggtatttcttgatttggttttaaattaaaaccttctttcgacaaaatttcctcttattcaaatttagtttaaaaacccttttcatttgtataaattatggtccaagaaaaccctccaaaccaactctttgtaattccaattttaattggaattaattgtcgacccatcctttgattccaaacctatccttagttccctttccaaatctcaaatatccaaattcctccttttgatctaaccgccaatttagttcctacggcttgatcccttctcggcacaagaatggtattattacaaatattatgaataattgctcttgtgctaagaaaatatattttatccttctcttccacacatccaaattcctattagcctcaaatacttctctaaaatccatgccatatattttggggctaaaatcctattattttcctctttgtttgcttgcctcattcccaaaaatattttgaggaattatattgttaatttctctcccatttgagtgcatcaattccaccataccccacttctaaaaatattgcactcaaataaatagaagatctttatttcgaaatttatctccacatataaactccctccaaatataattccatctatacacaaaatcaattctactcaatttgggccgaagttccttcacctaagcccaagtctgaaagtctaatttccctcccttattcctttcctcactgtgggcgccgccgccgcccagctgctcccggagccgccgtcgtcgccttgctgaccacgccaagccgacgccgtgccgtcctctacctcctccgccgcccaaacgcagcagagccgccgcgtggacgcgccgccgacgccgaccaatcacagagaagagccggcgccgttttcttctcctccactccaccagcgccgtgcttcccttgtttttctcctctctgaaccgccattgaccacctcctttcgccgcctataaatagccggcgaagccccttcttttcccccagatccgagcctcgagctccatccttctctctcgtccccaatgccggccaccggccgatctccctcgtcggactatttccgaccaagccctcgcgccatcggcttcgcctcgatggggcaaacccattccctaaccttccccttcctttccccttccaagattagccaccaccgttacttcccaaaccggccggggcaagcttttggccatcgccgttccggtctcctctctcattccccctgccggacaccaccctccccagatgcgcgtcgttcgggaacacattccgccaccgatgtcgccgcctcccaaccaccagagccctggtgcccctcctccccctcctctcgtttgctcggctggaagagaggaggaagacgacgggaggaagaagaaggaaaggaaaaagaaaaagaaaggctgacaggtgggcccatgaacagtgcactttcatcttttctagatttaattcaaaacctaatctttagaaacccatatctcctaaaccatagatccaattccgatgaaacttagacctaaattcatctaaattcaaaatctaccttttggtaccaaatttactattctaatattttatttgaattttcttaatttattcaaatactatttgaataaatatttgatttaaacctatatttgcttttcaaatattttattttatcccaattacccttttagccactaaaaagccgccggttggaactttgcgccttccatggggacgttcacggttttctatccccgacgtcgaaccgttggttgtaaagcccggcataaaccaaacccaaggtcgaagtgctgctcctggcaccccacgcctcgatgcgtatagcggtcggagcttcactattccatcgacctccacagcacgccgcacagttagctctcgggctctgtgtaatcctagccgctccgtcgccactcacggttatcggagtaacacttccaccccactaaacctgcacccacctactattcttctagccgatatgatgtctatcgacacctgctagaaatgataccaaatctagtcgctatactgtccaactctagcgacaactagcaaacacccaaaaccctagccgatatttatcctacctcaatatcggcttaaacaactaaaccctagctaacaccttgctagttaaaacccaaccgtcatccaaataccccacctaccaatatcgcctatccactatacgcagccacctactctcctagaacctatacagagcctagccaatatgcttccctattccgtagtcggcttaaatataaccaaaccctaggtattatactacctaaacctaccaccagctaatactagccatataccagttgaaccagttcaattacccaatatacatcccatcctttcagcaatcaagccacacataaaatacaagtgaccctgattgcttaatcccctctagcctccaagcctttagaacttacacatgaaatactagcccaataatcctaataacctataaaagagataggctataccctaaaccctatccctcttaaccgtttatcgctttcttgctattttatggcttttattgaatttagttcttcctcttcttcaagtagagtctattgtattttggatgacaacctgtggtatttcgaggatcggataatcaggttgtctatctcggatttatttgcgttggagcaaggcaagttattattcctccccttgagcataattaccctatattctatatctctattctatgcattagccattcatgattttgaatgcataacctgaacatatagcaaaccagttatatgctagattttgcttagccatgcctagttagattgcataaaatataatgaacttagattggaatagtgtggtagaaatggttgatttccgggtggctagtactgttccaaccgacataagactgccaagtacatgtgaagaacatacgagtacgaccgcaattctcgtatgggcatagacctagctgattaagttatctagaaaaggtggtacctctgtatagtggttcttcttaagtcctcgcgcaggaggcaaatttatgccgcgaagggcaattgtgatatttaccgaggcgcaggtaaatatgagatttattgacgtcaacttgtttgtgaaccctgattgtgatgacatggtgtcatacaatcagttctctctaaagacctcgggaacgccaaaactcctctcgctgctgataacgttacgttcagagcgcatgggaactagagttcatggaacaggtaccactaatgttagtaactgaaaagctttgccatgacaaagctaatgtgtttggcacgtcatggattgcgggtaaagcgtacatttactgcagtaaaatataaatgaatatattcgaatagccgtgctcacggatttgagcattgggactcatatggtatttggttagaaacctaattccaaactttattaaatactgttgcattaaaatcattacaggctttctactttttctgcaagtaatcatagccctactcaaataccactatttcatacattcatattgaatttaatagcttgctgagtacgttgtactcacccttgcttcaacccctcttttcagagtcattttggaattcttatcgaagccgggagttcagttatataagttagtctcattctaacttagttctcaagtatagattagatagatggtttacgtctatagtaaaacactagagttgagtcattctatagcttctgctataatagttagccacaatcttgtaaataccctattattttatgtaagagaatccccatggaagccttgctcaaatgtatgcaatgaagatccagattgttgaacctgtatcaatttactgatccagggcttgatacagttaaacatgtcggtttccgaatcattagttttgggacccgacaattacgtatataatatttgtgggaaaaagtatagttggtgaaccttcatcgagatagtttcttacattttagttgattagtttcttacgttttttctaaagtttgagtacatttgtatatgtatttccatatcaatgaagctcatttatcttcttcagtttgacagtaagaaaaaaatgctacgaaagtcgcatttacactagtcattgttttgtgaccacaaattcgtccatgcgttggtccacatcctccataaatggaaaatgaggaaatgattagtcttcaatatttgtaagttaaaaaaataagtagaaaaaagatgggactgcatagctgctatttgagagatctgcatgctctacgcgagcgaaacaactgggactacccaaaccacatctatttatagcaattgcataagaattcctcaacgagaaagttggccaacgatctccattttgcactgtgcatccatgcctgttttctaaccccaggcgatataaatagatgtcatccacatcctccataaacgaaacatgatgatgtgattaatttttattatataagttaacaaaaaaagtaaagaagatatgtgaatgcattgctactttttaagaggtctgcttgtcatgcgccagcgaaataactaggactaccaagtttgcatctatttataggaattgtattagtaaatacgcaattggttccaaactttaaatagaagaaaaagctttacactaccagcgtgttagaaggaactagaatatatatatacatatatatatatatatatatatatatatatatatatatatatatatatatatatatatatatatatatatatatatataccattagttccaaactatatatgtaaagaactaataaattcttaaggcctaaaaacatgtagtggtggtttatggtccctcgtcaatcgtaagcccatcctcactcccacgccctctcgagcgagttctacacgcatgatgtcccttccgctgcatgaatggaagcacgcccccgacccccaccacccgatcaaaatcaatcaaccatcattccgcggcgcttgcctatggacctcctttcacgtctagctctcaacttgcatggatgtaacagcatgtgcacttgccaataaaaaaaatatcaattaaatttatagtgtactcttttttattgtacaatctacaccaagacctagaattgttggattattttcataaggccacgtgttcctccccacatacgcctcgtcgagttgtcatcttgtattcctatcaaatgtattgcatcaactgccgccaccgctcgatatccagctagctgcctaggtgtgctctaccaatttacttagcaccagccccatctcaccataaatgctaacctatgtcccctatcgagcagagccgcaacgggccagcacatgacccatctgtcaccgccatgattccatcaacatctagctgttgatggcccctctgtgacatatactatggatgctacacggtgcccctctatgtgcctggccatcactcctgaccgttagctctaccacccctctgttttctgttagcatcttcacccctaatattttcgtgtcttggtccatatcctccataaacggaacatcacaaatttttattattcgcaatttaaaaaataagtagagaaaacatgggaatgcatagctaccttttgagaggtctgcatgtcctgcaccagtgaaacaatcggaactaccaagtttgcacctatttataggaattgtattagagttgctcgacgaaaaagccggccaacgatctctatgccgcaccgtgcatccatgcctggttttctttgccccctgccaccataaatacacacccagctgcaatatggatcaccaaacacctcgatccatccctctacccttcaagaaacaagaaagacaacaccaacaaactagctagctcaccaatggcctcgttgtcctccttccggctcgccgtggcagtggcggcattgttggtcgtcggctcatgcgccactgaggtcaccttcaaggtcggtgagggctctagcggaaaaagtctagagctcgtcaccaacgtcgccatctctgaggtggagatcaaggagaagggcggcaaggactgggtggcgctcaaggagtcgtcgactaacacctggtcgctcaagagtgaggcggcgctcaagggccccttctccgtccgcttccttgtcaagaacggcggctaccgtgtcgtcgacgacgtcatccccgaaagctttacggccggctctgaatacaagagtggtatcaacgtctaattaatagacatgagtactcttgcattgggttgcatgataattattaacctctaaataattttgtcttgaaaaagatcacgctacgcgtgagcaagcaaacaattaatttcttgtggttattttgtggtaataagccagtggtaaaataaggcatacatgtgtccttccaaaacattgttgtggagctatatgtgaacacgatttcgaatatatggttgtgtgtgtgtttttttgaaataattcttaacctctctatgattccttttttttcaaaagagagatcaagtctgcatttggggaagccaataattaattttctatggttattttgtgaaatatgtcatcaacaaaataaagcattccgtatgccatgtctgcatgttgctgcagaggtatatatccagacgattttgagtatattacgtatataatatttgtgggaaaaagtatagttggtgaaccttcatctagatagtttcttacattttatttttctaaagtttgagtacatatgtatatgtatttccatatcaatgaagctcgtttatcttctttcgtatgacagtatgaaaaaaatgctactaaagtcgcatttacactagtgattgttttgtgaccacaaattgttcaactatgacacctgcagatactataagcatgatgcattggtacatattttagcttactcagaaggcagagtgcccacaaatcatgttcatcccatctccagcaccgaatgcgtggccatggataaaatggaaatgaatccaacttcgagaagagtaatctatgattcacgtcgtacaattggccaacaattaaagctttatcaaatatcagttatccgtgtgttgcttcggataatagaaatatatttaataatatctcaaattttgcaaaattataatggcatggttccaattttcccttctattaaatgtgttaataatatgtttgctaaagggaatattgatcctaatttaattttatacatagctttccatttaatgcttgtttttctaataataagatgctcaaaggctaatttatatattggatgggaataggtggggtggcagattcactgccaccagcactattttttcaaaggagtatagaccatcataataccagcgtgttacaaaggatctcaaataattatatttgattattgtgtggtttcattggctaatcaggtgcgaatttggtttctggataactggatttgctcctcctttggttcctgtccgtttcttgatttcctccggctttgcattgattaattccactgctctggtactggtgagctgtagaattagagattttagtacttttatttggtatgaacatttttttcatgaagtgtttgaatcattaaatcgtaacgagcgtaacagataatcccagattgcatcgttgccaatcatatattgagaaccgcaaaagctatcataatcacaccatcccgcttgttattagtggtgaaaatgtcagtgtcaatggaaggcgacagtgacaaccatcatcagttctttatttaagttttactctttttttcccgttacacggaagacgtatttgtggacaccatattcacctatccgtgaaaacgtcctctaacacaagctcaaaaaggcagagacaacggacatcactataaggccccctttgtttataggcttataagccaacttataagtcgaaaagtctaagcctaaacaaacaagcagcttttccgtttggcttttttaaagccataagccactctaacactattaagccaaaagttagattggagaagcttttttggcttatatgaggtagatgtatgactcaaccactaaacttaagacattaaatccaccggcttaaacaaagagggcctaaacttgttgaaagcacaacggtgtgttcttgatatactcattcacgtgctttcctt

SEQ ID NO: 5364 - DNA, 3454 bp, Oryza sativa
tgtttacctttttaaatctctgtcaaatatgcttatcttgccatcatgcagggagatgatccagcacaggccttatgatcataaagtagatgtttacagctttgggattgtcttgtgggagcttataaccggcatgctccccttcacaaacatgacagccgttcaggctgcatttgctgtcgtaaacaggggctctcgtcctgcaatcccgcaggattgtgtggattctctgagcaagatcatgacttgctgttgggacgcaaaccctgaagttcgcccatcatttgccgagatcgttgtcatgcttgagaatgccgagatagaggttatgagaaatgtccgcagggcacgtttccgctgttgtattgcggggccaatgaccacagactgaaactaatgcaggatagagtacagaaaagaaaaaagaaaagagagaggacaccatgatatcggtcgcgtttgcgtgccgatatggaagtctcatccctggccttcaaggtttaaaattgctgatttctactttatcaaatatggatggtaccttgtatgattgtatatcttagcaaagagccgtgttatgtaattctccgaaatgagctatcttgtgaaataatagcagctgtatttgctggttgatcagcagctgttgtgtgttctttgtctgaagcgtcgacctacttgtggtcatcatctcctggtcttgttgatttgagtcggttgtatatgctgccattctttgcgcctccaaatccatttcatattattctccttgtgttgttttccatatggatccatgatacttatctatgcctatcatctatgtcgaagtcaaatctaaaatgtatctgccggttccactccggtttttgattatccaggtaaattatgcagattttccaagtggttttgtgtcaccaaattctaaacacctatagtctgttgaacttccacttattggagtactccgttctaaaatactttctctgttccaaaatgttggcatttttttttgtaggaacagatattaaaaaagtaggtgaaaatattggaggaatattatgattgattcacaaaaagaatgtagatgaagaattattatgattggttgagagaagatgatgggtgaagaaatagctttattttgattcatttgggacaagattttgtgctaaaaataagaaacctttattttccataaaatctacattaatattttttttaactaatatgaattaaaaatgtttttggtggcatgtgtgtagtatcattattcgtattttaaaatatttatatatgatgttaattttgtagtaattgataatgcattatgacagaaattaatgataaaaaaaatataacgttaaccaccgtgtaaaaagctggtaagatgcacatagtacaccgcaccagtcagaaagaaaccatatgctgtccaggcgaccagaagtcaagcgcaacggcatatcggggtaaaatctctctcccttttttaaagagggataaaattactttaaacatgttaagatttcaaattatactattagacactgaaaaacagtatgcacagggaaaaatcatgtcttgtttcccgaaagagctaatattctgacaaatggttaggcagtagattgtacaacgccaagaacaatgaataatttgtacaacacgaagaacaaagaattgcacaacagcaattacattttgacagaaataaggttgaaactagcacactttgtgaacgcttgatacttagatgttggcgttcacaaggtttatctgaattatgggaaggtaaataaacacacggatatagcattgacactcggcagattggggcaagtcttggacgatcttggatagtccaggacgtgtgcttattcatccatactagcagcgaccgtgctggtgatcattgcaggcttcaatgtatctggttcagaccaaacattgaagactcgtaggaaggtttgatccgctctagatccggaaacacagtgttaccggtgtccattgtgaactgaaacacctgaggctctactgcttgatgttgtccatcaacccaaaagggtacattagagtttccttcgcttggtacactgggcaatgtgctgttttggttcgaattcgtaaattggatgatagaagatgtttggtgtccggggtcagtcaaaccccttgaactagctgacagaagagagagagcacgctgaacatctagtgctccatctagttttgaagcagtttcagatgcatctgcacctgcaaaattggaccatcaaagcattagagcgacagtcgaaagaaaataaaatagtggtaagtgataacagaaacgtatgaaatgaaaaatcaagcatacagcgccagtaaataaaactagagaaaatactactctcaagacacggtatctgattgtattgagcatatcaaggggctcggaggatggaaagcatttagcaataggatggatctcataagttcactcgtgcatagtggtcaatggtgtgatacctaggctataggtatctgccatgatgccacaagtgtaactggaatgctggattgctagtcctacatgggttgtgaatattcaaatatacatagtaactaggaaaattttcatttcaaatgttcctaacttcaaagatggggggaaaaaatctgcagccaagattttggcactgcataagaaacttgcaatgttgtgaaacaacaaattgggagtttggtttacagaaagaatgctgaactataaacctcaaaattcaaatatcaatgtacctacacatgtttaaagttcgtttcgggatagatgccagtatcaacaaacttgatgtatcaacccattttgggtagtggccatatggattttactgttttatttcttctttttactagtaatatgccagtgctttgcaacgtaccaagctcatacaattgaggattgggcgattggctgggtggatggattaaggataaaatactggatgctacggtggttacgcacacatgaaggagcaggcgactgcgcacagtgggaagaggacagaaggagaatggttgcgcttttaaggtagtagagatacatattatgctgtcaaatttagcattgtagcctatcttttaagcctgtcactgcacatggcatgaatgctaagtgaagtaaactaactttgtcagcataagtaaaattattcgagtagattaattttccattcatgatataaaaagatcatggagccataccttttattggcaagagctcatttgtgtcatgacaaagagttggcaaagcatttgacaaacggatatttgcactgtctgccccagcttttcgtgaccttttgcttatgtccatcacttgggagagctgtaagtcagatgtccacgaggaacttgaagtggtgtttgcatggttaagtggagcgttattatcccatgcgaaacttatttg

SEQ ID NO: 5365 - DNA, 8191 bp, Oryza sativa
gtgaaacggagggagtagctagttgggacttgggagaacttcaaaacatatgctaaccattatcgtttcaaaagaaaatcctttatttttgaaaattacatggagggaacgggtacacagatacaactaaattgtatatagtggtcactactcattagattaaattgcaccagtaaatcgagcactgaaagaaatataagtgtgaatgcatttatattaattctactgatagatctgctcatcttgttgaaaataaattagtgtttttgttcatgcagcgtgcaccaaactgaccattttcctttttacttttgaaaatgcaaaaacaataaacatgttgcaggttctgctgccatggacaacggccattcagtaggtgggagtgataactgtcaagaaggaaagggtcagcttacggcgaaaaagatgcttttcaaggctgccgcaagccatgtactcgtaaacaagcagtctatgagagccttcacagcaatacccaatcagttcgactagatttggatggctaagttgcccaaggtagttgacttctgcctggaaacaaataataaaactataagtatctgatatatgctgtttaatcaaacactaatcagtataaaagtactctttcaatgtccttgcttaaaatcataaaatgtaaataagtcaggtaatatagaaactacaataacaaacaactattatgatcattaaattgaatcgtaaaatctaattagctgatgaaggctgatagacttgtgtatagttcatcatggtttcaaaaaaaatgaaataaagcaaggatacttaccaaccattccttgtcaccctgaaatccctctgggtttaattctttcacagcaacttgtgtggatggaaagcccgctctaacattttcatcaattacacctttgtaaacaacaccaaacccaccctctccaagaatttggtcaggccggaagttttttgtggctgctcttagttcattatatgtgaaaatattaacatttccgtatccttcgatttgcaggtcctccacatcttttggaggggcaaggacacttgctgtagctttagaatcagatttgcatttccttaacccatctggcccaccagcttctgcttatagaattaatagaaaagaaaaaacatcagggaataatcaattacatacgaacattaagagctacaatgtggcgtgattattttgccttagtactttagttttttaattcatataacaccccccatacagctcctgctgtgcagtctctgtaatgttgttgtgcattatgtcaaaatgataatctgataagcataacatcttagtttgtaaataccactaacctacccaaaatggtgttcatcttctaacttaagaaacatgtgttccattgtgtcaagctacaatgtcattttgcaatagctctacagcaacaaaagtattcattgatcatcctccacgttcaagtggcaggttaatgtgcagctaaaggccatgacatgacaaaggaaggtcccaatttaatttggtatctcaataaaattctagaatagctccaaacacgcatttgctgctcatggtcctatatgcaggacaacatttgtcatctcttccagtctctgaacaagaatcttctatgcagaacagaccatttgcatctaagttatagggttactcgatacttccatccaaccaacttaaaatcttctagcagctttgccaatgtagttcaaaccaagttatgagctaaatttgacttgctgcagtttgacttttcaggaaccgtgactgcaaatttcatagacaacataccagtacatcataatatcgtgtcctctaccagccatcaaagagcaaagtttgtaccatgcaagtttcgtctttgtcaaagaaaaaagagaaactaagctacagatagaggcctgaatgtaacgatgtccaataagataaaacttttagcacttagagaatggcattcctcacactcgacactcagtcacagaagaatcaaacatcaaccacgcgatgcctaaaaaacccgaatttgcaacacgagttactacatgatatagccccagagacaaaattgatcctgtcggaactctgacataaacgagacagcaattctcgctcaaaaaccaaatcttctgaagctgaatatacgctgaaaatccatagcccccaatacgcccaaaaacccaaccgcacgactaaattcacaaccaaattacaacaaaaacttcacttccatgcaacatgcacacagctactactactactacaagcaaaaacacacatcagagactaagtaagatatatatagctcgaggcaagaaagaacacggacgaacctgtcttgccctggagccggtgctcctccagcgagaagcatccgcccatgggagcccccaacaccgcgcctcccactccaatccgccgctccccctactcccgcctccccatcgccagcctcctgccagatccactcccaagaacacacaccaccaccagtccaccaccaccaacccaagccccgcgcaccaacccggaaatttcgcccgcaccgactccgccgcttggttgggcggaattgctccgccgccgccgccctccgaccgccggtggatggatggattcgcgcgcaaccgtcgccgaaatttctggtgcgttcttggatgcggcttttcttttttcctttgttttactttgggcgttggagaagacgaagaaagaaaaaaaaaacaagaaaaagaggaggatttggattagctgtgccagagggaagcgagagtaaaaggaagctgctttggattaataaatgcagcaggggaagcaactggggagctgagctgaggcttggttttttttttcctttctttttcttttctctcttgttgctttatggttggattggagaggcttggagtttatgggggtttgattaatgtgctgcatggttgaaaagaggatttggccgtgacagtggtttagtttgggttttagttaggatggtttttttttctttttttgactgatggcatcatggttaattggttattaagtgatatatggccatatgagtttatttggtaaaaatatagcatcatatttttcacttaattttactcatttttttctttatgtgattgattcaaatatgcgcatgtttatgtttttgacagattgtttcaaatgcttaaatttaattagccaaggaaatatcatatacgtgacacgtctggctaaaattagggtttgtttagatcccatgacaaaatttttcattatgtcatattgaatgtttggacacatatatagagtattaaatattaaaaaaatacatagattacgtgtaaattgcgagacgaatcttttaagcctaattgcttaatgatttgacaatgtagtgctacagtaaatatttgctgatgacagattaattagacttaataaattcgtctcacagtttacagacggaatcttaatttgttttcttattaatctatatttaatacttcaaatgtgtgtatgtatattcgatgtgacacgtcaaaactttacacccatagatttaaacacctcatttgacacgattaaaagacacaagaacaaaacaaagctaggtctttgtaataaatttatcaatgagtttccgagggacagaaatccctgtgctgtgcctgtgatgcccttttgagttttttgacaatggcacctgaaatggaagactagcaacaccaccagaccagaccgtcggttgcattttgcattgcgaattcgcaacacggccggagagaggtttgtctcctttagctgttgaacctactgcccaaagactccaagaaacggcagaaaaataccccaacacggcaacagcaaacagcaactccacacgaactctacaactacaagttcgcaaaacaaggggctgtttccttgtcccggttcagcgcatgtccccgattccaggtgctcctcggatttgtttttcttttcatcatcaaaccaatcgatcgatcgccaccaatccatccatccatccaccgtgcgtatcaatcattttcttggccaccatatgtttggtgttctgggagacgcaatttggcgtggaaaaacaatgtgattggcatggactcggtacgcctaaatccgaaccaaatccaagacaccacatgggggcgcgaggcgtacgtccacatgggagcagagccatctgtattgtagtactactagtactccccgaaccattttaaatgcagtgaccgtatatcttattttaaaaaattattaaaaaaataaagataataagttatgcataaaatattattcatgttttatcatcaaatagcaacaaaaatattaattataaaaaaaataaataagatggatggttaaacgttagacacggaaatttgtagatgcacttcaaatggaacggagggagtagcattgcatttgctatgctttgggaacgagttgttttgtggttgcccaaagttgcgagatccaggtttggaaggttccatggaatgatttaagaaatggcattagcgaggagaggggatgcttttgagtgggcggcagcatggcatgaatcaatcaaccaccgtgtcaaagtgctcgccaccacccccgtttctccactcggttttgtttgtgcttagcggaatccatttctgtacgccttccaatcacatcctctgcccactaactccagcaggagtacacaacttgttattacaagtgtgacagcttcatcatcatcattgcaataactcgaaatcttagaaaatactggtaattgcggtggtagagtagatagatacgaaaccaatctggagttgtactttggtgaggacgcgggaacggaggattttcggggcggaaaacgcccaaaaaagaggtcgccatccactccaccaccacgcgcgcgcgcacgcggtttgtctctcgcccttcttctcccggtcccccgcgtgccgacccctcctcctcgcctcgtctcgccacgcgcgctcgttctgcctcgcacgacgacgtacgccacctgccaaagcgccaacccagcgccgaaccggcgccgccgattttacatcggagaccttgatcgagcatttcacgtctgccttgtaaaaaaaaaacgtactactacatttaaatttaaagatttattagttgttttacttttaaactttggaactaacagtttatttatcgaggaactcttatacaattgctataaataaatgcaaactggatagttctgattgtttcgctgacgaagggcatgtagacctctcaaaaagcacctatgtagttctatctcttctctattttttaaaaacttacaaccaacaaattaatcaccttctcatgttctgtttatggaggatgtgaaccaacgcatgaacaaattaggatcaaagatgctagtggaagacaaaggggtggtaaagctaacaatcaggagtaatcgtatggcacagaggggcacactgtggcacacatagtatatgtggtagaggggccatcaacgactcgatgttaacgccaccgtggcagtgatggaggggctcacgtgatggcctgttgcggctatgtgacatgggacataggttagcgtctatagtgaaatggggttggtgctaattaatatggtagagcacacctagctgaatatcgagcggtgcgtcagtcgatgtaatacatttgacagagatacaagatgacgactcgatgaggcataggtggggaggagcacgtggacataatgagaataatcctacaatgatacaggttttagtgtagatgctacttaacaattcttattcacgggaaccgaaagattcaattcgtactttgtagggctggtgttgctgctgtctgcgtaggctactagtcttttatgtaccagtatctcaccgacgaaaaatgagagataacatactttttttctaacttttttttttctaaaacaagactatagtttaaattcaattgatttttaattagcaagtgcatatattgttatgtccatgcagcgtgagagctacacatgaaagaaggtccacgggaagaactagaattcggcattataaagggggtagcgcacgagacctaaaagtggatggatgcggagacaagaatttaaaaaggttcaggccctctcaatgagaggtaataccctactcctatttagggatttgaattcgtcgggttgtagtattgatctgacgatcggattgtgaatctctgcccatgccccttggagggggctccttgcccgccttatataggttggggggcagggttacaaaggaaaaacctagccggacacgttatcagtatcctaatctattactccctccatcccaaaatataagcatttttggaccctgacacggtcttcgagatgctactttgactaacaatatctatagaagtaagatgttttaaataaaaagagttgtatattatgatagtttgtttaatgataaatctaataacatcaactttacatgattgatcgtttttattgttttgttattaatggtcaaagttaaaaatgtttgacttgtcactatgctaaaaatgcttatattttgggatagagggagtacatggtagtacccgattggggctttataccctgccttggaatacaaggcaacatagcgaccgagtcctactttattacatattctatatacatgatctatcccctgtaaccagtcggatagcccagccgtgtgggtatgcggtactcataatctccgcagaaagcgtcggtgaaggatggtggattgattttgatcgggtggtgggggtcaggggtgtgcttccattcgcgcagggaaggggacatcatgcgtgcgagaatcgctcgagagggcatgggagtcaggttgagcttaagatggacgagggactgtaaaccaccgctatacttctaggccttaaggatttattatttcttacatttatagtttggaactaatggtatattttctagatcctttgtaacacactgacagtgtaagcttcttttttctatttaaagtttggaactaattgcgtatttattttatatcctttgcaataggttggtattctcgtagtattatataaactttgttgatgactatagcttggggccttggccaactatatgaaatgaagcttaacttagcacctctcaaagctggcttcgcttccattctatccattaccacttattcatgttggagatatgtaacaccctgaaaattcgaccaacgaaatcaaaacaccaaaaatacagattttcaaaaactttttaagtaataaattgcatcatgccgattttattcgcctatttcattggattttgatctcggaatttattaatcgcggataatgaataactaactaggaataaaccctaaaaatcaagttggctaaataaataattaaaatataaattaaaataaatattaggtgggattggaaatatataaaatattatcgcgaccatattagcaataattaaattttagtacgatggaatgagaattaaccctaattaaaaattcaaataaattatataaaataaatatgagtgatattaaattagggtgaatttttagttagtataacacaaatatggagtaaacttcatttatgcaaaagttagaatttataggactatatttaaatagaaaatgggctaaaatcgggataaataggaaaagttactgttcattgcggcataggtgttcgatcgtggtccccctggccccgcccccttccctgccgcgtgtgccgcgtcgcccgcccgtcgcgcgcgccgccgccgctgccgcgccgtcaccgtcgcgtcgccgtcggcctcgcgccttgtgccgccgcgcgcccgtcccctcgcgcctgcgccccgccgcgcggccgtcccctcgccgtcaccctgcgtcgctgccgcgccgcccattccatcgcgctgagccccgtgccgccgcgcgcgtcgcgtcgccctgcctgtcacgccgctcgctcgccacccgccgagtcgcagtcccatcgccgcgcgccgtcaccatcgccgcatcgagccccacgccacccgtcgcgtcgcccgtctcgagccccgcaccgtcgccggtcgcatcgccgctccgagccccgcgccgccatcgcgtcgccgcccgcgcg

SEQ ID NO: 5366 - DNA, 3467 bp, Oryza sativa
attcctgcagcccagaaacgcgctgtactgcgttgcatgcagcgtgacacgcttgaccagactgcaataaatgctgttaggtgagcacagctgtgatcacttatcccatgtatgtggcgcagacttccttaaggggtcggggtgcctcggccctcggggccggggcaagcgcaacccgacccccccccctcgggggaaatcaggaggagggcggacacctcaccctcgggcccgacgtccccgaaggtgccaggccacgtgggcgattgcgtctgcctcaagcctctggtcatgatactcccggtcccatatcaccgacagatggaaaagttgaaagtttgaagaaaaagttggaaactaaaccagcccattgaagtgaaagtctgggttcttatacaacttcaaattatttttttcttaggtcttaacctacagtgtatttagtagtactcgtaaaactaagaggcttgaatcagtgtttgttcagttttcttttttactttaattacgtgtggttgcagttagaagctaacaatgaaggtttcgtgactgcagctgcgccgcagcaacattaccctaccaaatagtctcagtaaaaatttaaggaatttaagttgcattggagttatacaattcttagcttctattttcatattttgtgtaataaaattttattctatgtgataatttataggccgtcaatgtagtgatttttttttttaactatccttattataatataataaatagatgtaaagtgagctacctcaactggttatattcgttagattctttttttagtggaattaactcactaggggatgctcgcatttacatttacttattgtttcagtggtagatgatatatcctcgatagtgatgtgtcattcaagcatactcttgtatctcacattcctaataatttccagatgggcagtgaaaacaaaaccatactccaaaaacaaactgtcaacaaacggacactgattcatcttatatttttccatcttcttgttgatttcctgtagaactgtaccaagtttgcaaggacatcatcatctatacagaaaagtcaaaaacactcgagcaacaacaacactgacacatcgattatgatgtggatcttcctcttcccagagaatggtttcaagtttacaacacgaacttttcgtcgcggcaggcatctcacattacaaatgctttccacaacgctcctctctacatacaattgctagtcggaacagcaagaaacctaacgaggtagagttcttccgccatcagaaaaaattttaacaccaactttgactctgatcgatcttgacaacaagatggatggatggcaatgcgaaatcgccggtagcgaaaacttgaatcgtcataaaaaacttctgtgtgacttttatatcttgtacaaatcctcgtccggtggatcctttatgcttccatctctggaaggggatgacaatgcctccaggcctggctgctggccatcagagtctggagatgggatgtacagcttgcattccaaagacggctcgctcttgctccggccattccctggccgtgttctcctgctctgaggcacgggttttccatttaccggtgccggtgccacggtgaccgtttttgctgctggttgttcttgttttatcttctccggctcgacgctctccgtagggtcctttgcaacctcgtagagtgtcactgcacccgtcatgcagttctgcaagagtatgtcttggcattcaggcatgttttgcacagcctcaaaggtctcaacaacctggctcatggtgggtcgtcctttgggattctggctcaagcatcggtacgcaaggcctgccacctcaatggcagccttggtggagtactgcccttccattcttggatcgataatcctgaacagcttccgattgtgcacgaggaggggacgtgcccactcaactaggttgtgctcacggctaggccggctcttgtccacagccctcctgcctatgatcatctcgagaaggacgacaccaaagccatagacatcacttcgtgctgtcagatggcctgtaacagatcaaactggttagagtaacaatttaacatacatgatgtcagctacaatgatatgcatattcatacttaagaacattaaatgcactcaagaatgaacgggttggcattctaaaaatacagggagattccattgctcacctgtcatgacatattcaggagctgcatagccataagtacccatgacccgagttgatacatgggtttggtctccactaggtccagttcgtgctaggccaaagtctgacagcttggcattataatcctgcagaggtgacacagagtgagactgcggcagtatcataagataatcgtcaacatataacatcccaagatctgaaataagatatttagatcagtattccttgtgcagagttgcatggtttaattggatggatgagggcacacataatatctactatttaaagtggaaccatggaggaggaccagggacaaataaatgattgatcaagtgtttcatttgtaatcgtccttacatactttttgctgtgtcacactaataaattgagaatattaaaaagatttcagtcgaaatatcagtggtaaacaggactgtgttgaagagcaagcgggaccagatccaaactggtacgttattgagatcgctgatgtttagaatcttactgctgaaagaattgaatcattcattcatcagaagatttagtagctttgaccatgctggcagcaactgaaaccaccatgacggtttggagggcaagcacactattctatcactacttcagaatcttggattctgtaaagacagttatgggccttatggctagcatgtaggctaagttatccggttaactgttagttctgtcattccaagagttcagaacaatgtaggaaatggaatcttgtctgggttggaaagaacaaagttgctagagcctgatgagatggaattcctataacaagtgattgaaaaagggtaatgatatcaaagtattcagatagtagatgaagtacaaaccgcatctaacaagatgtttgatgttttgaaatctcgatatataattgatctctcagctccgtgaagatattccagcccccttgcagcacctagagcaatcttcattcgagtagaccatggcatattaaggcaaacccctgttatcaattatcatacgagcaagaagataaatcaacaaaagtgtcctttagcatggaaaaatacatgttctctcaatagatcaatcaaaggtgagcaagccatgcagcaagaaaatcgtttcttcttttttcactagtagcgtagttagcatgtgcatgcagattgtagaatcaactaaacagttcaactcagacaaaatcaactggccaacttgatgatacggccggtaaattaaatacttcctccgtttcacaatgtaagtcattct

SEQ ID NO: 5367 - DNA, 4660 bp, Oryza sativa
ctgttttttaaaaaaatcatgtgacttgaaaatcctgtgtttggattttgttgctaggtctgtttggatgcttggtggtgcgctgcaaccaatacaaacaatgtcgcaatttataggtagtcgcagcctcacctgccaaaatgattttttgagttagaactgcttattagagtgaggcattttttttcatgttttagaatttacataaaaagtactaaactgtggtactttagtttaatctacaaactattttctctagaactcacagcttagagccgtgccaaaaaagggcgtaattttggattagttaatactgctcccttcgtttctttttttttttagagttacatagtacaacgcagacactcacagcgcacgtgcacttatctctatgaacgtacgcacacaaactctacccatataagcatcgtcgaagactgctcccttcgtttcttaataactagcactaggtaatattcgctttagaaatttgatcacttgttttatttgttgataagtggatagccctttgaaggtgaggtttttgcttgtgttgtaaaggctttggcctgttttggattaggttggtggacacttttcctttcgtgttctcttcttttaatgaaatgatacacaatgaaatctattaacatttatctaacaatgtaaaaataattaatgagaaagtcaaaattatcaattattaacaaacggagggattattattttgtgttttcctccaaaaacctgaaaatttgagtgtcaaatttcggcctgttaaccttcaaacaaaatttcggcctgctaagtatttgtggggcttcgaagtgccagctcattaagctgcccattgacatgaccttttcgtgcgacaagtcaacgtggaaaaatccggcctgttaatctgcgggccgttttaacttacggcccgttatacgtacggcctattatgtttcggccctaagatttgggcttattaatcatgcggcccatgtaggcccatttaacaggccagaattccggcccattagtctttagataggtgggatttgatgatctctcgcagtctcatcatcagcctgtattcctttgtttcttttgggctataatcatttgattttctttttgaactcaaatcgtttcaaataattgcataaaatcacgcagattattcgccgatgcgaatcagaatcgtcccacgctcactttaattaaagtcacactaaaaaaatactccctctatttcacaatataagttattttagtatttcccatattcatattgatgttaatgaatctagatagatatagatgttaatgaatctagatagatatagatgttaatgaatctaagacatatatatctatctagattcattaacatcaatatgaatgtgggaaatgttagaatgacttatattgtgaaacggaaagagtactaaacaagaacaaagattccaatttgcatctgaagttgtatatactttattaatcggcgtcatggagaaagagatttgcgattaggacctgacgaaacggaagccgccagccgatcgcttttgttgacttcaaacccgggggaaaatcgctggccggcaaacgatcgacgacgtgcgcgtccggatccaaacacgcgtaaacaattatggatgatgatacggtacgacgacgacggtggtggcagaagaaattcggcgaaatttgcttgatttccctagttaatctactcatcaattgggatgaattggaccacatggtttgatgaatctaatgtgtgtgctctggtcagtaggttcgagactttgggttgactgataaagtgctaatgcagccatgatgcgagatgatggaatattttactatcttcatcacaaaatatataaaagattttctacaatagtaaaaaaatacttggatcgtcttctatttaagagtttggtaggataacattagcattggttatttttcagttacgttagatagggtggtatgactaaaagttcatattaaaaaatagtctactttaaaattagatatttaaaagttcaaaaacaatacaaattctcagattaagtcgattccaagcggaattttaatacaaattctcatatgaatgttgttgtgttagtatacgtatccgtgatgtatttgaacaaataccaagttaggcatctagaataaattattatgttttactaaatacaaatatgtagtacatattgtggacactcgagtttgctaaccgtgtttaacacgtaaggttaaacaatatcatcgtcgaaaatagagaaaaatgagaacaaaacaaaataaaatagcgaaagaatactgagatatttacccccagtatagagaagaacaaatttatattaaaattatgaaattttaatgattcattaatctcaagatatatcagctcaatcttccgaaggtactcgtagacatggatgtacgtgtgtacgaagcgtacacacgttaaaataacttatattgtgggagtgagtttgcaggtgccatgagcttctacgttttaattgcattccccgtaaaagatagtagtaccaatgtttcataatcagcatccttcctagcgtagttgtgaaaaaaaaagggaaaacaaaaaggagatcgttgtgcggtgcctcgacgagacgacgatatttccccttcccctcgtcgtcgcctccgactccgactccgactcctcgtgagctcgccccgccgcctgcgccgccgatcccgcgaggcgcgccgccgccgttcgtcctgctgcttccgccgcatcccggtgagcatccattcatcctcttcctcatcgctgtgtacccactcactttttttttccctccaattttgcgttgaaccctttggttgttcctcttctagacctcggaggaagcttttctcttaatttgccttgaaaacttgacacgaatagtagtttgcttgttccccaaattttgcgttgaacccttgttgtttctcttctagacctcggaggaagcttttctcttaatttgccttgaaacttgatacgaatagtagtttggttgttccccaaatagtttgggggttcagtttattagatccgcccctgttttagcataattttgatggtatactttactatatgcgtatttaggcgctaatcagttttttgttttgattctagataccgtgggagcactgaagaaaactgagaaatggatgtttttcagcgattctactgtttcgtaaagcaaccctactgttagtgttggttgtttgaagatgattgaggggtcaaggtttcagaatatgttgggcggtgctggaattggaggtggtataggttgcagaggaaggcaagaaaacgagatgaatggcttccacaatatgccctactaccacaaggtcggggagagctcccacatgtccgtggataacgccgacaacctgaacatgatgaactttgttggtggttcggttgccatgtcggtggataacagcagcgtgggatcaaacgagtcccgcacggtcatgctcaaacaccctggcctccgtgatatgccggcgccgagttattcggttcacaatagcgtcatccatccgaaccgggctatggcgcctactctgaatgaggatgcattggctcgggtattgatggatccaagccatccgacggagatacttagtaattacgaggagtggaccattgatctgggtaagctcgacatgggagctccttttgctcaaggggcatttgggaagctttatcggggaacatacaatggagaagacgttgctattaagctgctggaaaagcctgagaatgacccagagagagctcaattgatggaacagcagtttgtgcaggaagttatgatgttgtctacgttgaggcacccaaatattgtaaggttcattggggcgtgccggaaatcaattgtttggtgtatcattactgaatatgcaaaaggtggatctgttcggcaattccttgcacgaaggcagaacaagtctgtgcctctggggctggctgtgaagcaggcacttgatgttgctcgggggatggcttatgtgcatgccttgcgatttatccatagggatctaaaatcagataaccttctaatttcagcagacaaatccatcaagatagctgactttggagttgctcgaattgaggtacaaactgagggaatgaccccagagacaggaacctaccgttggatggcaccgtaagtcataatcacgcattcacgctcattgcctactgtttacctttttaaatctctgtcaaatatgcttatcttgccatcatgcagggagatgatccagcacaggccttatgatcataaagtagatgtttacagctttgggattgtcttgtgggagcttataaccggcatgctccccttcacaaacatgacagccgttcaggctgcatttgctgtcgtaaacaggggctctcgtcctgcaatcccgcaggattgtgtggattctctgagcaagatcatgacttgctgttgggacgcaaaccctgaagttgcccatcatttgccgagatcgttgtcatgcttgagaatgccgagatagaggttatgagaaatgtccgcagggcacgtttccgctgttgtattgcggggccaatgaccacagactgaaactaatgcaggataga

SEQ ID NO: 5368 - DNA, 5031 bp, Oryza sativa
taaactaactttgtcagcataagtaaaattattcgagtagattaattttccattcatgatataaaaagatcatggagccataccttttattggcaagagctcatttgtgtcatgacaaagagttggcaaagcatttgacaaacggatatttgcactgtctgccccagcttttcgtgaccttttgcttatgtccatcacttgggagagctgtaagtcagatgtccacgaggaacttgaagtggtgtttgcatggttaagtggagcgttattatcccatgcgaaacttatttgctgcctatcatctgcaataacatttgaaattaagaaagagaaacttttagaaaattacaaagacaaggagggaaactacccaagcattattaaggtcaatggtaaatgattttttgattcctcaaagaaaacatgtcaggagaacgaataaatgcatgctctttgttttgatataccgtccaatagattttgcattgacaaaatcccaaactaaagtggcattaatataatacagtagtggctaaggctactatcccatatggccatacatgctattattttcatagaaaatagtgaaggatccagctaagcattatttcagggaaatacagtgtatgacatcgtgagatataatcttgattttttttcagatattaaatatgcatcacatcagccaaccaccaacaattttctccaatatattactagacagaaactacaaacaacactgtgattgacttttgtagtttatataggtcacgagggtattaccaaacagtgatcgcggtagtgttccagagccaaaagcaaacacatctgtctgtggtttccgtcgacgggcattatgatcagaaagtcgtctccggcagctccgtttctcctgatcaaactccgaaggcgcgtggaaccttgataatcccaagatagaacaaaaaaaatcatcaaaacgacataaacatgccgcaaaacgtaatgaattattgtttataaccacaattaaaagcagaatttggtcacagggagtttctggcaaaagcagatgcaagaatgcaactatgcaaaatactactatctacacatagcaatcactcattgtactaacacacacctctttgctgaaaatacacattcacatagacacgcaagccacaggccgtcctaccagaaattcaggaagccttgccttgcacagacaattcactgtcttggcagctttccagatgcagggcgtacaggcaaattctagcacagtactatcgacggggaaacaggatcttacctccccaaatcaggcaaggggcagagaaccttgtgaccaatcagtcatgcacagagtttcacactgtaccagcacaaaatggccacatacatatttataccctatcttttactgcacaggtagtatagtaatagtcgtactaatgattactactatgcacttaggcatatcgaagcaattcaaacagggcgcgaattcgcccaatcgaatcactaacggggcgattgaatcaattactagtagaactttagggcttgtttagagagcttcctgacggccgcagtttctccagtctcctaagagaagtcagcttctccagattctcaccaactatgcttctcagaatcttaagcgcggtattggaggagaggagagcgagaggggaaggggaggagggctgagtggctgacctgctgcactgctggcagaagcggcggtcctggccggcgacgacgacgcggaggcacttggtgtggggctcgcagacgcggtgcttgcggtagtactccttgtagcctcccagctccagcccgcagccctccacctggcaccgcggcgcctccgccgccaccgccgccgcatcccccgctgctgccgccgacctcccacgcttcgccgacgccgacgccgacgacgaatccctcccgccgcgcttcccgggcggcggcggcggctcggcggaggcggtggcgtcccagtcccagagcagggaggaggaggtggtggaggagacggggttgcactccatgggcgggatcccgggggtggatcggagtcggaggaggaggaggagacttggggagggaggagacgacgcgggtggaggagggcgagggtgtgggggttatagaatagggccactacagtgtggggaaggaccggaggtaggggtagtggggttggtctctttgttttccttctctttttttccatcctatttggtgatttttgatatgtttggagtagtgtcaatttgtgccaagctaatatttcgggagttttaaatagtactttgatagtatttggattgtaaccaatttttgcctagctagtaataaatctacgcttgacactaccaacattttggtagggcctcaaaccaaatcagctctttatatttattactccctctgttttttaatagatggtgtcgttggctttttaatacatgtttaatcattcgttttattcagaaattttatgtagctgcataagatataaatcatgcttaaagtactttagtgataaaacaactcacgacaaaataaattgtaattacataaatttttttaataataacacgaatggtcaaatgtgtgttcaaaaaagtcaacagcgtcatctattagaaaacggagatagtgttaattttactccctctatctccaaaatagactacatttgttcgggaaaatatgtaagtgtaaatcgcaatgtagtaaatacttgaaaactatcattggattaaaaaaatagatgcttgagatttgtttttaattcttggtgatgtggacaaataccatgcgtctattttttaatacaacggtagttttcagttttcactgtgtatatggtttaaactatatattttccttggtataaaccatccatgtatgcataaataacacgtctctatcttctaaaattattttttagtcctctaccctcgagatcttttattctattagatgcgtacattgaatttattgagatgattcaaacaaggatgcagttgactagtttgtataaatatttaatgtttatgataatatttgattaaaattttaaagcttttgctataaatattttcttaaatgtttagttttgaaacaagaaaacgatatgcctatattttttttcttcaaaagtaataccacaatatacaaacttattagatttcataaacttactttaatataaaattgatgataaaagtttaaaagtttgaccgaattttgctctaaacgttaaatatttgtaagcagtgacaattatatagtatttgtaagcagagattgttatataaggttgtattagtttatgcatatagcatagagctatagaaggaaaataaaaatgcaataggccatgacaaaaccataaaaaaaaaaccttcaaaccgtgtgccgacgctgatgtgcatatgatttttttttgtcaaatactatattatgcatgtcaacgaggagcagtaacgacctaaccaatatctatattctgagctcagttctcaacccgtctctaaactttgaaaaccttctagaaggtcatgcacggtgctaccacatttaccttaaaataagttaatctagcactagatatgatatattctagtattgtaaatctaaacatgcaatacatgatttcgaaaggaagtatattaaaacatgtagacaaggcagtatgctcatatttagacacagaactatatggtttagtattttcgttgtcaactagggttgcgtgtgtacttgatagtatggaatacccagagtatataactacaattctacaactattagggaatgtctatagttaaaaaaatgtaccctgctatatttcagaacctattgccttatgtaggaatgctactaaccttttattgataatggtacttggtaggatgtaaaggaatatttctcatgctaatgaaaaaatacattatgagagagcatagatttttggttgtgtaatgtattgacctatactagtgttggagctcacttgtcattgagatttacaatccattctttgtcgtatgggcggtttttaaatattatctctgtttttcaatatgtaacgccattaatttttttataaatgtttgatcattcatgttattacaaaaatgcaaatataaaaaagttatgcttaaagagcatttgatgataaatcaagtcacaataaattaaatgatggacaaatgatcaaacatatctcaataaatcaacggtgtcatatattaagaaaaaacggatggagtaactcagaaagttcagagaacggaatgcatcttgcattatataggtgccaaaaaaaccctaagatggagccggtcaagactcaagagatggagaaaattttcaattcttttgacaaatgacaagtacaggggctacgaccaatttagggagggaatgtctgtgcgaacagtacaataactaggatgtttcatgacttctcgaacaagtatgtacacaagggaaggtggacattagagcaattttaatagtatagcccattactaactttaaatcatctatagccaatataatagccaattcatacaataattgcttactatactattaatacctggtcccacctatcatacacacattatgtcttgaaacatgtgctgcagctggctacagatctgtaacccgctgctcttctctcttttcctttatctttttaaaatatgtttataactggcttatagcctgctattatacctgctcttaggacttgggacttgggaggctctggttcagctactagttgatcaaatgcgaaagattgacttggtaggattttttattctttttttcctttttgaaaagaagattgacttggtagttgctgatcgtatgcctctcaatgttgcatgagctactagtagttaggccgatagtcatacaatactttgaccatcattgagacgcatatgaaaatccgctagcttttattaagagcaaattccctgactagattatcatgaaactacagatttcaaaggg

SEQ ID NO: 5369 - DNA, 7074 bp, Oryza sativa
ctctccactgcgccgccactctcgtgccgccgcgccgccgctctcgtgccgccgcgccgccgctctcgtgccgtcgcgccgccgttcccgtgtgctgccacgccgccgttcccgtgccgccgcggcgccgttcccgtgccgccgtgccgccgctcccgcgccgccgtgcgccaccgtcgctgccgccgtcgtcaccgctgctgccgccggtgagccgccctccttccccctcgtgtccaccgccgccgccgctctggtgggagagagccaagagagagagggagaggaaaagagaggccggcagagagaaaaagagagaaagagagaaaagaaagaaaaagagagagagagaaaagaaagaaaaagaaagaaaaagagaagagagaatggagaaaaagaaaaggaaaaataaatagaaaattaggaagaaattaaggaggttaatagtttaagaaaatctaaaataattagaatttaattatagattaattatggtcatagaattgcaaaatttaatataaattatagattattcttggtaatttctacaagaaatcaattcgcggtagtagtttaactgtaattaggaactaaacgattagatgaattcttatagactattatagattattttgggtaatctctataagtaatcgattcacggtagaaattcggatttatttactagggattttagccgtatattatatttaatcatttagtcatagactaaattaaatcatataatatttctaggatttcgtccgatatttagctcgcgatagaaatctctaacctattatatggatataatgctcgggtagattaaattaaaaacttatgacaacaaaacatttatacccgcaaaatagtttgaatcgaaattgggtttgccttagttcgcgaataataaagttaaaataaaggaatcgactttcgcgttcgacttccatttggatttatttggattttttatttgaattctaatcgaatccaaatcagttttcgcacgtaactatagagcccgagggagttgcggatccaagtgaaggccaagacccccaagaccttgagcaaggcaagtcatcactattccttgaacatgttgatcccaattgcgaaattattttgtttataaataaaattgcatgcaatgatgaacatcctacttgtgattatgccatgccttgattattgtttatcccttattccttcgtaaccatgtttacgtatgagtccctagtcaattatgacaattgcttagaaatgctattctaggatcatgcatactcatatttatcaaatgctaaatgcttgggcaattacctttgggaaggtaattgagatgcggtatgtggagacatgagcgccacattgccatgaaattgataacatgatttgtgaaaggaaaataaagcgaaaacaactgttttcgactggggcggacggatgatttgggtggtatctggaaaaggctagtaccgtccccagtcaattaaggaccgagccatgaagttaagcatgaaacgacccccgtacaactgtacttctcgaatgggtatagacctagcggattagatagccgagcggaggcagtatccctgcatagatggttcacccctgagtgaggcaggtgcgctacgatgggacagccgttgaggtagggccgagaagcgtgccctacatcggtgtcgccattggtaggactgccatgagtatgtgagagagagaacttaacttgaaccataatttaatatgtgtgtgagacttctctttcctgggagcgccagaactcctctcactactagaaacatggacgcctagagtgcatgaggatttaagttcatggagcgggtactgccaatgcgaggttatcgaaaagctttgccgtgacgcgtctcatgtgttgggacgaggctcatgtgttgggcagtcgcggagtgcgggtaaagtgtacatccactgcagtgtgagtaaaccaaatctattcgaatagccgtgctcgcggttattgagcaccgggacatgtattacacttggctagactctaaattcttaacctgtgtgggatgggatattgcatgatgattttttatgctgatggagccacttcctgagaggagggaaggtggacgtcctcagaaaaccatgacgactcaatggcgggaagctatccttgggatcacaatggatggtggacagaaccgtcgttgtttaatgtgaacactggtattaaaacttgatcagtctatgctaggtcttaggtttgtgaaaagaattacaaaactggcttagcgcaaaagagccatagccatcctttgaaataccccttttcatatgcattgttgttgtggtggcttgctgagtacggttggtactcacccttgcaaatataaaattaatcagaagcaggagataaagctttggaggatccctatgcctactaccaggagggagatgaagacgatggcgctcagtaggtcttagtacggtcgttgcctgtggcaatggcatgccgctgcgcctgaattccgctgccttatctatttctgcattttggatgtattccgaactgctcggtccgatgatttaagacaatgcctgcgggcttatgatgtaataattagcactagactctcgtgtatgtgcttttggtatttcagctatgaactcgtgtgtaccagactacttgatccagggaaatggtactgtttacacgaatgattcctgttataaaaacgggggtccagaagatatgattagttaatgtgacttacattttgttttagcatctgaataagctaaacgatgtactgattctttatacttatagtttcatgtcacggtgtgatcgattcaacaatttgttccacaaaatttttaaaaaaacaactgtaaacaatatttatgacaagctaaaagggagaaatgggctacattgatttggacatatatatgtactaaaattttgagaaatcaaatacacacaatcgtcttaatgaaagctaaccaaatataacatttttccatacatccactataaacagcatatatttgaaatcgtgttcacatatagctccacaacaatgttttggaaggacacatgtatgccttattttgccactggcttattacaacaaaataaccacaagaaattaattgtttgcttgctcacgcatagcatgatctctttcaagacaaaattatttagaggttaataattatcatgcaacccaatgcaagaatactcatgtctattaattagacgttgataccactcttgtattcagagccggccgtaaagctttcggggatgacgtcgtcgacgacacggtagccgccgttcttgacaaggaagcgaacggagaaggggcccttgagcgccgcctcactcttgagcgaccaggtgttagtcgatgactccttgagtgccacccagtccttgccgcccttctccttgatctccacctcagagatggcgacgttggtgacgagctctagactttttccgctagaaccctcaccgaccttgaaggtgacctcagtggcgcacgagccgacgaccaacaatgccgccactgccacagagagccggaaggaggacaacgaggccattggcgagctagctagtttgttggtgttatctttcttgtttcttgaagggtagagggatggatcgaggtgtttggtgatccatgttgtagttgggtgcgtatttatggtggcagggggcaaagaaaaccaggcatggacgcatgatgcagcatagagatcgttggccggctttttcgtcgagcaagtctaatacaattcctataaatagatgcaaacttggtagttccgattgtttcgctggtgcaggacatgcagacctctcaaaaagtagttatgcatttccatgttttctgtactttttttttaaattacaaataataaaaatttgtgatgttccgtttatggaggatatggaccaagacatgaaaatattaggggcgaagatgctagtggaaaacagaggggtggtagagctaacggtcgggagtgatggccaggcacacaaagggccaccgtgtagcatccatagtagatgttgcagaggggccatcagcagctagatgttgatggaaccgtggcagtgacggatgggctcatgtgttggcccgttgcgggtctgctcgataggggacataggttagcatttatggtgagatggggctggtgctaagtaaattggtagagcacacctagtcagctagctggatatcgagcggtggtggcagttgatacaatacatttgataggaatacaagatgacaactcgatgaggcgtatgtggggaggagcacgtgaccttatgaaaataatccaacaattctaggtctgggtgtagattgtacattaaaaaggagtacactataaattcagttgaattttttattggcaagtgcacatgtcgttacatcctgcaggttgagagctagacgtgaaaggaggtccatggccaagcaccggggaatgatggttgattgattttgatcggtggtgggggtcgggggcattccattcatgcagtggaagggacatcatgcgtgcaggactcgctcgagagggcatgggagtgaggatgggcttacgatggacgagggatcataaaccaccactacattttttaggccttaaggatttattagttctttacatacatagtttggaactaatgatatattttctagttccttttaacacgttggtagtgtaaagattttttttctatttaaagtttggaaccaattgtgtatttactttagatactttgcaatagattgatattctcgtagtactatataaactttagatggatcgatgtgttttgtgatccatgttgcagctgggtgtgtatttatggtggttgggggtgggtgggggggtaagaaaaccatgcatggatgcacggtgctgcatggatatcgttggccggctttttcgttcggagctcttgtacaattgctataaatagatgcaagatggtgattatattgttattttatattgttaggtgccaaattccgctggttgataagtaaaaacctcgggaaagagggtgatgatgcaccgagagtagtattgatctagagattcattacaatggcctcgggtgtacatatttacacccatggatagatactagtccttgtaggacaagaaagaaacttttctaaagttaaaacggaaacataaagtccttattggacactaaacacactttcctaaagataaaagaaaactaacaaactattcctaattaatagataacttgccatgttgtatccttcttgaactcggtcacttcggataagcttcctttaattcgattaatttccttaaccgaatatagcaggaatccgactattggcgatgtgataattttgattggccgattataggattctgaagccaattctgactctagtccgatgatgtcttcggggcttatcaaatttcgctgctaacagatgtggcaatattaccaaattcctaaaattttggcattgccaaaatttgttaaggtttatttcgaaaattgcgtgcatgcatcaggcacccgcacctcccacgcttgcgcgccgcctccaccaagtgcaccatcacagacgttgttgcaacaaatcaactgcatattacggaaacgctatagtaaaggaatccgtttcattttttgttccaccaaaaatgtttcagctagtgtactcgtgatgtttcactatgtacggatcaaatgttgcagtgaattgaaatagtattttgctatttgttgaaatattgtttttatatagagtgaaacaacgtctgattttttggaaaccgtttgtatcatacgttgtagcaaaatgttccacgaggtgatttggttgtatttcagctttttaaaagactaaaacattttcgaactacttagtgaaacattctcgatctacttggtgaaacaacgctcgatttttgaaaaaaaaaaggtttattttgaatacaatctgaacatgcctttagtcaatggctcactgctaaataacaactatacccctattttttcccctctaaatttctactaccgctaactaggatgacagtagaaagcaacatgaacccttcgatcaaatgagatcaacggttcagattattttctacaactaaatagcaccaaagtgaggctcgcttttttattggacagattactagaggcgtctgttggttggtgtatggaactgtacgggtagagctcgtcgtggactgtccgggtggatgacattgtaaacgcgtgacctgtgtacaccgaactacgcgtactggagtgtgtgtggaggaccatgtttagcctgccatggacgatgcaagtcaacaatttcacacaaatacggagtatatagtacacagtgctagccagctagagagtggactagtccactgttttgttcctgctcatcggttttgtggtcggttggcaacttgtcgtgcttgctggtacagtacgtaattagtttaccggcgactttaggaggctattcatgtcaacgccggctgcagcctgcaaatgccagtaccgtgtaattctcgtgtagttccaacgtcgtgtttgtcaaaacgtagcactggatagcagacatgccccaactgccatagtacttcagagagaatccaaatggttcaaccatacgggctcctttttcttattatatatgccttgttcggttcggttatacgatttaaatgatttttttttctataggaatcatgtgctagatcttcaaaatgtattggttccataggaataaaaacatctactccatcttctttgttcagctcactaaaagaaaaaaaatatgtcttgatccttagtattgcatatacattcctacgcaattccactgttttttaaaaaaatcatgtgacttgaaaatcctgtgtttggattttgttgctaggtctgtttggatgcttggtggtgcgctgcaaccaatacaaacaatgtcgcaatttataggtagtcgcagcctcacctgccaaaatgattttttgagt

SEQ ID NO: 5370 - DNA, 23484 bp, Oryza sativa
catgtcacgccgtaccacagcgacacgccggtgccggcgccggcgcaggggccgggggtggtggtggcccactggctgagcggctccggcggcgcgccgtgcggcccccgcagcgccccccggaacgccagcagcgtggcggcctccggccccccggcggccgccgccgcggcgagggcgagcgccgccgcggcctgcaggaggaggaggcgcacggcggcgacgccggccatgaggcgggcgggcggcggggcggcggctaccagtggcggtggcggtggcggcgacgtgcgggaggcgtgcggcgcatgcgcgggagggtggctaaagaacgggaggcgcggagggggaggagggacggggagggagatcgcgaggtgggggagagagcagctaagaatagcgcgggaagcgtgtgtgtgtgtgtgttggtatttggcgggaggcttaggcttaggcttagacaccgagggagaagaagaggaggaaaaagctggcgtttggtgtgggagtcgccgctggagactgcaacgttttcttgttcatcacttctgttttttctttgtttcggttggcaatggcttatttggctgcttgctcgcacattgacaaagggtttgtttgggagctggatttctcagctccttacttctaatttattttctaaattctacaaccacagctttttataatccgaacagaaaaatgactatttggaaaagatgtatcagctagaagcttctccaaacaaactcaaagactatttggaaacaacgcttctccaaacaaattcaaagactatttggaaaccgttgtttctgcttatatgtaacatttatggctaaataggatgtaaatcttagtgacttaagttatacatcaacttaaatcaccacactactattgtttttccctacttgagtgatattctctttattttttaatatatgatgtcgttaacttttagagatatgtttaactaaattttgtacaaacatgacaataataagtaatgtttaaagaacttttaatggtaatcaaatcacaataaaataaatgataattatatattgtgcaaacatatataattaaaagaaatggtgcaaacatataaaaaatcaacggcattatatattaaaaatgaagatagcatttatttggatttaaaattgtctggagcgaaaaataactatttttacttagggtgaagacaatagacctccagcaaagctcaatgacgaaaaaaaatatatatgactttttattaaaaagaaagtacctttaaaaacgtgataatctcttgggttatacaataattttcataaccaaaccatgcaggctgccaagaatgttgagaaagttgtctgatttttcttttaccagccaagttgtcttcctttttttagataatggattatattaacccggcctctacaccttagaaggtgtacacaacccaaaccacaatcaagagtacataagactcaacccattacatggggataccaaatacatggggataccaaataatagtttaacaaaacggttaaagaagaacaatagtctaagcctcaattctggtgtgtttagttcacgccaaagttaaaagtttggttgaaattagaacgatgtaacgaaaaagttaaaagtttttgtgtgtaggaaagttttgatgtgatagaaaaattggaagtttgaaaaaaaaagtttggaactaaacaagggcctagtgtagttgtatgctatatgtagatcctttgcagtactgtacgtgcagtattgctaactgacatgtcagtctaagaatctgtgagacccatgtgtcagcgagcggtactgtatgtacgtatacgtacggtactgacatgtcagtctaagaatctgtgagacccatgtgtcagcgagcggtactgtatgtacgtatacgtacggtacttcagaggaccctctctctcagttcagagctgtatgatgtttactctttgtccatctagcagcacatcggcaagttgttcttttttttttctaaagcacatcggcaagtttggctctccattttcactatttttgccagtgacacatcgatctgcacacctttaatgccgaattaatcacaacattttcacttctggaagcgaaatgcgcgacaaaagctttggttaatcacaagagatgcgcccaccgacaaacgcgctgtcttaaagaatttcgtgccgccaactcgcgcccacgattcaagagaaaaatcacgagtacgtggcccatgaattatagtatatacacacatagaacatagtcacatacatcatgcaaaaaaaagttatcgcacgacaagaacaaggcctagggataattatatatgtgattagcaatagttgtagatgatgttgttgctgctgggatatgccttaagttgatatgcttttgttctctgaaaatcatctgaacttgacagctatatatgcccatttctatgtcacattcatataaaatggtggaatgtaccttgattttggtcgtgatattgttgttttgacagcaaatattggtccaggaagatgcattggtctattcgacatctgcagtagaacttccaccgattgttctaccttcggatcataaattattcgataatgtaaatatgttgaagaaaacttacagtgtgaaaacctgaaaaagcatgcacggcggcctcttctttcttcagagtttagttcagagagactttgaccgtagttgaacgaatggtgtaagcaacactctttcagtctcagataatacaaaaaattccagttgatggatacatggaaactaggaagcaggtcagatttcctacaggagagtgctgcttataggttcactgttcaaccagaatgatctaagtttcatctcgggaatccaaaaattcagattttcgattgttgaatcagtatatcttgttctgctccaacaggaatatgactgttctgtttaatcaacaatgaaacacctttgtctattgaaatcctcgtatccaacatcaacaagacagagcccatctggaggcgctgggggagcagtagctcgcctgcaagtggcttccatcaggttcagcaaagcatcttcttcagcaccagcagctgcctcccttatggcagtcgcaacaagaaccctaaccatctgttcaatgaaatttactaatattaactagaattcgggggacgactggataaattacaatgccatgaaacaacttgatgtataataccttgcgcagaaacctgtttgcgactagctcaatgcatatggccctggtggtgccttcttcacaattctgcaaaaattgggaaaacggaatggaacatggtattaccagttgaaatgatatatgtgcatgcagaatgctaattgaaaaaaaaaacagataagggagttatcgattgcatagccatgatgctaaattttatgagtccacataatatatttagttttgatatcagcaactcaaaactatataatccacaattgcatacacgtcataatgccatactcaagctatgccaatgtccagcaactaaagttaaggttacaaacgcgataccacaaaataatactgttacttttatgtagagattagcagtactagaatggaagcactgggaagtaacctgattcctgacatagtatattaccagcaaaagttacattgttattttctggtttaaaagttcaatgtattagactagcatcacctcatcagcagtgtgtagtttggccactgcagctcgagaatggaacatgaaacactctgtaggtggaccactgcaaaacaacaaaacatcaacagaagtttttttttttttggttgaacttgatggcgagcataaaaatagtgacatggtcatttacaaggaaaacaataatgttatattccaacaaagatgaacaaatatgtcaggcctaggtgattaattatcataaaacagcaagagaaccacttttgtacttgaaaaatacacaaatacacaatagttataaacttacacacttcgtgaagcttgtgtatcacgtgcaaacatcttgtaagatagtgattttccttccagttgtctaatgattttgtcaaccttacccacatcaaagctttgaggttttatgttgcactcaggaccctctactgttttagcggactgttcttcccctgagattagttttacatcctcgtcaagaggaaatatatacaggtatctcctccatttggctgcaaaattagggtgaaattcacgtgagacctgcaaattatgccatcagttaataacaagcgtagcatcacccatggtggatgtcttgacattctaagaactttacatgaaaaatggacaattctaccactagcagcaatgcagcatacatatcaagtgcagtcatatattctgaaaaagcaaaagaaaaatacctgtgacacatgcaaaggtcttagtttatcaggtgcagccttgtttattgcatcctttatatcactagactttacatccttcctccatgtatctaaggaaattagaagtaaatacacatgtcagctatcaggagaagtaatgtatctagtcccatggtgtatctcagcattccattagagttaatttctcacataagtacacaaggattgtctatttatttgtgcaaatgagttcttcatgtcatatcaaatgaaatgaatggcatgcattggtggagttagtcaaataagaaggttagcagttcattgcacgtaggccagagttctgcactgctatatctccaggctattacttctttgataggaaaacagtggtgtatttggtattgacaaattgttgtgttaatgattttataatcagaagcaaattacttgttcaaatgcttctgtaaacaaagcaaaattttcaaccaaaaaaaaaaaaactctacaaaataactgcacataagctcttcttgagaagtagaccctccatcccaaaatataaggtattttagagttggccacagatattaaagaaaaaggtaaacatgatggatgttgtgattggttgagatgaggaagtaggtggagaaactaaatggggattggtgcgattggttgagaggtggaaaggtagctaaattttggaacaaagggaatagtttgtaatatgacatgttcataaaagtggataattagttgaaggaccactggaaaacaatagtgtgttctcaggtgcaactaacaaaatgagcaaacttgctgaagggcagtcacccctttgtctgtgcgcccagcaacaacagcacagccttctaatggcaatgatcttgcttcaagctgtttagctttcttctcgtcaacaaactggccaagatgtttttctactaacctgcaagaaatacagagtgcaacaaatggttttatcctgtcatctgtcttgagatgcaaaggaagtgaagaataaaagtgccagatatgtctatagaaatgacataactccattcttatttatccttacccttgaacagtgttgaggccaggctgcttctgccaaccatcaaatgaccccccatgatatgaaaggacaatcttgaaggttactctttcccatcgtcctcctcgatctttggatgatttagttgatgtttgattttctgatggtgctgtgtaatcttctccattcgtatcaaggctgtaaccattctgttgaagaaaaatccgataaatcttactgaaacaaactaaaagtactagaaacggacctgcaccgacaaattccaaaatctactctatcctccaagaaaaaatgtgttcacccaaaagatttcaatttctctaaaacgatgtgtactacttagatggggaaaataccaacatttggctcactaagagaaattgcaactaatactaacacattttccccttcccatttactgaatgcgaagaaccactacctcagggtttcacatggataattctagaaacaggcctgcaccgacaaattccaaaatcttaatctatcctccaagaaaaaaatgtcttcacccaaaagatttcaatttctctaaaacaatgtgtactacttagatggggaaagtaccaacatttggcacactaagaggaattgcaactaacactaacacattttccccttccaatttaccgaatgcgaagaaccactacctcagggtttcacatggataattatttaaaaaataataatatcattccttctcacctcatccttcccaaacaaatcggcgagccccgctgccccggcgccggtgcgcacgagctcggcgtagaagtcgaccaccctgctccacggccgcgcgtacatgtactcgtagctctccctgccgcagccgcagtgcccaaccaaaaccaaaacagttactaccaatcaagccccaagccgcagataagccctagacgatggaggaagtgatgggggggagccgttacttggctgtccaccggaggtggtggcacgcgtcggtgtggttgtagtgcgcgtgttcgtctccctccgccgccgccgtggaaaacgacaaagccggagctggcttcgccgccgccgccgccgccgccgccgccgtcgccatgaggggccggagcttcgcgagcatgttcttccctttttctttttgaccgtaatttgaccgtaatttttttcaagaaaagaaaagaaagatggttgttgtacaatttgaatccatggattagcacaatttgaccgtaatttttttcaagaaaagaaaagaaagatggttgttgtacattaccttggagagaaatttagagatccttatcctctcactctcactctctcgttctctctctctcccactctctctctctcgttactcttcaagccggctgacgggggcaaggagggggggcgtccaggtgtagatcggggtcggagacggcaattctggtggcggctaactggcctggcaacgcagatcggtaagatgggtgtatgggcggcgcggatgctaggggacggcgacggcgaattcgatgcggcgtctttccggtcccctctcgcacagatccgtcatcagctgcgacgggaggggttggatccggcgacctgttcctctcccgctcagatcccgttgtctctccgtgccccgctcacgcagatccgccgccggtgttaacgggagggtcaagatccggcggttctaccgtggtcgtggcctccctaccgccgccgcctctgcacgcgcggcccctacgccgcccccgcccctgctgcctccttctcccccacgccgtcttcgatggctgcgataaggggcggcggcggcggcggtgggaggcgctagaggaagggatatgaaggggaggcgcatggtccggtgggtgaagaatgaagaagtgggcggtcgatgagatggaggcgaaggtggcgagaggtggtcgccaagacctccgtcgagcatctggatccggcatcccttatcctagcgactgatggcgctggcgcgttcctcatccatctcgatctgacagcgccgccgtaggaggaggtcaccatctaccagtccaacgacgccaatgtgagtcctcaacccaatcatccagacactttcctctgcatcctcttttgattttctcttctatccaggatacttggtgctatcttttggtttgtgctttcaccgataagtcaggggacccggtgttggttgctaagcacatcgcatttgaggatgcaacttctttttaagtccttatggggttcaccacattccattagctcatcagatttgtctctgcttcttctggtggagaaccgtgtttgacaacactccttatgtagtcatagtgtccaagctacatacactgcagataatctagttgtgtattaatctacatttcttcagatcttcagaaacatcatccggctcactggagctatgctgataggcaagccttacgggagaaacaatgtccgcattatactgaatttctttcgaggccaggctgcggccggctgagttcgaggagagttggcccgcgccgtgcttgccaacgaccgacgtccttgactcgccgtcagttccagccactgcctcccaggtgctttattttttaagacaatatatcatgttgttgatgtgaaattttgggatcatcttgtatagtagtaatccggttgcttagaaattagaatacggttcttatctgagcttgtgttttgaaatgtggaattgctggacaacagttttgtgatcatgcttttatgttgtttataatatcatttacatcccatgttacatattttcctttgcttaaactaaattgagagttgaatccactgtcatttatttgtttcaagtattattttttgtgattctcagcattacattttcactctgatactcccaccgttccaaaatgtaatgtgttttagttttatcctaactcaaagttatcttccttttagaaaataatctgggtatttgatgcaagtacagtatgatctaacctggtcagcattcttatataatgagttattctttgtaatgagctagaagttatagatataatttattcgttaaatccatagtatattttcatcacaaaattaaaaattagaagtgattttttgcttctctctgaagtcatgagtacattgtgactacatatgatggtgaaactggtctggtagaggggtcaaattatctgttagtaaaaaaacttgaagcatatattgtttaactttattagatttagcatgcgatgagctttgctgatcaccttcataattaatgcaatgtgcgtccttaacatttggaaggacatttgaatccttttttcgcttataggcgtcatgacgtttcttaagtattccttcttttcgtcaggcattttgcgcatacagctttgtgtctctgtcttcgtgtattgggatctaagaatggggacgatgatccagatggcgcatctagcttggaagatgaagctgtacataaacattatcaacaacaaaagcatgatgtatcttctcgaaaacaacggtgagaagcaaaaataatttaatcattcacttatgttttttcagctgattttgttcatttaaatgagccgcaggatgtgtttatatatgtgttggacttcgatggaatcaattaatacaccaattcttttggtggggattattctatctcaatgttgagatagcttgcctgagcaaggtcagttatcaattttgtgcaaactacagccatactactgcaaccaatttttttttctcttccaatgtaatatctgatcacatggttgtttcctgctctgttttggttgcgatgtgcatgcttcattggtcatctgtttggaaacactcaattctgacatgtaccaatgtagtaccaaaaatttcatgtcttagtttgctatgccatgatgcttgatctaaagaaacttttgttctgatatgcgatagaggttccacttgattttctaggcaagttattcgttattgttttgttttactaatgttccataatattcttttatgtgttctctatatgcaaatactgttaagtttttttttatgctttacttatgctatttgaaatacctttcacgttatggccctaggaagtaataggggaactcaagcaacagttatgtacacaaaacaccaagctataggccaaacatttaaactttatacgtaggtcttcttttgtgtgcgcgcgtagttaagggaaattgtttggcagactatacatccgaaatcagaaataagtgtagcaaataaaaatataatgaagtaatagtggtattattttggttaatagtttggtgtgataatttttttttggatttgctaaatttctggcaccataaaattccattgattacagtcggtttgcatgcctatgcgctatgccacacaaccgcacaggcctgaggcctcccaactgtgcttccgtgaggttgaagattatttccacacatacatcatgatgagagatgattatatattaattacatatatgcaatttcgagacttacatatgtaattttgagacttacatatgtaagtttgtgacttacattgtaaatacaataaaattgcatatgtaatttataaacttacgatgtaaatacacaccgactattttttggtgaaaaatatggcgccataaatatagctactccccttttttttagctaatagaagatggatggttttttcttcagaattactaataaaagatggttgcctcttaaataaggtatgagatccgatcaatctggtgttaccttgctgagcttggtagttttatttccatgtattttttccctcttaagattgactgatttatgttaattgttcgttatatgtcataaataatgtatacatcattaaggtctaaagaattaccttttatcgttataaatgcagtaaaagcagattgagtctcacaccgaacatgaattgctcagtttcaaaaaaatatctgggtatatgagtagcgccgagcagagattgcttagttccacaccaaattctgggtgcatatattagtcttgtttgtgctttcagttttattctatatataggttgagaagttgtttgtatcctaatcggtcatgtaattcttatgtttgggttctatgtaatttatgtgctggactgaatttgtaattcctgggcaatgggcccaaaaataccgcatgcgggaactggagacggacagctaaaaaaacgcgtgcattgaaaaaaaggcggactcactaaaaagagcgtgtgcgcaaaaaaaaggtggatgggcccacagaaaaccgcgtgcgaaaaaaaccctgacggacaaaaaaaaccgcgcgaaaaaaaaacggacagaaaaaaaccgccgtgcgcgtgtgggaaatcggcgacggaccaaaaataatgacggaagccttaagaatttttttattaggtatagatttgacaaatttcctttcctacatgtgtcggtcagtgtatttccctgcatggtttcctatcaaaaaaagaccaagaaaacaggtgtttggttgtgattagttcacgctaaaattagaagtttgattgaaattggaatgatgtgacggaaaagttaaaagtttatgtgtgtaggaaaattttgatgtgatggtgacggagctcgtggctcctcaccgggagaccgcgcaggcccccctttgccggttcggccgggggcttagggtgaaatctcaagctctcgctctccctctgtatctggaaagatcgtctgcccgcaagacacacgagacacgacgatgtatacaggttcgggccgctgcgaagcgtaataccctactcctgtgtttttgtggatttgtgtatggacaagttacaaaggatcgacttcctttcctctcagccttccgaaaggaccaaaaatcccccgttctaagctctaaatctcgaaaagaatcccccccctctctatgggcaaggtcctccttttatacttcaaggggataccacatgcacccttccctttccaaactggacttttcttctctttatggacggagattggtatggttgctgtccgaatgacactccgatgggacagcccacacctacctccactcccggcggagacaggcgcaacgtgggatcgtggctgcccgttgctgacgcgaccagtgccagaccggtcattcttgtccaccacgcgtcagcttaacaacgtgcatgtttgcccttcttcgtgtaacaccttgcctgtaatggttaggatgaagcctggtataaatctgaccagggctaacgtgccatctctaagagataacacgctagctccagcttgagacgagtgcctagaggctttcgtcttgacgggatggggcaaggcgtgcgtcagaccgccagtcgccacctaacccgtgatctgaccggtctgtgactggtcacagaccggataaagaaacgcgctgtactgcgttgcatgcagcgtgacacgcttgaccagactgcaataaatgctgttaggtgagcacagctgtgatcacttatcccatgtatgtggcgcagacttccttaaggggtcggggtgcctcggccctcggggccggggcaagcgcaaccagacccccccccctcgggggaaatcaggaggagggcggacacctcaccctcgggcccgacgtccccgaaggtgccaggccacgtgggcgattgcgtctgcctcaagcctctggtcatgatactcccggtcccatatcaccgacagtagcccccggcgttatgccagagcaatttcccttcccaagggaagcggtcaggtgtgacgccacccctaaagcctggtgacaggtgggaccggtctccgtagttgggcaaaatacccaacggtctcaatccatgcacattggtattggtaactttggttgtccataatgggcggtctattcaagactgccacgccacttgagcagcgcgcgaatctgggtgagcagatttgtctcgcccggagatatggtaacgccgcttcggtcggcgagcgtaattaacgcgcgcacgatacaatccatttcgattgccacaaccgcatatccactcaatgcgccgcaagcgggcgaatgggattagtggaagcgtgggcacgggaaacgagggagcgagatagcgagatacgagggagcgaggtagtgggcgcgagaaacgaggagtcaggcccagcgatggcaagggtataaaagcatcgagaaaaggatttgcttccttcctttcgccattgttcctcttgccttcgccacctgagctctaactctttctctgctacgccctactttcgccacacgcgctcgttctcaatcatctcttcctccgccgccatggcacggggctctgctctgctcgacggcagtgtactaccgccttcccgcatcgtgaatgagaggcacgccggactgccgcgccgcttcatgccggagtccgccaccggtcgggagatagtgatgctgggcgaggggcgcccggcaccagactacccggggcggtccatcttcttcctcccctttgcgatggctgggctggtcccgccattttctcatttcttcatggatgtcctggagttctatgacctccagatggcgcacctcacccctaatgcggtgatgacattggccatcttcgcgcatctgtgcgagatgttcatcggggtgcgcccctctcttcagctgttccggtggttcttcaccgtgcagtcggtgtcaccgccgtcggtggttggcggctgctacttccagccgcgggggccggtgttgaaccgctacatcccctgcgtccttcgcaagaagtgggacgactggaagagcgactggttctacacccccctcgccaacgaagcgcgcctccgacttccaagccagcccccggcgcaggtctccagctggcgggcaccggtagatctgggggaggactacgacgccgtcctcgaccgcctggcgggcctgcgatcccaggggctcaccggggccatggtgtacggcgattacctccgtcgccggattgcgccgctccaacggcgcgcccggaacgcctgggagtacactgggcctgaagactacatgcggacccaccagggagccagatgggattgggctcccgaggacttcaagatcgtggtccaaagggtgctgaatcttagctccgcggaggcgtctcgcattcctcaggagatcctccccctctgcagcgatcccgaccgcgcctccattctaaccattatgatgggggtcggggcctcagaggagagagcccctaagggccacgacggcgcgggcgagcgccgccgaggggaacaatctgccccaggagggggtcgtgcttctgggccccgcgccgggggctcggggagcagccgccctgccgacgcccaggggaagaggaagctgggaggaacacctcccccatctcctccccgagggggcggggcggcgcgtgccagcagtcggcgcccggagggggccgcgccgacgtcgcagcccgagggggagcgcaagaagaaacggctccgcaagacgggggagacggaaccatgccgggggaacctgatttctcctccaaggtggtcattcaaccgaccccctcgcaggttcgtctcactctcattgcaaccacctttctcccaaagagaagttttttcttactcattttgttcgtcttttggttttttcttctgcttcagcgatgtcccgtcgcattcctcccgccaccccaaatccggccagtccgaggccgaagatccagcggccgcagaggagcggaggcgagagtctgaccggcgtgaagccgcagcccgccttcgggaagctgaagaggccgcccgggttcgccaagcggaggaagctgctcgggaggaggccgcccgggctcgccaagccgaagaagctgcccgggaggaggccgcccgggctcgccaggctgaggcgacagctgctgctggcgcgtcacttgggcctactcccttgggcggccctcaggcgacatcctccgaggcggctcgcgacgaggccgcgggcgcatcgcctgggcctacctcaccgggcgacgcccaggaccaaacgggcccgggggacatccccgagcccagcgcatcctccggggggccaagccgcgtcgccttttctccaaggcggctcttctcctcatcttctgtcgccccgctgagcgccgagccccttctgcaggccctggccgccgcaaacaccgcagtgctggatgggttcaacacccaagtggaggccctgcgtgcagaacgagcggagctcgaggccgcatgggcgcgtgttgaggaggggcggcgctcggtggacgccatggtggaggtgggccgtaaggctcaccgccgtcatgtctcggagcttgaagcccggaaagcggcgctggcggagatcgcccgtgaggtggaggaggagcgggcggccgccctcatctccaccaccgcgatgatcgaggcgcaagacactctccgccttcagcacgcaagctgggaggcggagctgaagaaaaagctcgacgccgcccaaggggtccttgactccgccgctgcccgagagcggcgggtaacggagactgaagcggcgtttcagcggcgcgaggaggcccttgaggcccgtgccatggcgctggaagaacacgccggcgccgtggagaggggcttgacggaccgcgaggccgccgctggtctccgagaggcgacgctggcggcgcatgaggccgcctgcgccgaggaggagtgcgcgctccgcctccgcgaggacgcactcgctgagtgggagcgagctctcgaggaggctgaggccacgaccaaacggctggcggacagcctgtcccttcgcgaggcggcgcaggaggagcaggcgcgccgcaatctcgaatgcgtccgcgccgagagagccacactggagcagcgggctgctgacctcgaggcgcgggaaaaggagctggacgcaagggcgcctatcggcggggcggccgcgggcgaaagcgacttagccgcccgcctcgcagctgccgaacacaccgtcgcggaaatgcagcgagcgctggactcctccaccggggaggccgaggcccttcgcttggcgggcgagattgggcccgacatgctttgggatgcggtctcccgcatgaagcgcgccggtcgtcaagcaggcctctggagaggccagacgacggtgccccccaccaatctggaaggcctcgctccgcacctcaacaggatggcctgggtcctcgaacgactccccgaggagctcgagaagaccatcaagtcatcctcgagggacctcgcccggggggcggttgaactcgtgctagcgagttaccaggcccgggaccccaatttctctccctggatggcgctggaggagttccctcccgggaccgaggacgacgcgcgcgcgcgcgtcggggatgctgctgaccacatcgtcaacggcttcgagggctcggcccctcggctcgcgttcgcccccagctccgacgaggagggcgacgccagcggcgaggacgacggtggcgacgaggccggcgacccgggcgcatttgaatgagcccccaggcccccgccaatcttaacttttttcttgttctttcttctaaggccttcatgcctcttttttgtacaatttaacttaatctgcaatgagaaatgatgaaaaaatttttgtgttagttttattttgctatatgtgagatgaggatgatctgtgccgtggtctttttgcgtcttagcttgaaataagggcccatgcccaagtcccagtcctcgaaaagcgcgggtcggggctagtgcctggggagatccgcatgtcgagactggccaggccgggaacgtggtgaccgagggttatgggtgacccaattgtgggtttttgccgattcccccccggagttcaccacgccccggggcacggctcggttctgggccccgtttggcgattttagctgaccgaaccgagcccccgagggcaaggttgagcacgagtgacattatttcaagtcaagattcttcaaaaggaaaaaacggcacagacacaacctttagaaaattgaaactgcttttattgaaatgctgaaataaaggaaaaagggatatatgtgcatgtgtggtagcccccggccaatcctgcacacccgaggggggtgcggggttggcccgagccaaaacctgacacccgaccccccccctttcaggggtagaagcgacgaaggtgttcgatgttccacgggtttggcagctccgtgccgtcgcccgtggccagccgtaccgagcccggccgggggacaccgatcactcgatacggaccctcccacattggtgagagcttgctcaatccagcacgcgtttggacgcggcgtaggacgaggtcgtcgacgcagagtgatcgggcccggacgtggcgctgatggtagcgccgcaagctctgctggtagcgcgcggctcggagggccgcgcgccgccttcgctcttctaagtagtagaggtcatctctgcgaagctgatcttgatcagcctcgcagtacatggtggcccgaggagacctcagggtgagctcggatgggagaaccgcttctgcgccgtagacgaggaagaaaggcgtttccccggtcgctcggcttggtgtggttcggtttgcccagagcaccgctggcaactcctcgatccatgaatcgccgtgcttcttgagaatattgaaggtcttggttttaaggcctttgaggatttctgcattggcgcgctccacttggccattgcttctggggtgggcaggtgaggcgaagcagagcttgatgcccatgtcttcgcagtagtcgccgaagagttcactagtgaattgggtgccattatccgtaataatacggttaggtactccaaaacgggccgtgatgcccttaatgaatttgagagcagagtgcttatcgatcttgacaaccggataagcctcgggccacttagtgaacttgtcgatcgcaacatacagatactcaaacccgcccggggcccgtttgaacggtcccaggatatcaagcccccagacagcaaatggccatgacagtggtatgatctgcagggcctgggccggctgatggatttgcttggcgtggaactgacacgctctgcatcgccggaccagatcgactgcgtcattgagagctgtcggccaataaaatccttgacgaaaggccttgccaaccagggtacgcgaggcggaatgggctccgcactcgccctcatggatgtcagcaagaagctcaacgccttgttcctgaggaatgcatttcaggaggattccgttagccgcgcgccgatagagggtcccttctaccagcacgtagcgtttggaaatgcgttgtacacgttcactcccttcgcggtcctcaggtagagtcttatctgtgaggtatgtttggatctcagagatccaggcaatcaatctaagggagcttggagcgctcccttcgggtcccgaggcctggactccgacgggcctcgggggccggtcaggcgcatccgtctcccctaaggggtcgggtcgcgccgacggctgggtaagcctttcttcaaaggcgcccggtggggtctgggctcgcgaggacgcgagccttgagagttcatcggcaactatgttatcccttctgggtacatgccgaagttctatcccatcgaaatggcgctccatacgccgcacttggcgtacgtaggcgtccatctgtgggtcagagcaccggtactccttacagacctggttaacgactagctgggagtcgcctaataccaagaggcggcggatccccagtccagctgccactctgagtccggcaaggagtccctcgtactctgtcatattgttagtcgctcgaaagtcgagacggaccaagtatctgaggacgtctccgttcggagaggtcaacgtgacccccgcaccggcaccctggagggacagagaaccatcgaactgcatcacccagtaggtggtgtgaggcagctgcgaggggttcgtgctggcctcggggattgagacggtctctggagccggggtccactctaccacaaaatcggcgagggcctggctcttgatagcgtggcgtggttcaaagtgcagatcgaattcagaaagctcgattgcccattttaccacccgtcctgtaccctctcgattatgcaagatttgcccgagggggtaagacgtaaccacagtgacccgatgcgcctggaaataatggcgcagtttcctcgaggccatcagaatagcgtaaagcatcttctgggcctgagggtatcgggtcttggcgtcccggagggcctcactaacaaagtagacgggccgctgcacctttcggcggggccgatccccttcgctaggggccgtatccccggggcgttcttcatccaagtggcctctcggggtgcactcgtcttctgtgccgatgacctcggggtcggaggacgacaggagcggccttcccacagtggcctcggggccgtcctgggggtcgggggctcctggcgtcatcggacaagcgggcaaggggccagctccggtcgtcaggggcctcaggcctcctttcggctcgggggcctcttctccctgctctctcccgggtcgagtcagcacagggttagcctcggggccaaagggcgataagtgcggccttccctcagtggcctcggggccttcctgagggtcgggggcacccagcaccgtctgacaagcgggcagagggccgactccggtcgtcgggggccttaggccaccgttcgactcgggggcctctcctccctgcctgctcccgggccaagtcggcacagagtgggggtgcgcagaatgaggattgtcctcatcgcgctccacaaccaacgctgcactaactacttggggggtcgctgctaagtaaagtaacagggactcatttggctccggggcgactagaaccgggggagagctaagatacgcctttaactgagtaagggcatgttcagcttcctccgtccaagtgaacggcccggagcgcttgaggagcttaaacaagggtagcgccttctctcccagccttgatatgaaacgacttagggcggccatgcaaccggtgacgcattgcacatccctaagtttgctgggggggcgcatccgctcgatagctcgaatcttctcggggttggcctcaatgcctcgggcagagaccaagaacccgagaagcttgcccgcaggtacaccaaacacacacttatcagggttcagctttatgcgggcggagcggaggttctcaaaagtttccgctagatctgaaagtaaagtttcttggttgcgcgtttttacaaccaagtcatcaacataagcctcaacattacgtcctatttggctacccaaagaaattcgagtagtacgttgaaaagtaggacctgcattctttaacccgaagggcattgatgtataacaataggttcctacgggggtaatgaacgcagttttctcctcatcctccctagccatgcgaatctgatggtaaccagagtatgcatctagaaaacacaaaaggtcgcaccccgcagtggagtcgacgatctgatctatgcgaggcagggggtaaggatccttaggacatgccttgttaaggtcggtgtagtcgatgcacatccgaagcttgccgttcgccttgggaacgaccaccgggttcgccagccactccggatggatgacttcacggatgaatccggcctccagaagtctcgccacctcctcgcggatgaaggcttgacgttccggggcctgccgccgcactttctgccggaccggccttgcgcccggccgcacggcgagacggtgctcaatcacctccctggggaccccgggcatgtccgctggtctccatgcgaagacgtcagcgtttgcccgcaggaaggagacgagcgcgtcttcctatttgccatccagaagaccaccaatccgtgtggtcttggatgggccgtcgcccaaggcaacctccttgaccgggacctcgtcgcatgtggcaatccgctgcctcggggcggtgggggcggaggtgccaagcctctcgtcaccaccctcgggcttggtcgcagcagcgaggtggtccgcgcgctgctccatgcaagcgagcgcgactttaaggtcgccacggacagagatggggcccccggggcccggcatcttcatctggaggtaggcgtagtggaccgccgccatgaacttcaccaacgcgggtctccccaggaccgcgttgtagggcagactgaggtccgccacatcgaagttcacccgctccgtgcggaagttggctgatccaccaaaggtgaccggtaggtcgatgtgacctaacggccatgtgtgccccggcgtcacaccgatgatcggttgagacggctggagcaccatccccggggccttgatagcatcaaaggccgtgggggaaaggatgttgagagccgctcctccatctatgaggacacgccccaacttcacgttgcagatagtgggggaaaccaccatcgcaatctgccctccccgggcaacgcacggtgggtggtcggtctgatcaaaggtgagggccacctccgaccaccgcgcccgacgcgtcgcctcatgagtaggggccgcggctagaagctctcgcttcatagccttgaagctccggcgagaaacgtgagcacacgctcccccgtcgacagtggcaatggtggccccaggttcttggaaacctaggtcatcatcaccgtcatcggggtcaacggcgggggccttctgtctggcctcacttcgccgtctaccggagggaactgccgcggacttgccctcacggcgttcctgcctcctgtcctcctcccacttcctcgttcgctcagccaaatttttgactgcacgacagtccgcgagatcgtggagggaggtgttgtggacggagcaccacttgctggctgggcgctcccggttgggagtaccagcctctttctttttgtcgctcgcaggcctcccctttcgggtggcccgcggagcgccctcgacggcgaggacgtgcccctcgtcgccggaatgggccgaccttttcttcctcctcctgtcacgccgccctgtctgagcggcggatccgggggcggccgaagctgccacaccggaaccggaggggttccaggtccaggcctcctccttacgagccactcggtccgcgagctgaaaaagctctgcggtagtctggggctctttggaggcaatcttttcgagcatgcggttgtgccgcacaccccccctgaacgcgtagatcaccgcgtgtgcagggatgcatggtatagtattgcggacttggcaaaaccgctgaatgtacgagcgaagcgactcatcatcgcctcgctgtactgcatgcaagtccgcttcttcgcctgggcgcggatatgtgccttggaagttcatggtgaactgttggcacaaatcttcccaggagtggaccgacgcgggtggcaggttcattagccaaccccgcgcctgtccttttagggccatgggaaagaagttcgccatgaccctgtcgtcacccccagcggcctcgatcccggtcgtatagacctggagaaactcggtggggttgacgctcccatcgtacttctcggtgatggtgggccggaaccttgggggccaacggacattccgaagactcgccacaaaggctctacagccaacaccaccggccgggggcacggagggctgatcttcacgtccgtgtcgaggtgacattctggacgaggaggcgccctccgttgcacggggagtacgccggctattacgcctgcgctcgatgttgaggcgggcatccggctccccatgctgatcctcccgagtcgacggtgtcgacgagggagtggcagccgaatgacgtgcagccgccgccgctcgccgcgccctccgccttgatgacacggagccggtggtagcggcgccggaggtcttggtggtggcggaccgtccaccagcacccaggcgctgctgtgccgtcatgaccaagttggccacgtcttccagccatcgttgggctggagactccgggtcatggacgacaggcgggtgtcgtaggagcgcgccagcagcctgaagcgcaccctgaggcgtgctgccgtcgccgtagacgaggaggcgacgctccccatctcgccgttctcctgcatcacctgcgactggtgatgccacggatttgtcgaccctctcaagcgcctccccctgcttagggctttggcgcggaggaggtgggggagtacgagctcgacggcgtggattcggctccccgtcgtcgccgctcacactcggagagaggtcgtgcgcttttccctgctcggccattaggctgaacaagaaaaacttggcgcacacggaagagtctgagagctcagaaaacacacgctgagccccctacctggcgcgccagatgacggagctcgtggctcctcaccgggagaccgcgcaggcccccctttgccggttcggccgggggcttagggtgaaatctcaagctctcgctctccctctgtatctggaaagatcgtctgcccgcaagacacacgagacacgacgatgtatacaggttcgggccgctgcgaagcgtaataccctactcctgtgtttttgtggatttgtgtatggacaagttacaaaggatcgacttcctttcctctcagccttccgaaaggaccaaaaatcccccgttctaagctctaaatctcgaaaagaatcccccccctctctatgggcaaggtcctccttttatacttcaaggggataccacatgcacccttccctttccaaactggacttttcttctctttatggacggagattggtatggttgctgtccgaatgacactccgatgggacagcccacacctacctccactcccggcggagacaggcgcaacgtgggatcgtggctgcccgttgctgacgcgaccagtgccagaccggtcattctt

SEQ ID NO: 5371 - DNA, 15490 bp, Oryza sativa
tggtaggattttttattctttttttcctttttgaaaagaagattgacttggtagttgctgatcgtatgcctctcaatgttgcatgagctactagtagttaggccgatagtcatacaatactttgaccatcattgagacgcatatgaaaatccgctagcttttattaagagcaaattccctgactagattatcatgaaactacagatttcaaagggtatattataaaactatagatttagctctaaatttatcacaaagctatagatttagatcgtttcagaaaattaaatatttagtgatgaagttatcatataactatagatattttcaaatttagatctatagcactattattttttcaagttacagaagctaaaattttgtggtaatattgatgttaattatttagtttagtgataatgataaatttgatgctaaatctgtaattttaagatacatttttatatataatctatagttttatgatattttgataaaaaaaactgtaattgcgtaaaatttactcttttattaataacgagtctttttgtttttttctctttcttggttttcatggaaatataatctcgatggtcaaacacaacactgttaattcgaacatcaaatttctgcacgagttttgtatcatgttttgtactaggaaagagggctttcaccactttttttttcatgcatcctatagagacatgaaaatgatcatgccgatcgacttctcttattttcttaaacgtgtagaatttgctcatgtgattgttgagaaataattgcctatgtcagcagtagagtataaaatcattgtcatcataaaaggaggcattggtggtcgttttccgtttctttcggttgtcttttcgtcgtgaaaaataagaacaattctttgataggagggtttatgtgtgataatgacgatgataagatgatcaacccattgtcacaagtttttcccttgcttctcaattaccctacagttttctaatacctattcaagtttttaaatattttttgtgcccttagtattgcacacttaccattttgttgtttgcaccagaaaagtacaattctagatattaaaagggaaaaataagaaatcagtactaggtttcttctgccacttacccaataaactaactttaattatttcctaaagaagcataaagagaaacatatataaatagaccctgaaatgggaatgatgaattgatgagtcactgtccagcgtccacttgtccagtgtagatgatttgaacattttgaattcattattgtttgaattttgattggcctggttgagaaaacaatgaaacgtgagtctactttgattcggcaaaatcaaaatctgccaatagaggcaacacatgtgtacatgacgcagctaccgcttttaggtcagatccgaggtgtaagcggatccaaattttggttataaaatattgcgattttcggtaattgaatcttcggagagatctgttgacatgaacggcaaccacgtcatccacgtgaattttgctcgtgggcatttttaaatggtgagacaaggttgctcattttttaagagtaaattagtcatgaatcagaagcaaatcagaaccaaaaactagtatatcaacgtgacagaatccggatttccagtgacgcaaatgagctgctgattctcatcttccgtatagactccttcggtttatgccgtagcttaaatttaacttcaaaaccatagtcatacagttgattttgatgtttttcattttgcagtactagcttttaaatgctaagaatacatatgaaaaaggtttttccttatagatttttttcttttgccgctaaaaaacggtacgttttataagccactataggtttaacgataaaactgtgttcaaatcgataaaactgtgttcaaatcgaaccttttcaactctactttttcattttttacatgcatattttccaaactattaaattgttattttttttgcaaaaaaagttctacttaattaatcatgtgataatgagctaccacgttttccaaaaggttccaaatctttatcctcgaatgcagctagggtcggaacaaaacttcgtatggaaaacatgaataattctcgcgattctctgaaattgattcccgttttgtaattaatctcaatcatggcctacttacttaatttccatttcattttttgcagattttggtgtcaaatcaagctcttaatttagccaacattgtaggccaagacgatggagatccatactgctactcgatgcagcagcagaattggtagaggggcggcacacactgccctccctgtgggtagcctccggccgtcttgcaccagttgtcgcagtcacgtatatcctcgcacttgcctcggcacacgaacttgccctctcctgcatccatcagaaaagaaaaatgccaatgtttagttcacaaatcagccacatccaaacagagtaaatcataatttgaaactccgatgttctctttcgatactgagtaattatgaaccgtaaaaatcagaatcgtaatagtgatttgagaggaacaatattatctatatctatactaatataaaagatagtagtggtggtgatgagtctgccaccaccaccacccaactaccatacgggacccatgaacggtgagtgcttatctcttagcccccacatgctatagatcttatagaaagaaaaatataacaatagaatattatgaaaattttcatctttacaaaatgatagaaaaataaacaaaatgataatatattagacaattagaagaaaaaagcatgttgcaacacacgggcattatgctaatcttagaaaatcttgcaatgtgtacctgaagggataaggagagcagcaatggctacagcaatgacaaggatcttccacataacagaagagaaggtggcagccatctcgctgttaattgcaacccactgctgaatgctcttctgattggatttgttggaagcaagatggtttgagactttgagtgatgctgcatcgcagtcatctctgatcatgtgtatatatagcagcacgatagtaaataaagagggtaattttggtgaatagtagcattcagctaatctaagcctctagaaggatatgcatttatgactcttctaagtttaacatgccataatgtctctattagttagattagatacgacaaggataaggcacttaattatgtgccaaagataaccatgctagggctcttttaccatgtgactatttgtgaccgtttttagactcattgacaatttgacacatggcagagtaaatcaaccacctatttttatatttaatttaacaaattaggttcacatttattttagaacaactaggttcatattacctttatggaattaagatgcctgcactacatcagcacgataatatttggttttactattgcgtttcacagaattaaaatgacttccaagtttatacacacccccagctggtttatgagccactgtttagtattgtaacagagcaatatttctgcagtcgtaaattgaaatctttgattaaattagctaacaagtgtgcggacatcaacagctgaacagatttcagattgttcaaaggtgacctgcagtctattttacaaacaacactgacctgacaagtgacaatcaccctcatgtacaaaaaaaggaaaagaaaaagaaaacgacggcgcaatgtgcaatctattacgattagaaagagctgcggaaaagttacttcatgctgtggaaaatttgactcaggtagaagataaaactcccatttcaatcttgttattactcttcaagtttttggtgcttttgaaggaacacctttgatcttatatcagcctagcgaaggatgaaacgaaacgtcaaattagtacccaagatacaacgtgctgacaagatgaaacttgaggtatactatttacaaaattctacctggcgaatgggctcgggaatgcgataattactacagaacttcactatcccaatggctgagtcaagtgaaatgcgatgcccaactgagatgtagatcggcttcgacaaactagggcaggagcacattgcctgggataagttaatagtttagttccaacaatagaaaccttttcattatcaggaaatatatgacagaaatgaagtgaaggatgcattcagaggtccaatatagaatctcctacagctccccatgttgtcccagactgtccagtcaataaaattaactccttgttgcagttttcttttgcttctaattgtcttctcaattcagattggttaaggccatccacatggtgcagctggggcattcaaaacactgaggacttagtcttctctcagaggatcagaacatcagaaaaccatcaagtacttgaaatggtcggaaaacaactagatgagagaacttccataggagtagttgcaatggcagtaatattaatacattttttccaactccaatggtcggcaggtctgcaaggacaccaagatgacaagctaaaccaaaacctgttgaacatatgtaagttagagggtcatgcattcaagtagtttattgatgcagcttgcagtgtatatgcataactagacatgctgtacgctatcaccaagtcaattgactagggactacaaggactgtcaaggtagttcgttctaaaagaatataatataatcatgttatgtgtgtgattctgcagtttttttctaatcacatgaatcatcttagtcttacaaactaagattgccatgatactaatcactaatgaggtatacctcgtggatgaagtaatccatttccatcaaccatgagtacctgtcagttcatcaagttaaaccatagagaaggcactggcataactagtgttaaatgtaaaactagaagacgctaacatatctaaaatttaatgccaatgcttatgccattaagcattccagatcaaaattctagaataaatgatatttatgatgacaaatgattatacatcagcgcagacaattcacactgttttcacagtcaaaatggaaacaacatatgacaacatggaatgctacaaagcataaagccacagtaaacctatttacagaagggtaaattgcaacgacaaagcaacctgagggtagaaatgctggttgtttgtcttcattttttccaagagtcctagaagaattggagcctgtaacaagtagtgcatgttgacacttttagctgtataacaatatacttgatgtatattttaaaccatctaacaaagtagaataattaaaagaatagttagcatataacaacagtttatccacgtccaatcataacttgattttgcattgaacatgctagacccatatatggttatacagataagaagaaagaatagttagcaaaaacacaataaatatgaatgtacccatcttgattttgtttcattgtttgcttgtctgcctgttcatcactacagaaaatgaaaatgtctaggcccctgaataataatacagaaggcatggataaactgttgctcatgatctagcaaacatatgttttgatcaaaccaaacacgccaaaataagaggacacacaatacctctctgaaagcaagaaatcctggaatatatggcacttgcagccgaacaacatcgaactcttcgtggacaacttctaaggtaccagcatctaaaactaccagtgcagcacacgccgtggaagggtcttctttcgagaagctaatgtcaacacctcctatatacttcaggttgcccttattattagcattgctctgatctgaatttgagcccattgaaggtaaattccacccaaaatcatcctcaagaatgagcttgctctttagcatgtcttgtgttctacagcacaggaaaaaaccagcatgagatgtgaactgactcctcttgattggtgaatggttctgagggtatacttggcccattcttgtttctgctgcatcaactcacaatcatctcctcctcctgaaaatcgtggggtattatccattcctcttgtgttcctcacaagcctgcagaatcttgcacagcggtccggaaatccaaaaaaaaaaaaaaacggctgcaaacctgaaaaattctagctgcgttctgcatcagcataatgatttgtcttgaaccgtaaaatttgagcactgtggaattgcggggcgtactgacagggaagagaatcgaagaatcggatggcgagagaactcgccgagattctctcacctgatacgtcgccgtcgcccgatgccgccgccggcaagcctaccctctcctcttccccttcaccggcctcctcttctccccgcaaccgctactcccgtcctccacctcgccggcgcccgcctgctcgtgaccgtggcagccctcgtgatgacggcggcggcggagccggagaggcgaccttcgccggcgaggcggcgcgagagatgcagaggaagtcagcgagacacggagactgacaggtggggcccacaaaagagagttgacagatcgcaatctcggcccatctcgctttgcccgggaaacttgcgacggatgggccacaattgcggcccggatatgtcatacaatgggcctttacttcgaagaacttttcctgatgggactgtctaggcatgtggcgtgttatttttgagaaaaaaatcacccaatttttttctcccctcgtatctgcatccaacggtaaaaaaaaaaataacaatacagagaaaccgtccaagtagcatgtgattgtacttattagtagagtagtattcaataaagattaacacaaatgttgcatttataactaaaattaccgacaaatgttgcatttataactaaaattacagtgttttataactaaaattacatttataaaaacaatagatatggcatgtaagtgcactataatttatttgtcgttttagtataaatacattgcttgagaaaccatgcagatatctgaagtgttaaatgttatatttataactaaaattacagtgctttataactaaaattacatttgtaaaaacagtagatatgtcatgtaagtgtactgtaattttagtacaagtgcgctgtaaattttggtaactagaatatttgtcgttttagtataaatacatgggtgtagctatatttatggcgccatatttttcatcaaaaaatagtcggtatgtatttacattgtaagtccctaaattacatatgtaattttagtgtatttacaatgtaagtctcaaaattacatatgtaagtactaaaattacatatgtaaattggggtgtaaatgaggtgtaactactgtgtaagtggctgaaaaaaaatcgactgtagcatatggcgccatatttctagcaactccgtaaatacattgcttgagaaaaccgtgcagatatctaaagtgttaaatattgcatttataactaaatacagtgctttataactaaaattacatttgtaaaaacagttgatatggcatgtaagtgcactataattttagtacaagtgcgttgtaaatttgggtaactagaatatttgtcgttttagtataaatacattgcttgagaaaccgtgcagatatctgaagtgttaaatattgcatttataactaaatacagtgctttataactaaaattatatttgtaaaaacagtagatatggtatgtaagtgtactgtaatttattttagtacaagtgcactgtaaattttggtacctagaaaaaagaaagaaagaaatagatagaagaagtaaatggctactgacaatctgacatgcgtgatgtacatgaatccatcgatataaagtcaggttgacttggtcatggactcaactgaccctgcttttgcacaaatcttggaaaacatcgtgcggctagaaaaacgtcaaatactatgaaaaaaaatcacccggcaaaaatttagcaaaatcgtttcatttccggattcgttcatactacaattttcagataaaattcttcgaaaatcatctgaatgagaactcgtacgtataaccaatcattgagagaatatgaaagcttgatggtgtggacgatcttgccgaaatcagtcaccaaagttttttttgggcattttggcaatgttgttcaaactcgctcagcatggtcgtgttcctaaattctctccctaaatgtttttaggcccgtttgaaactccttattagattatagcatattagcacataaaatgagacggcccatgaataattactaaacattataaatttcaaaaatagatttctttgattttgggtaatctgcatttcagtaaatgaaatgggagagcgctgctctccttcttaaaaaaaaatatttctttgatttatttttaaaaaacttatatacagaaatatttttttttacaaaaacacattatttagcagctcgagaaatggtgctaatgaaaaaggataatgttgtagtttggaattgaagttttgggcatgatgtgcttgatcatgcccaaactcaccaaagcttttggaattttcacaatctataacctatttcaaacccgtagaccacgatcgtgctgcttaaatctctctgcaaatgttctcagtctgaaactctcaactcggtatcgatatatactctgaacattctgcatacatcaatcaacacaagaaaccaaatctgcagggagagatcatccgactgctctgccgacgtactcgacgtcgaagaggagagtggagttgggcgggatgacgcaggaggtgggctcccagcctctgcacccggctcctctcgcgccgtaggccagctccggcggcagcctcagcgacctctttccacctgaacattcaaccacatttccattcagcttcaccatttctctaaattgatacaaaatcgaggtgaatctgatcgagtatggtgagttcatttcagatttttgtcatttttcagggttcagttcaggcagggagacgcaccggcgagcatcggcgggatcccttcgccgcccactatgccctggtcccatcctttgatcacctgaagaattatcagtgaatatgcaatgtgagtgatcttggtatcagagatgagtctaattcatcgtgtagctgcgtaatctgttgccgattagtacaatgtttgaatatcttgcagaatctgttagtgtgcttgattgattgatcgtgtttacctcgccgacgccgacgcggaaggtgagcggcttcccgcgcttgtagctgctgtcgaacaccgtgccgtcctccagcctcccggtgtaatgcgcctgcgtgggacgaacgaaacacacggcgaggttagcaagaaccccgagacctcgcctcgccggcggcggccggtgggcgggcaggtgcgtgctgtcgtgctgaccttgatgagctgcccttgctcggcggcggcgccggtgccgacaacgcggtcgcagaaggcgagaccgttgggcgccacctcgagcgggcactcgccgccggacgcttccgccgccgcggggagcacgcgggagaggatggatgcggacagcacggcggccacggcctcgcgccggcggagggcgacgacgggggtgctgttcttggcggccacggcggcgccggcgttccggctcggagaagacacgggaagtttcacgctggggtttgggaggctgagcaggagacgggacagcggcgaggcggtggcggcggcggcggcggcggcggcggcggcggcggcggagggagccatggcttgccggctccgtcctctgctgctgcctcagttcattccaaagctccccaaaccagagaaacacagcgtagcgttgcagaaacggataaggttcaacgtcttctgaatcgtggacgaatccttggacgacgtgggtcaatctcgaccatctgtattggatccaacgcgcccaaagtaatgttctttttcatccttttggagagcgtctggtagtttttccccatgagggcctcctgaaccgtaccaaaaacatatacttccttctaaaaaaaaacatatagttcctccgtttcagtttataagactttctagcattgttcatattcatataaatgttaatgaatctagatacacattcatatagatgtctagatttattaacatatatgtgaatgtgggtaatgctagaaagtcttataacctgaaacggagataaatttggagaatttctatattataggaaaatcgtaggaaagtcttcgaaacaaagatttaatcctatacttttgttttaaaatcatataaaatggacaattctacaaaaaaaatttagaggaaaattacaagaactctaaacccttgaaaaatttcatgcgagtctatttatctaattcgattcatgtgttttttccgcggtctacacaaaccactatttctatatttttcttatgttttgttgtactctattttgcatttatgttcacgtttaaatcctttgctctttttccattattccattttttttcaatactacgtttcaaagaaccatgtaatttggattaaagatgatggatttgtttatgtgaattagtcaaatattatatattacaaaccttaaaaataaatttaaacacaaagcagtctaaacaatgaacagttctaacgtttaaagtttacggagaaatcgtgaagtaagcgttgctcaattgtttagattcttcgtggtggaaccagcctacctgggtacaagttctagatttgacacatgtactcacattcacggctaattattctttcagtggtaggtgctgtacctgccgacagcgagacaacatggtgacttcgtcaatctcgagatatgtcgacatagtcttccgaaaggtcatagcggtagggtgtgcgtgtgtgcattcataggagtgagagtacacgtattgtgagcaaatgcgtatgtatgtttcgaaaagattttgtagaaatcgaatttttttggagcatggcacgagtaatccacaaccaataatctgaggtctgagattttgttgacatggcaattggcaagttgatctgttccactcgtgctaactaggaatttatgtggcaaaaccaaaagtggcccccgcatgtcatcatcactgtcctcccctcttctctctagcttctctctctctctctcctaagggggcgcgcggtcaaattggagcaagggctgccgaatcgaaggagaagtcgcggccgtcatctatgttgggacctcccctttgaacttatctagcaaacagtgtgagtgtcttaccggaagacggcggaccatgccgatgctacctttaccttcgacctcatcagctctatcgcttctgtcgaccagtcgaggagcgacaaagaggtgcctggccggaccgccaccgttgactcgctgtggagcgcgtcccactggtggagacgaaccaagattcggtgaataagccaaagaacgagcggctcgggacgggaactaggacatggtgacgcaaccaccactcaaagctcaagttccacctccacggctcctcctcctattctcaacatgattgggtggaggcggcgagcccacccctagtggtggggaggaacgtcccacgaggatgagcatgagtggtggggaagagcccactccagcatcacaggaccgcaggagtacctaaggcggagttgctggggcattggatcctctccttcactgatgccttctcgcggatggctggctccctcgcctcccttctcttttcctccactatggctgaccaccagagccacctcatcaccgacctcccaccgttgcctcgtgcggacggtctagccagctgtcaccgctctccttgccgacgagctcctatgaaagagaggggagagatggaataggtggggagatgtggaagtccacttatatgtgggcccacttgttttttaatttcctttttgctgaaacacgtcagcaaaaacaagtatccatattgtcacgggatctgacttgaatggttttactatgatggggttgaagatgtctgatattgcagtttagagttatcaattaaactcgacggaaagttgaggaatgaaaatggacttattcctccctagatctctgaaaatttctgggccaaagccttcctggcctgctcaacattatccggcccatctacccaacacacctcatcttatagcccatacaactacccaaacctgacatccttcatcaaatttctgcaggcaaccaacgtgattctgaacaaatgcgatataataaaacccatcgatatcctcgtatacagtacactcatggcgatccaacaccgtcgctgtcttcagttacacgaacgcacgatctcgccggaaagaccgccgcttcggccggcgagccaccggagttcggcgtgtgagccttcaaatccgcacgcacaaatggcgtagcaaaacttcgttaggtttcggtcattttcacaggcaattctgatctctcaatctcttccacacacgccgccgccgcagtaatggctcgatctgcagcatgtgcctgaccaaactctcgatccacatccatcgatacatcggttaataagtcaggttttgtactttcgtttgaactggtctgcgaggaaaaacaaaataaaaatctttgttattggagagacagtttgatcacaaatcactcctgtgatcgtggtccaaaatccagtacttgtcggtgtcagtactaccgttctgttgacaagtaactcatggtgattgatgctcatcttctcttctgatcttctccttgacaattgtaggaaatgattaattcccaattttagactttgtttagataaaaagaaaagaaaggagagacaatcttgcgaagttaggtttcatgcgttgcaaacagcggcaccattaacaggagcatatcgtcatctctgacatctagtgagtcaagtgacacagcccaggacttgggccagattaccagaatggataattggagtcgctcacctgctcgtgatccatcatctctcttcttctgttgctttaggttgcttgcttcactgcatcttaagcttgtactaatgcaaaacttgcactcaaaaagattagtgttgttgttttgctaaccacacacacagacatgaagtcagaagctcagatcatctgctcttctcctgcatatgccaaagccctccaactccatgtttcagaaaccatgacaggagcatccacacaaccaatttttagcttagtgatcagcaaagcagcattgtgtatgtcatgtcaaaatccagtgattaattagcggaaggtgacttaatccagatgcaccaaagctatactatccttatccactgaagcacccaaaaaaagtctttcagggacaaaagtgcagtgcagtgcagacggcaggcctgctcaactgtattttgaccggctgctgttgcgacactaccaagtacaccaaaccacttcaatctcaagctttctttttatggtcctggatctcactggcgtcatctcttgacatcttaattttattttggagcttgctaggctgctagtttcccttgatttgctcttttcgacttattcaccgaattattaaaacatattatttattacatgcttagaaacataagttttctaaaaaaagacattcttccaccacacattatttaaggtgcgttcgtttaagcgaatgactggaactcttcagtcaaacacaaaacagatactccctccattgcaaaatgtttgacaccgttgactttttagcatgtgtttgaccgttcatcttattcaaaaaaaatttgtgaaatatataaaattatatgtgtacatgaaagtatatttaccaataaataaaatgatataaaaagaataaatgattacttaaattttttgaataagacgaatggtcaaacacgtactaaaaagtcaacgatgtcaaatattttgaaacggagggagtatatcgttaatatatgattaattaattattaattactttaaattttaaaaatagatatgctgaatttttttgcaaaacttctatatagaaattgttgcacaaaacacactgtttagcagctcaggaaacttgctagcaatatattttcctaaaaaaaaactcaagcttctttttttttgtcctcgatttctttggcgtcatctcttgacatcttaatttttctttaaatttggtgccagctaatttccctcgatttaattttttttctgaattttcttttgatgccatcaggagagctaattttttctttggtgttgacgtgtgaagggggtatcagtacagtacgaaggcaatttaaggagccgtttggtttgggtgatgccttaaaaatgaggcctatttatttaattttcctatcactaggaagccatgtgctaatggtaccaagacagtattagtgctgggcgtgttgtaattgtggtttttctaggaccatattgtgtcctctcctaaaaaattgattatccataatggtctttgggacagaggaagctgtatcctggtatatatgtcgtgcattgcattaatgctttgccatcaactgaataagctagcgctcaaatgcgttggtcaccatgtaggtaatggagtgaaaacagtggtttgcaccgagcacactgcttcttgagttacgagcagttactaaaatttaagttttaaaacttaattttggaggcttttcatcaaaaattatttttcagtatcagcttttaagaacaaaagaaaataaattctatagattaatttttgttgtttcgtttatttcgtacagcttatcattcatcgcgtaaacaattaaaaacgcaaatatagaaaatgacataatatcaaataaatagaaaaggtgagactttgaactcaggcaatgtcttagtagagctagctggaaaacctctcgacgtttttcaatgcataaacaatctgagactaggatttgttggaatggctaattttctactgtaaaaaacgagctaattctcctttgccgctgcaacttacctctcacttcatgacaaaccagcgacctaatatggaaatttttttaacactctgttttaaaaggatgatgtcctaaatgcatgcagtcaaatcttaaactcttagaacattcagagattaaaaaacattagtatttgatatggaaaaaatggtattaatatatttttcataaaaaacactatatgggaatatttttaacaagttttataaacatataactagaaaacgtaatgatgaatgaaacatatacattagagaaccatgtccatgtccatgtccaaaactaaaggtaaaaaagaatagaggggtatcattgcattctagtgacagttataatctttttttttctcatggataatttattgagcaatgaaaaacattagcagtttagcatccagttagtaatactttttttttcttattgttgtttgtcttttcctagcatgtttcttcagaacaaaaagatgctacttttcgcttaaaagaaggggacaaaagacca

SEQ ID NO: 5372 - DNA, 3920 bp, Oryza sativa
tggaaatagacttgagtagttaggtttgtacttgattcgtcctgattatatgattttgtaagagactactaagtacttccaaacatatggttacacaatctttaaatgcatcaaacaagatataaaggttcccaagacttctagcgggttctttattgggccccttttccctgatagggacaaatgggctttgagttaagcatgggttaatgttctacttcgtaagcaacataaccttgtcacaaatggttttattatgcttcatgtggtattgatgcattctttatgtagttaggtgcctggatgaagtgcaattgtaatttgtggattaacaaactaaggataatgttacgcaagtagtggcatttggacataatatttaaattgtaaatgaatgtagcacttaactgtcatgtaatatcttgttcttttattgctgtgtcgaggagcgatttgctcgctgaagttataagtgattctcaaattaataaattaatagctatctgacatggttctggagttttgcttcaaaggcttatgcctcaattttgttcctagatagttatattccagaatagcacactgcatatagaaagaaccaccattaacatctgttaccccctcagttttgcatggttaacttgaatgttttgatagtgctgatctctatagctctgttgaatgtttttgacttgcagttttccagaggatagaatgtaacatatagattttttttcagaatcctgtggtatctcattgttaaggaagttaattcttatgtaacaggtcacatgtttgatttccactttggtggcttgagagcatactctagttgtctgaatcaagttctctgaaagagagaccggagatgagagaggagggaggaattgcttctccggtacaatcattaaatctcttactttttctgtagactatttaaaatttgaaattatttgtaagtgcttgcggaaaatactctcattttttctgtgtctggcaaaaccagggcgaaaagcctattccgaatggtgcttccccaaatcatagccaatcacctaaaatttgctcaagaattacagataatgagactcaaggaactgcaacagcaaaatctttaaatgaaaagctagtgttggaaactgtgtcagatgattcttccacacagcattgtcagtcaccacagccagatgtcttcacaaatgtcaaagatgaagatatgcaagattctgtgaagagtttgagtgagaagcttgcttcagcccttttgactatcaatgctaaagatgacttggtgaagcagcatacaaaggttgcagaagaggctgttgcaggtaatctttcttttcactatgattttagacattttgcattattgtgatcccatgcatttattgagtctgtggcttcccttcattattcaaaattaattttatatgtgaggacatcaatagaactaagaaagaggaaactcattcaaatagttctttggcaaagttaaaatagtagtatcaaccaataattctgtttgtctgcacatgcgtgttagtgtgtgtggagtgagtgtgtcgtctgtctcctcagttgtaccttctcaagaaaatcatagttttatttattccaatatggaaccaaattcatattgaactttatttttgacttacttgtaggttgggaacaagctgaagctgaagttagtaccctgaagaggttactcgaagcttcaactcagaagaatgcctctttggatgatcaagtgaaccacctagatgatgctctcaaagaatgtgtcaggcagcttcgccaagctagggaagaacaagaggagaaaattcgtgatgcagttgctaagaagactcaagaattggattctcacaagtctgagctccagaaccatatttatgagctaaagcagcagctggaagccgctaaattagaagctgccactgtggctgtccagcatgatctgcaggataaacttcaggctgcagagaaggaaaacaagggcctgaagatcgagctgctcacgctagccaaggacttgaagagactgtcactggaaagagatctgagcaatgaagcagcagagacagcaagtaaacaacatttggaaagtgtgaaaaagattgcaagggttgaggcagaatgccgtaagctgcgccatctgacacgaagaacttccttggccaatgattctaggcctgcgcctaacaatgcttgcatggaatctctcactgatagccagtctgacagtggggagcgtatgctgactgttgacagtgaaatgagaaattctgattcatgggcctcggctctgatagccgaacttgatcagttcaagaacagtagtgccagctcaagagatgttgtaaacaatcatgttgagattgacctgatggatgatttccttgagatggaaaagctggctgcattgtctgaagtagaacgtgtaagctctagctttggaacagaaactgattctgaccaggctgtggctatagataaagcttcaaaagtcgaaactgaaacactaaagagccaggtcacagatttgcaggcaaaggttgaaaagcttgagactgagaaaagggatcttgaaatggcccttgcagaggctagagtccagcttgacgcgtcgtgtgatgccctgatggcagccaacaacaagttggcagaattacaaatgcagttcaacttggcaaatgagtctaaaattgctgctttgggacaagctgatcagttagatgctgagagaggatctttggcattgcagcttgagtcgaagtcaatagaagttgagaaacttcaggcagttgtggcttcgttggaagaaagtacagataagaaagagctggagtcacagttagagtcaacttctgtagagttagcggatctttgcaagacagtggcatccttgcaagagcagattgatgccgagagaactctgtctttgcagcacaaagcatatgcagacatggcagatgcagataaaaagtcactagaggcacaactgcagtccgcacatgcggatatcgggaaactgaggggatctattgaaacactggagagcgagttgcaaaaagagaaaaccatgtatgaagaacttgtggtccaaatggagtcaatgaagattgaatcagagaaaaaacttggcgtggaatctgccaaagaagcattggaggcacggctcctggtagtgaactcagaaattgcgaaactgcatggaacagtgaacgatctggagtgcgatgcagcaaaggagaaggcattttcttcggaactgaagatgcaactagaggcagtggaaggcatccgaaagatgttggagtctgagcttgagagttcacaccaggaaaccatgaagctccaggagaagatctcattgttggaagtaagacttaaggaccagactgcattgttggtagaattcactgccaaggccgaggatgcagcggtgggaaggaaggcaatggaaggccaacttgaaggagctaaactggaaatcacaaaacttacaaatagggtaagcttgctgcaaggtaagattgagcaggagaagctgctgtcagaggagtacgaagcaaaatgccgcaagttagaggctcagctgtcaagagacagtcgggaggcaaggctttggcgactggccaacacaaatggtgacctgaaggtcaagcaggtagtctttttatgctctctctgctgcatataaactggaaatttaaccacctcactgttataacactatagggcttaagagttgcaaacatcaggccaaaagtacaaggattctatctcctatggtccaatctacttgctagttgcttcgcttgaggttgtttggacatccaaatggccatttcttttgctaagtgtatgttataaaaattgctaaaatattgaacttgtaaactcttccaggg

SEQ ID NO: 5373 - DNA, 17529 bp, Oryza sativa
gggacatctaactattggtatgtagttttgtggtccctagacacattctatagtgacatgtaaccgaatggatctagtactggtcaatgatctaagcacacccaaaggatttacatacctgtattttagtttgtgcctaaggtccaatcagacctgtcagttgagaagtttctattaacaattcatcttctgtaacaggataaagagctctccagtgctgctggaaaactcgtggagtgccagaagacgattgcgaacctcggtcgtcagctaaaatcgctgaccgatctcgacagtgtaacagccgagcctgaaaagctagagtctggggatgcacttctggactttagagaacccgatgttgaggtgccaccagcaggctttgcaaatggcctgtacgatttggatcttccaaagagcaatgggagctgcctgtcacccattcctcgtgttcagtcgtcttccacacattcgcaaacgtcagtgttctctggcggtttatcgtcgcttggtagctacaggaacaaaacaagaaagtgaaatctgatgaaaaagatttgtgcataaacttatttaacagttcgtggatgtttgtcagttgtcacctgatgcttagatcagtgtacatttacaggaaaatgatggttacttgtgcttgttccgcctgatgattttactgctatgagctcagcctcattttctttacttttcagcgttcaccagtttctgatgcaagtcttgttgaaagttgagactgatgtttgtcatatagtaccattctcacaagctagtcagttcgagctgaagatgtgctgaacatataagtaggcaattcactgaatgcaagatgaataatctgtcactgaagaaatgcagcttgaaacttgtatagtgctttgctcgagtttataagcctggaaactaaatgcttgagatatatagctcgaatgtctgaaagtgatgagagctggttttcagtaactgtaggttccgtacgattgaatttacctctgtaagatgcaaccacctccacactaccgtccaaaactgcgacatggagtactacataagctgtggcatggttgcactctatcgcacactcgaatcgtctcccattgttgagcaagcaaaggtctttgttcttcttgagctcagctcagctcatcagcttccatccatgggtgtcttcagctcggctcccaaggtgtacaagccggcgtcggaggtcaatctcggcgccgacagcaacgagttctacatcagccccaacgtcaaaggttacaagctcttgctgaattttctgtccattttcatgtcaaagagcttttgcattcagaattcagaatttcagttcttggaagtgatttgtatgcttatgtctgatcatttttgttttattgctttcttcagctccacgggttgctgggcttctggtgaagatattcgcatgggttcttgaggcgccgatcatcggctcaatcgtgctctacatcctcaagagagacaatcttgtcaacaaggtagatgatcatcacttcttctgcttggcacagtaaaaaaacacaagttgaaatgttagctgaaacgctgtagattataatggcacttgaactgtgatcagattgtttggatgctgattagttgctgaaaatttcactgtagcttgtctcggatgccgaaatcccggagccaccactgttcactgcagctcacacctggcaaggtctgtcttctgttccttaccttttgggatttcggccctaccatttcgagccgtttttgtacttttgttcacagtagaattcacatttgaaaatcaaatttagattcagctagaacctgaaaatactgctgctcctgctgctgttgcttcattgcagacatccctgagcagaatgtgagcctgacgaagccagacatgtcgccggcagagcgcgttcaggaggccgtcgtctgcctcccggctcgcctcgaatcggtgctcgctgacccgccatcgccggggttcaggcgctggacaatccgggacttcaccagtgcctacatctcaggagagatcactcctgtcatggtaaaacatttagtacagttttactgacagtaatatgttcgtgtttaatggtttttgtatcagtagttcagtacaatgcaatgcattatgacaatgtgtagtgcattgggggtgtgaattactcactgaattttagtaggttagaggtattcttgttcatgaatgctacccaattagcttgtactgcattgctggcaggttgcgaggagatttctcgctgcagtgaaggagtgttcaggccctgatctgaacatggccttgttcatcagctgcaatcctcaggacgtcatcagacaggccgaggcatccaccctcagataccagcaaggtaaacaaaattaactacattttcagtgtacattatgccaaagaaccgtatcaacaaatcaaaatcaatgaatcattcgagcattaaacagtaattatatcatactagcagtactcagcaagtgcctcagtgtctagccttcatcaccattgacatttaggttcagagaatctgcagaaattaaactgtcataaccaccatgtttacttctgtatgctactaccaacttgcatgcttccggccatgagtttttacttgtagtactggtgaagaagtactactattactgccattgcagtctggaactgaccagctggatgaacagtatcagcagatgctttacaggaaggcattgtcagagcctgccaatgcacggactggtctctgaaagagatgtttccacaatgaaacaacacgcagcttgcagcagattcagggctcggactaatctgacatggagcaaaatgttcagacttcgaacagaaggggctttctgatgaaagattccatagaaatggcatcggcatcatcccctaatgatcatgcattgactagactagctctttgcttgcttgatcgaatctgaaagcattgcatggtcctgatccagcattgatagctcatagggacggttagttgccactgcatgtggttgcacgcagaggccaatactacattccttgcagggcctggcctgctgatctgttgcaattgaaggcatctcgttgtgctgatgcatctgttgttgcagtatctcatcgtttactctttgcattcatgcagcttttacctgatcgattgcatgcaccatttcatttcttggcttctgttaactgttaattgttcttggattatgtcaagtgtttgactgttcttgatgctaattaactgcaggagctcctctctctgccatggatggcgtcctggtggccgtcaaagacgagatcgactgcctgccatacccaacaacaggtaagaacatcacaagatcaggtatcatcaacggtgctaaggttgtcgaatcatatataagaacaggaggtaaaaagcaatcggaatcaggatttaatcagctgcaggacggtaggtagagctgctgccgccatggagaggaggccccggtacggtcggatgattctgatgacactgttcatcgccgtacacactgtccgtcgatcgtttgcttcttgcaaaatgagtgctgacaattggcatgtgtgttttggattgatactgttcatcaacagaagacgtgatccgatttgttgcaaaaagagagaaatcggtgcttttattttttaaattagctacagtaggctgtactaactcgtttttttgtaggggacaaaataaattattgcattggccatgctatgaaatactgtttgcaaattaaaaacattttttctgaagaaagagagtgtatgaatctgaagattctaactaatgtcaggaccaaatctatgtcgacatagcaaacatgataaataaagaccagttcagattactgtcaaaatgaatatttccaaaatttggcaataccaaaatttgataggttggcaacattgccgagttttggtatgataggctaaatgtgctgtcaattttttacacattaccaatatttgataacagactaaattcatccacatgtctgtcaattttaccccaaaatggtatggtttaaagtgagaccaatacgatactagggtaggccctaaatcatatatactagttttatatttaggggtggaaatgttatgtctgattggttgtactgtaccctgaaactgatcaaagacgcatatgaacaggaggaacgagatggctgcagaggatgcggccgtgcgtgcaggacgcggcggtggtggcgcagctgcgggcgtgcggcgcggtgctcgccggcaagaccaacatgcacgagctcggcgccggcaccagcggcatcaacccgcaccatgggtacgcatcacttgtcgtcgtcctgttcatcatccgcgcggtctccaaatcacaatttttttacccttttaccaatgggtttcttacctggtttgatggtttcagatcgacgaggaatccgtacaacaccggcaaggtggccggcggctcgtcgggcgggtccgccgccgtcgtctgcgccggcctctgccccgtcgcacttggagccgacggaggcggtaaacctactcaactcgtacatgcaaattgggaatttttctgaaccctaaaaacatcctgctctgacaatacaaaacattgtgttgctctggcttctgttatctgatcggatcatcagtacacgcaaaatgggtttttttttttaatctgaacaatgaaactgaaaatgtcttgctctgacaaacaaaacattgctgaactagcttgtgtgatacaaaacattcagaacataatgggaaagtgatttcatccgtcgaggggatatctcctcgtttcgtttatgtcacctaaatagttataattttttttaaaaaaaaattgtcaagatagattaatatgaaatataggagtatcactctacaaacatgcaagataaaattcaacttctatagattgtaacaaaaataataaatataaatacgaatgtatgataactattttcagtttaatttgttctttttgttgcaacttataggagtcgaatttggtcttgtatgtttgtggagtgatatatttcatattaatctatgttgtcaatttttttaaatttttttataactatttagatgtcatgcaaacaacgacggaagatgaaaatctatatccgaacataatgaatgatgtttggattgaattctgccaaatgtacgacaagaatatctgcatgcagtattgagttattgttttctttgtgcattttaatcaggatctgttcgcatgccagccgcgctctgcggtgtggtgggcttgaagccgacggcagggcgtttctccaaggatgggttcgtcatgctccacatatatgtacttttcattctacaagatcaatcactagccaaagtagccatagctgcaatggatgtgcattgttcagacacacctgacctgggctatttctgatctcaggcttcttcctcttaactggaccgtcgggatgccagggatcttagccgcgacagtggaggatgcgcttatcgcgttagtaatctctcttgtttcagaaactaatttagctctcagtgatcttgttacacttgattgtgtatatatgttgtaatgtactaaaagttttgtgttgctgtttatcattcagctatgcagctattgctgatcagtcccaaccaagccacttgcaggcaaatgctcgaactttgtattttctcttacacgtttggatgttcagtgagactgaatttgcagaagatttgatattttttgtttgtttgcagcctgaactgaatcttcccctgctgaaagctgcaagctcgatgcctaccatcagactagcaagatatgcaaaggtgagtgcttcaacactgtaataaaatcgtgtcatctgaaactgaacattgtactgatattcgccacaaaaacagtggttcaatgactgttctgaagacatcagaagttgctgctacaaagctgtccatacgctgcggactcgatacggttgggaggtagtaagaacaactctacgcttcatctaatcctgaagttaaacaatgcactcagtgacatgattttgaggaaatacactacagttcatgcaatctgacattttatttatttatttttgcaattgtttgtgctactatctgcaagactgctgatgtgacaattcctgaaattgaggagatgcggctcgcgcattacgtgacaatgggttcagaatgcaccgcctccttcgataagtatctgaagaagctgtaagcgtatcataaattttgtcatatgaaatcatttttcaggctgacatgcgtatgaattcaaaatgatgatcaattcattgtacactcaaaccatgctgatgcaggagcaagtctgagattggttgggatgtgaggatcgcgctgagcgcctacgggtcgttcagcagcagagcttacctgaactcgcaacgaatccggtgagctatcatatctaccattcttcagacattcattccaccatcaaacttagaacactatccactctgaactcgaaatgaatgaactcttctttttttgcaggaaccgtcagatgtacttccacgacaagatctttgagacattcgacgtgatcgtcacaccaatgacagggtacctatgcaatcttgcatggaaaaaatcactcaccactactactgagtgtagcagtgacagtttcagggcctaactgtgtacttcttgtacagagtgacagcgcacgaattgcaggacaacgcggggcacaccggagagctggactacataaacggaggtgattataactcaaccaatcacgagcaattaactgaagaaaaaagagttcagtttcagaataattaagctggcatctcactaactcgtcagtgttgcattgcattggatcgatgcagctgcgctggtgaggtactcgatcgccgggaacttcctggggttgccggcgatcaccgtgaaggttgggtacgacagggaagggctccccgtcgggctgcagttcatcgggaggccgtggtcggaggccacgctgctgcacctcgcctacgccatgcaggtcaccgatctgatgctggaaacgaactgatgttaattgttctttccaaatcctgcattgcatgtggggagtgaaatgtgtttaattatctacacagaagtgattatttttaattttttatatatttttttgcaggaggcgtgcggcaagaactacaggaagcccatggtgtactacgatctcctcaacaagaacaaatactagtttcagtttcaaaagaacaaatagtagctatatatgttgtgagagttgagtgacagtttgattctgagagatttggactggggagaaatttatcatcgatcattcttaccatcccaaatacagaatgtgatggacattattattgtaattgttgttatgtttgttgttgttgctgctgcttgacataagcatgcatgtaagtcatatgcatgtcgctgtatatgtttactattattgaatgtgcctactgatttactaaatatgatatttcatttcttttactctaaactactactacttactactagtacaattgtttttctcactcaactctcctaagaatatcggtggacaccaagcttagcttggtaaaattctgtgaaacacaaagtcgagtggaaatggtgaagggcccatgtggcctatgggccatggcccatcatccttcttggaggaaaattagacagcacttctggttcccggacgagcctggtccacatgtcatttactattgcacccctgtcaactttagaatttacagttagctcgttgatatcgtagcttttatggactagtatgtcctggggagataaattttctttcttatggactaatccaaaccagagtaaagataagatttatcttctcctaagacaactgtatataaaggggcaaggtgagacatttgagatttgcttatactcaatatcatatctataattaaaagagaacttcaccctatatcgttgtctacttctacaatgttgttgagggcagaggaaaaggcacaggtattctacattttcttacgtctctactgcggcgggagggacagagaatggatccggtgatctgctaatagacgtgttggtttacaacagtggcttcacaatctgtacatgtttgttgtggggtatatgggctccggttggatgaagaaatatctcaatcatccgttaagcaccttgattgtacttgtagttttcatgatctagttgaattcatggctttttcagcacaaagattgatatacttgatatgttgattttgagatgtttggtagcactctaaatccataatatgctatattagaaatttatggcttcctcaatacaaagattggatgacaaaatatctccaccaccgtcaaatcttaggagtacaatctgcattcatgtcgagaagagtcagatagatagttcacactcaacctgaatggagttatcaacatggttaatgccagggtgaattataaaaaacttcgcaaaaccccacgttgccttaatcttgaaatggcttaaatgatgactaacaaactattgtcttattatagttaggcggaagacaataggggagattgaggaggagatgacctacaagtggctttgcactgtattgtttttttcggctcccccatggccccaagacattatccatgagacaaccgaacaaacaagaagcatcaataccggtagcagaagcacacaccgtcgctcaccctgctaactgctttgtactagccgaccgccactagctgttgctaccgtatccttcatctagaccacccacgaattaactgaaaccaccgtcgtgtatgtcccataaaatggtctacttaggattatatacaagtacacatgttgatcatgaacatgaaattttgaatacaacaatggtatttgatcaaatttggataactttacattcatacacaagatataaaataatattgctataatatgttactcataagcatgaagataataatactagcactacaaaatgtcacttgatgaaaccacaattgatgttaacacataaatttcttcccttccaatctgaatgccctagattaacatggagaaaatttttatctgcagataacactaaaccggatccaaaatttcccataccaaggctgtgtttagttcatgtgtcaattttttttaagtatacggacacacatttaagctattaaatgtatactaataacaaaaaaaattggtcacgcgatttacatgcaaactgtgcaatttaatatacattattagtatattatcaaatcatggcgtaattaggctcaaaagattcgtcacgtgatttacatgcaaactgtgcaattgatttttttttcgtccacatttaatactctatgtatgtgtccaaacatttgatgtgacagaaaagttggaagttcgaagaaaaatatttgaatctaaacgaggcctgaatggaaataatcaaaaccgcaatgggctggcaaactgtcgatttcagataatttttttagtacggacaaactgcagggacctaaacgaaaaagaaagaaaaccgtgacgtcgctcgcttccagagatcttcagatcagatcagaaatccccaaaaaaaaaaaacacaacaaaaccaaacccgacagatcttctcttcttcctcctccctttcccatcttcgacgaggcgacccggcgcgagagaagaagagatcgatcgatcgatcaaccgatctcgccggagaaggaagaggagcaaagatgtcgtcggtgttcagcggcgatgagacggcgcccttcttcggcttcctcggcgccgcctccgccctcatcttctcatgtaatctccgccatccctcttcctcttcccccgatcaagcgattaggtgtagaaagctccagtttttccaatcaaagtcgccatctttttctttcccccatctggttgatcctgcgatttggttcgatggtgatggaggtccacgcccctccgattcgcgcgatctgtgacgccctgagtgtgaattttcttcttcgcgtggctagatttgacccgattggagatcggatttgtggggaaaaaaagttgggagctttggattctgttcttgatggggggatttgcttatttgctttcattcgatctgttgcaggcatgggtgcggcgtacgggacggcgaagagcggcgtcggcgtggcgtccatgggcgtgatgcgcccggagctcgtgatgaagtccatcgtgcccgtggtcatggctggtgtgctcggtatctacggcctcatcatcgccgtcatcatcagtacagggatcaaccccaaggctaagccgtactacctctttgacggctacgcgcatctgtcgtccgggctcgcctgtggcctcgccggtctcgctgccggaatggccatcggcatcgtcggtgatgctggtgtcaggtaaagatgctgcctgctttgttgatctgtgatgtagttagtgtgtatatgctgttactgctgtgcattggtgattaagtatggttttatgatggaagctacaggttgattaacaattctagaagactttctataggttgttttgctaccaaatatgattaagggatctgtatgtagtttttgtagcgctgtctgtttgataacttgtattcattgtgttcttgtattagcctagtagttaatcttgaactggtagtgagtagctgttacctacaaggttgtgcgtttcaatggcttcaaggctgtggaaatgaagaacaaagctcatataatccttatatggtatttctggatcctcctgtttgtaaatccttgtggtctggtaataagttataagtgccaaggctttataaattgttagtatttatttatggggggttctttcctcgtgggcacttcaatacgtagcatatactgaataatgatgttgttcttggtactgctctctggtattttttgctgaagttttaacttttaacaactgaaaaaatgtgctgtggtgtgaagagcaaacaagtggtcaaggtgttatgccttaaattttttcaacgatgtaatgctgagtagttgtgatttgaatgtaaataatctactttcacaattttagcacttaactggaatatgattccattcatgatggcaagtgtgttattgtataatcgtacatattgtttcttagaaattttgacgttagaaggttaattttgggatgatttattagattgtgatgttactatgatatcatatgatcgaaatgtgcttcactgcttttttggtgttcacctcggtgttcatgactaccctttgtgttgagagcttgaggctactcctaagctgcctactttggattacaattctgatatctcttgttggtgttggcagggcaaatgcacagcaaccaaagcttttcgtgggcatgatcctcatcctcattttcgcagaagcgcttgccctgtatggtctcattgtgggcatcatcctctcatcccgtgccggccaatctcgtgcagattaggcactttgcggtaccataccgctgttattccactggctatattcttgagaaaacctgaaacttacttgggagctctagtttaatgtattaaaagatcgatttgtagcttaaggaaggtggcacttccagtcctttttgtttcttttgtggtggttcatgcaaagttttttgggttaggctggatttgctgctcctgagcaaacggatttaatctcattcgtggtgaataaaaaacacggcattgtagcaaaataaaatcattacaatatattatgttcatcccttcactctaatgtattggattgcaaaaatcatcaatgctcctttttgttatgagttcaagtcatcattatatcatccgacttgtgtgataagctcatgtgttcattgagatgagtaggctaattactctcagatgttgctctaagaaaggtgatcttttcctcttgaatggccgttctgtacaatcgcaccaaatttcgtacgctgctagtgctcaaccaatctgtaactattgttgactcaattcattaccctattgcagcatctcttgtaccgaaaatctcagataacctctcaaagagctaagaaaatctcaggtaatttacaagaaacaaggccaataccacagaattccaaatctacctgttccccatttcaggaatgcttcttccaaatgcattgacctacatctgtttcatcgctacccactgatgccattgcaaaaacagtggtttttggatgtttcgaaactaggaaagaaaattttgttattgccacgagacagaactcgtgctgttgatttttcttcagtatcagaaaaacagaatgcagcggcaactttagctgtataacgccgcaaggtcatcctcgtacgccttcttgatggcctccctcttgagcttgagggcagccgtgacgagtcctgactctggggtccatggctccggcaccagcttgactttggctgggatctcaaacttctccagccgcgcttgcttggcagcctgaagaacaaacacacgtcagtacgatccaattgtcataagacttgcatgtcttgcattgatattacttaataagcttgctagattcaatttgttttgagattgttacggtgcgtgcaatgtggggttgcattgcatactgagagtgaaaaattggtatttggcatcgaccattcggaccgtacacatgatatctggttgagctcatgaatgtacatcctttttgcacgcaaaatatggagatatcgtcgcagattatgatcatatcaaattgcatattagtgtatgggttatattctctgtttactggaagattataatgtgttcttttcctgattctactgataacctatgaggtccaacatatcctccgttgttctcatattggtacggcaataccacattgccactctcaaaagagagaaaaatagaagagatcatgttttgctgaatcatccagggaatgcaatcattagtaaagtagtactagttaattttgatggaaatattgagggttaatggattgctagattaatcagatatatctaattaattaaaacgcagggagaatacacacctttgctaaacattgaaggacttctttgacagtctcttgcttctcacacaaatctgaaacatccgaatacgtgatgccttgttgtgaggcccagcttttcagttcactgtgtgcaactacaacaagtgcaacgcagtagttgtggaaggggtcagcatggatcatgatgttgtcaacatatgggcacacactcaaagcagcctccacctgtggttttataatagttagattacaatagctgactgccgctaatttggctggaaaaggaagcttagcttacctttcctaaagatacatattcaccatgttgaagcttgactatgtccttcttacggtcaataatttcaaggcaaccatctggatgcaaacgtccaatgtcaccagaatagaaccaccgcatgcctctttcatcatccttcaataaattggtgttgttaaagaaaagttatcatgggcttcacagcacagattgctttggcatattatcgtaacataccttgtagacttcatttgtttttgcctcattcttaaagtagccttttgtcacgtttggacctccaataactatttcaccccgaggcattggtgaatcattagttaaatatccaccttcagcccaatctatcaactatcatatacaattcatattacgttaggaaagaataagatctgagggataagatattaatcttctgaatctcaacatgaaggagaaaaccaaaataaactggatgggcataatacactaaatttcaaaatagatgttcttttttgagtgaagcgtgcaaaagattacatgcatagctttgtgtaaactagctatccacaatgtcactggactggctgtaaggctagtggtcaagtaaagctatccgcaattccacgcctcatgtcaaaaatttgaacacaaaagtttatctgtgatctctaatacgaagaaaaacaatatctttttgcacttagcggaaatctttcgtacatatgaatatatggaaatgaggatacaatttatatcacagtgataacatgcatggcaacaataactttactatggaaatgaggatacaatacaccctaccaaaataataaaacatattttttaatgtaccttaatgtatgagcaaggcaatggagcaccaacacggccaacagaattgtcatcatactcggaaaatgtcccgccagcacatgtttcagtaagaccatatccttgccctattggagccctgcaacagcacaacccaaaacctgtcaattgttttggtttaaaatgcagtatgcaagttagatttgaatattgtgaagttcaatcacagtaaacacaagtggaccaaaaacaataacttgatattaacaaaagagacttgagaatggcttataaaataatgaagagtactatctcacccaaggcatatattgataaatctctgagtatctccagacagaggtgctccacctgaaagtataaatcgaatccttcctcccaagatcgcacgcaccttctgaaagacaagcatatcccacaaatgcttctctaatccccatgcaccaaaccaacttccattgatagcagctaaccgacggctataggcaatatcaaatagtttctttgctgcaccaccctttgcatcaacctaattcatctcatcatgaaaaaaacaaatggtcaagatggcaagaaggccagaaagaaacaatggataatatcattgtaaagaacaatacattttttctaacaccatcacgaacacgatcaagtatagcaggtactgcagtcataagtgttggcttcagagctgaagcatcgccctgagtccccttctttattttatttgatgtatcagtcagggtcagtggtgatccataccctatagaagccccaacagcagacataactgtctacaaatcacatttgcataaagtgcatcagcatcaacaaaaccaacatgtggaatagactgagatttcaatatgtcatctgacacctacctcagctgctaattcaagaatgtgtgctaatgggaggtatgccaagtagacatccttcttgccaagtgcaggcacaatggtcataacagctgatacaacagccaggacattgcgatggctcatcatgactccctgtggaaaaaaaagtacaaatgagaggagttgtaagcagatgatctgagaaaagacatccattagtaatatccatatcgtgaagtaatccaacatgggcactacaaaaaaatcaactaatctttgaacaaaccttgggcattccagtgctgccacttgtatacattatcaccgcagtatctgacggaagaggcagctttgcttctacaggtgtttccaatcctaacctctctacctcctcaaatgactcaaccctccagctggtgcatttttgagctaaggatacttcactagagacgccttcctcgtttacgtagatgacatgtttcacagtatcaagttgcccacttatgtcaagaagttttttcagttctttccttccacatatcacagtagttacctcagtctaaagagtcaaaacagaagcaaagttagagatcatatcacgacgcagatacagtaggaataaattgttatgtccaaactgttcaagataaccaacaaaattcactttggttgaggttttgttaccataatgatggacagggtgagaaaaaattcaagtgacttttgtcaaaaaaagaaagtcaactgacctcgtttagtgagtgacataacgctccctcgcccaaggaggaataaatggtgacaaccgtaatactttgtctgaagcatgcctttcaaatagaaaagaatggttagacaatttgcaaatgattcacggagctaactgctagcataacatgaagaacataagcgaaatacaacagtataattgatttctcaactaagtgagaatatcaatatggttaagctgaagcagttcaatgttcaacaaaatcagtttttcatgagagaatgtaaatgacttcttatatactcagctgtgtcattaatttgatcatttttgtcttgtcatatctatctagatagcacatagttccttttgttctcatgagcgcatttcactttatatatgcaaggatggtgatggaacattgtgaaaaggacaggttgagacacttcaagaacagtccgcatcatgtaaattcaaaccttttatgtacacacaaaaaaactatggaagttataggagcgcgtgggtagagaaagctacctgcaatgcaatctgccactcggcccgtgtatcggcgaaaatagcaacacgctcatccctctggtgcccaattcgcactaaaccagatgagaagttgcagacagtcttgaatgcatcagcatagcttttccactcatactgccccaaatgaagcttctcaaaggacctcccatcgcgggctgcctccatttccctcgaaatgagctttctggtgccaaggagtggcatgtagacatactgctcgcaggactgctcaaacagctccgcaagcgtggaaaccccttcccagtgcgtttcaacgggccgctcgaacttgtggttacggatcacatagccgggctctccgcccacatcaaccggcactccccttttcttttcacccttcctcttggtgaacagcagagatgccagaaaagggatagcgaagccgatgaaataaggattcatatttcccagccttacacaaagctactagtccgcggagtgtcggcactgatctgcaattgacttttcaagtgataaacctgaaatgataatgtagctacattatcagatatttatcgcgtattaacagacacagatacataaaaggggaaggcattgctatccagtggtctacaatcaattagaattagaatcctccccccaaacaaacgagttttgaattcctccccagatgcagaaaatgttactagtcggactcctctcctctggagcaactcgttcgcagcgagcggagctattcaaatctaacgtagtagtccactccatcctacaagatcctctagtcgagaaaaacccactgcggcattgctctacaagatcctactagttgccttgcagagacaccaccaaatcaaaccagcggacggatcagaccccacccccgcctactggatgctgctgtggaagcttctagaaggtaatgcagggaactagtagtagtagcagtagctacctgtgtcactcaccggcggaggaggcggcctccgggagaggcagaggaggaggagagtgcaatggcaggtaggtggcgggtggggggcggagagaaatacgggggggaggcggaggaagaggacggcggcgcgggcggagaatccaacgagggggggggggggggggg

SEQ ID NO: 5374 - DNA, 39408 bp, Oryza sativa
cgatcaaactcaaaaaagagttttactggaaaaaaattaaaagtgtcttttaatatgaaacggatatgcagtagaaagttccttttcaattggtcgacacccatgagcgtttgcttactgggcccaaatcagatgggtcgggccggatactccaaacgggcctactaatcctttcgtcttctcttctctctctcgccgtcgtctcgtctcgtctcctccgccgccgcgattcatccgacaccaccggcggcatctccggcgagcggcagcgccgaacacccccaaccccaccgagttctttacggctggtgtctcccctcccatcctcgctaccgcgtcgccggcgcacggggagggtgggggcgtggcggcgaagagattcctgggatctcaggggatagtggactatggggtcggtggatctgatcgccgcctgcctcgactccatccgccaggtcggatctcttcgcgacttctctctcttaccttgcctgctcggattcctcattgtttgttcgatttctttttattatcatgtaagagattaattttgtccgggttaaactgaatgtgtaagaagattcccagaattttcagtttctaattatctgaattttgcactttggagatgaatatgagactactgcgtttaattggactattggagcgatgaaattgttctttaaaaaaaaacccatctttacagcttcctgaccgtatttctttctcgttccaaaacgataaattacaggagctgcttaacttggtaaagatttatccttttagcttctgagctgacaagtcgctgttattcgttcgtgattaacttaagctgtggataactttgagaaaacaaattcctatttgatgatttgcatgtaaaactaatggactttatcttcgtggctttcactatagaaatttatgttctttttttggtctgttgctgctttgcagattggagatgagattgcagatgcactagtgtaccttgatgcaggcactctggaggcgtttcagtttattggagctttccccttgcttcttgagcttggtgctcgtgcaatttgcagcttggagaatgcatctccgcttgatgctgtgagattacttaaatcccttgccataaaagtcaattaattatactagtaataaagaatagatatggtaataatgcatactacctcccaaggtagttagccagtaagctaatagcaatgcctcccaaaagttgcaatgttgtctgctcagtagtaatttatgtgtcaaactgaatgcagcatgttgagtgcaccaaagctcaagcatttttagtgtgtgtctggcacatgagtggcaaagtttaggaagaaaccatagttgcaagtggcatttgtttcttgatttgtgtcaacttagagctaaggactactccctctatcccaaaatataaggcatggtcaaactcgtcacggtctccaaaactaatctttgactcataatttctcatatactataaagtttgtaggaacaaaattatagccatttgaaagtgtattcaaatgtcaatccaatgatactattagcaaataaaattcaatttatattatggtatggagggactacctttttggtcctatgacatcttgaatttctgtacttcatatttctttttcattctgaacttcttatagatgagaagcagtgcacctaacagccttcatgttaaccttagtgtcaaactcatattttcttatataaaaccataattttctttgttcatgtacaaaaagtaagaaaaaattatgcttttttttaatgacaaatgtgccatcctgttctttacatgatcaaaatgccgtaacttgtgtttggcaggctgctgaatggcactcaagttttgcacatccagcaaggaagatagtagtgattacatcacgcctgcttagtgatgcacatcggtatattttgcgctgcctgggaaaccatggaactatttcacattgtactgtgttgacagctatttccgaggtacttcattcctgcaagaatttgttactttgatgcctgtattgcttctgaaatgcttgaacatccagccattattttcctacaattatcttctgttcacatcaaaatggctttagattttattttattttattttttgcctggggcttaagttcctatttaatttcctttgaaaaaggtacatagtccatgttagtttccatattatcatgaaggtatcatatactatatctggattgtttgatttatcctttctccaggggatggtctcaacactcatgtatgtagtttgtattgttgcatgttgtccatttggaagcttatctaaaccattatttattgtatgaataatcttaatgtcctcttgaattatttgttgtacatagtatagctgaacacatatgagtgtattagtatgagctaatttgtggactttgttttgtttgcaacctgtggtaacttctgtggtgctcaaccaaatgttgataaacagcaatcttgcttcaacccatattataagatttttttttctttttgcaaaacttaagagtttttttattgaaagcaaaatcatcttaagttctgcaagcaggatttgaatcatttgtgatatattgcaggttggtcactcagcatatgttgattccccatttggaccagatgccttccgggagtatgagacattacttactcaggaccatgaggaacttctgaagaagtatgaaaagtcagatgagcacaaagataccactttttacacaggaaaagatttcacatcggatggtggtagatactccaattgggaatctggggtgcattatggctctaattctgaatctagcccaacaaaaaaggatttgtttgctgatgagtcaagccagctagaaactaaaggaaaaagattatctgtaactgtgactcactttccgatgattttctctcctatttcctctaggacttttgttttgccatctgaaggcacaatggctgaatcatgtttatcaaaccatcatgaagattcccttagtccagggctacctcccatatctactggtagatcttttgatggtgatgagattccccccggagtgacattgactgcccagttcctttaccatctggccagtaaggtaaagatttatcataagaacatatttcttactagtggcttcttatttttcattcatataaccacttagtgatccgtattacaaaacatgtgtagatggacctaaagctcgatatattttcacttggagatacatcaaaggtcatcgggaagctgatgatggatatgtcaagtctatatgatgttggtcgtaataagagatctgctggcctgctgatcgtagatcgtacacttgatctccttactccttgtttccacggtgactcatttcttgataggatgctgtcctccttgacacgcaaggaagggacttcatcctattttgtgtccaaaaatccacaaactccaagcaagcattctgaagctactgttaaacgtatcccactagatataaaggtcccttttgaaaaggtcttcagcaaggaagaacctaagagtaggaccagtatgttacccgaaagtatcatgtcatttgtgtctggatggaactctgctgaagttgaatctgaagtaacctggctacctgattacgcggataaagctcatgatgacaaactcagcagtcaacatggtagtttaaatggttcattcctatccaattatgctggagtgtgctacttggaatcattactcgacagaggagcaaaagatgggttaatgttgattaagaaatggcttatggaagctttacaacatgagaagttatccttcccatccaaaggtcggcaaggagctgcctctgtttcagagcttcattctatggttcaaatgctctctcgagaccagttatccttagtaagaaacagaggggttatccaattggcactggctgctgaaatggctctccaggagcctcaaagttctcgctgggatgcctttacaagtgcagagagaatattaagtgtaacatctgcagagacaactcaaagtcttgccagtgagcttcgtgattttatcaacactagcacttcagttgaatctcacaagcaagctaataaaactgagtcctctcagggccttctaagtttccaggatgttttgcttctaacaattatcgggtatatcttggctggtgaaaattttcctacatcgattgctggtggtccattctcttgggaagacgagcggtctttgaaagatattgtggtggactctatccttgacaggccatcatctgtgaagctcagatttcttgttggcttggagaatgagcttgaagctaaagctagacctaaagatggtgacaaaagtaatgactccatcgaagcttctaagagtactgatgattttgatgaccaatgggatagctggggtgatgatgatgataatactgatgatcagaaggatgaagcttatggggacatgcaacttaagttggaagtacgagacagagttgaccagctttttaagttctttcacaatttgtccagtatgaggttaaggaaccaaactcttggagaaggcctagcagcactgagcagatttgagactgacatatactcaagaaaaggcttgctctataagttgctattagctgtcttggcaaggtatgacattcctggccttgaatatcactcatcagctgttggacgtttatttaaaagtggactggggaggtttgggctaggacaggtgagttattagtttgtacttccttggttcctttgccaccactctgtagctatcctttctcacactcaatactatctgcagtctaaaccaagctttggcgaccaaagcattctcatcgtttttgttgtgggaggcatcaatgcccttgaggtatggtccatattctttggtttcaagtattcaatcataccagtatggcattattgaagctgtgtttctattatactgtttggtgtttaaatataaatatttgtttattttgtttaaaactacagtaagaatcctcaaatttgacctatattttctatgttttgctagtgtactggtagtgtggcactttcagaaccatcagttggtacacgattcctatcttcaaaatatcaggttacattcccatgtagaaaacatgaggttttagttagtgcactttgaaaagcgcataaaattgcactcatccaaataagagattacaaaccacaatagaactaaaaggaacttgcaaaaagttctctttgtaaagaaggtacatataatgtctgatccaatctgccgccaaaacatttgttagaatggtaaggaacctttctatattggaggagatatggaaagggatatggatggttgtattggtatatcaatatccgttgggtgtggattatccaatattttttaactgattatccagtgcttgttactccctccccaaattgatcatcatataatagaaactaaaatttctcaaattgatcatcttataaccgcatggacacggatttcatcggagtgcaattaatacaacatgggagaatgtgtatatttgtgcattatgttttaatcaatgcatgcactgtgggagaatatgtgcatattgtgcatggcgtcttaatcaatgcggtttaaattatcctaggtcttggtacacaaacattatacgatcaatttgggatggagagagtatttggactatctgcaacttttcccatctatgattgttccttttctctgtgcaatttgtgcttatgtgttggcaaagtatatatcgcagtgtgaaaaagtaaatctttaacaaattaaatgatcttttctatgcaaggtccgggaagtcatgaaggcaatatcagacagcagcagacctgatgtggagcttattcttgggggaacaacccttcttaccccagatgacatgtttgagttgatgttgggctcatccagctttagttagtctcaagcttaattgttgagaagctcagtccagttaacaccaatgcatctgccttggacatcttaagaatgatccagatcatttctccggaagttctttctccaaacgtggcagttcagatactgaaactctaaagattgtatcttggtgatgataccaacagcaagcataggcaattcaattcataagctcttcagatttttaatcgcaactgaatgcagcgatacagttcgtcttttgtaggacagccattgaaaacaatgacttttgagaatcatcttctggacattcattcatgctttgctcaaaagctggagtctactgctttggatcagtcactgtatttgcaagtgaagtcaaatatgaagtgaccctgctgactacacagtaaacactcaaaacaaggtgtaattctgtcttaagttctcttgctcctagaagtagctgctcttccgttcagaagccatatgtaaatttaatctatgtaaattgtttgctgttgattcgaaaatctttggtgttcactggtcaggagaactgtcaaattaggtacagcattgtaactgaaagaacatcattactcagttcagtgaactgaagtgtacatgcactatgttgtgacttgtgagtaatatcacaacccccaaaaaaaggcaaataaaattaggaatagtttgttatgttccagaaaaaaaataaacatatcataatgtgtgtaattggcctttctttttagtaggctacattttctggtaaaacattaatggcagctttcataatccaagatacataaatgtcttttggaattgtttgtagaggagtggaggcaacaatagaagttgccatatcagaattggtcagtggttttgatttgtctgtcagatgtgatcttccaatgctcgagggacatggagaagttcagcttttcagtggcattattggtgagccatgcagcttaaggaggtttgtgatggctttcagcttggatatagtgatgcatttgaagttcattcatggtagatcaaaagggctccaattttgttgaacattcttgttcctttgaacctaagaaacatggatatgcaagccatcaaataaaacttgagctctacttagtcaacattggggtggcgcgatgccaattctttctagatgaaatgcggatgtaggatgatggatgatcgatttgtttataggaaatgaatcaaataattatattttataaacctaacaagtatatcttagaataagtagcctaagtaatacttttgaaagtgtggcgcgaataatccataaatagttctggcccagtattccaagaataacgggacaaaacaaattcctttgtgttacattttgttatcctgagctgtatcagtaatattgtttaatatatgctttacagtggtattgttcaatatgtgtgtctttggatgttagtggcatggttggaaatgacaagtctgtatgcatgttggtttgaactttgaaccacttctaccattaagctttcctatttgccatttacctgaggaatcttggggttcacatattgcagattggacccttctcaattattgtcacagaaaagaaaaaagatgatcacacacacactgacacgtacttgagaaaaaagggagcttctcctagatctgaattctgacattagacttgtagagacactgggagtgttgcttaatcaccctgcagtctctggcctgaaaatgctagtgcttgtagcattgcttggcatgtactgtacctgccaggcttaagctcaacagctgtggttagttagtgctgggctaatcaaaatatttaacctgttctttgtgtgtccatggaacggcagacatgtcaggatctgaataatccgtgctcgtggatggatgcactgaagatgcatgcagggatgtctgcttgttcctgctgcagtgttcagttcttgcaatttataaagcatcttgctcttgctgcctcctgttgtcgttctctgcaactgggctatgtatcctgtgatttcgttgatgcattctgttcttttccattcttttgtttcttgcaatgtctccttctgtcagctaacatgatgttctttctcaaacagaaagagagagaaaaaggttatttagcagattaccaagttatttggtctaacaagctttctgattgtcattttgattgagataagaatcaactgatgataattcttctactaatttcttagtcttgcagcagtagcattctctctggcaaggttaattagtggagaaattttaccttacttgaaaaagtctttgttaattagtagagaaattttacactaaaaatttttatacctcaagatacctagtatctataggtaccaagtttttcattagaaaaatataatatcttccgatactttttttttaaaggatggtaaagactaaagatttccctaattattactaggatcatatagcagcctatactaatctgaaacggttaacacataacttcagagttttcagagctaaaccccacatcttatccatggctactgcaactcaatcatcctgcactgcacaagcaacagaacactgatcaccatcaccagaaaggaattttcctgttgacagtgtgttcaggcatcaggacaaggaggtgaagtctgaaaattgtaggctcttgctgcatctctgaacttttgctgttttgcactgcactggcattgcatgcatccagcttgctgaatatgatcactgtccccggacggcccaccggagacggagaagaaggcgggcgacgacggccgctacagacgccgaggagacggcgcggctaccgaggccggaacgtaccgccacggcacatgatccaaggcatctggagtctagctgaacaaacagttgagctcaaggtagagacgagctaagctaggggtgattaatttggcagcaactccttgttcgtttttcttcagaaatgttcagagttcagaacccatccgatcgaaacagttgtggtgatggaaggcagctcatgccgtggagtgttttcctgtttggtgttcgtcttcctcccacaatccgttgtcatctagctgttagcgtttctgcagagagagagagaggtgtttgtctgacaagtgcccatggaagctgtccatgctctgaccgaagaacaattcagacacttgaagctacttaactcaataatgcctcttgctttgtttcattgtggatattttttttcttctattagaacagtagagtttgagatattataccgtttctatgcaatgcaatgtgtttcatgtcatctcatgttccccacctgcaaatttcctgaaatcttgggagcagttaacataaacctgaaattttcaatgcaatgtgttaaaaatgttaaaaaaaatttaacacattgctgatggtgcatgatccaatacattgcattgcattgcagatttcagatgttgcaacatttttttttggaataattgttgcaacatttttaactgcaacatttttaacacgtctgaaaaactggaaatttctgaccttgcaacatctttaactgcccagttagctggctcaatgcattaggattcttattaacttatcctaaaatcttaccacagatccaaactacagagccctcatgatgcaaccatatgagaagctgagaattactactttgtttattcagtcctggacctcctttgtcctgtggctgcatccatgcatgcatatatcatatatcatatatgactttatgggactagatgcacacatatggtctccaagctagtcctttcttcacatcacagtaaggacatggaccacagctttgtagcatcagcttcagttgatgtatacttatcttcctttacccttttgtaattagaattcagtatcaccttttctgggacaaaaggtggaccattgcatgcatggatgcaaatgcaggcctgcatgcaggttcttcctctgatctgcaaagcttgcagactgcatgcagattaagctttttgccctctctgtcagtcatgtgattcttcaagtgtgattgtccttgagggatgtgggtatgatcatcagttaacagcatcatcagcaccattggatgtctctgcattgtaaaggatcaaaggaggccattagcattggtgtattggtaggaccatttgatttgatacacccaaacatatgtgcacttctaaattgagtactgccacggcatgaaaagttgaaaacttgcttgcaataatacttgttcacttactagtaggaatctgaatctccaatacttgtttaaaagacagaggcatgcacaacattgcatcacagaagctatatccatttctatcaaattaattaggaaagaaatgaaacgccaacaaaaaaaaacctaactgaacatgcatcacacctatgattcagagagatacatatagttcaattcgatccatcatatatcatcatcaatcatacacacatacacacatacatacatacatacatacaggaattaatctctctcctcacagacactaatcataatcaacaatgccatgagctcgatcgccatggaagattaagatagatgatgaagctcgcatgcaatctctcaactttttttttcttctctctctgtgcatcaatgcaattatgcaacagtaggtagcaggattaattaactcctcatcaagaaattaaccatggtaaaaaaaattaaaattctagtgtcttggagggcactggtagcacttggtgaagaggccaaaggtgtcaacttggcgaacgaagttgaccgtgctcgcccatccgccgaagccgaagccgacgacgagcacccacgcgacgacgaagcagttggcggcgaacgtccccggccagccgccgagcgcgcgcggcggcggctcgacggcgttctccctggcggccgccggcgcgaacgtcgccatgtgcgccatcgccgggatgatgtagacggtgaagctgacgaggaaggatccgacggtggagttgatggggccgaagaaggggaagatgacggcgaggaaccagatggggagcacgacggggagcctcgccgccgcgcggcggagcacgccggcgccgccgtggacgccgatggccttctcccacacgaagtagagcggcgtgcaggcgaagccgaaggtgatgaactggtggatgagcatgagcaccaccgcggcgtcgcgccacggcgtccgcggcagcagcgcgaaggcgttggagtggtccagcagcgcgtccccgaacgcccagtacatcgccgccgccgacggcagcgtcagcgtcagcacgtacgccgtcgcggcgaggtagatcatcttgaaccgccgcggcctccacatggcgtgcatgatctccaccgtcacggcgtggccgccgaacgtgtagaggatgttggtggcgccggtgaagtagagcaccatcgtcttgctcggcccggcgcgcggcgccgccccatccaccttgccgtgcacgacggcggcgacggtgaggtaccacgcggtgtaggacgtcatgaggaggccgaggaaggaccagacgcggtagttgtggaaggacgggacgaacaccgtggtggcgcagcaagccccgaagatgtaggtccatgtccgcttgtcgaggcggtcgttgatgtagtagatgttgctggcgcaggcgatgagctggatgacggagccgaagaggaggaaggtgcagttgaagaggaggccggcgttgcgccaatggcggccgaggaggccgtcgagcacctcgaaccactggatgacatggttgcggaagtccaccttgtcgcgctcccgccgcgtccggtactcgacgtagagcacgctgatgaggtaggccgtccacgaccccatcagcccgtagaacacctggaacgccaccccggacgccatgcccagctgcgagaaggagtagggcagcgtcagcagcacctgcgccacctgcacagaatcacgccattgatgacgtcaagatcgatcgtagtgatcgccatgagagtgtcatgtcatgtcatatgacgacggattgaacctggttggaggcgcagctgaaccaggcgtcgtagacggagccgccgtgccagaagaggctggagacggcgagcttgccgcgccgcctgcccgacgccgccgcggctccgccgacgccttcgccggcggtggcggcgccttcacgctccatctcgacgtagttgcccgccacgatcgtctccaccttctccgacgccatgtcgatcgatcgatcgatgcttgattgatttgcttctgaattgtgatctctcgatctagctagctctgatcgatcgatccactggatgaactggggtcttgtagttaattggatgggcacaggctgtggtgcaggctggctattgatttataaagaagacgctcgtcgatttgtactgtcttgtcgtgtgtattttagaatttagagtgatgagagtagctagcatgtgtgtatgtatgcaatatatggatggggcatgcagctagcagcacacgagcggccatgccactgatataaacaagtgataacaactacacatatatctgagcttatttgttattcccgatctcttctttcttgtatttcatagtcgtaaaaccgtgtgtcgcacagctattgttattgacatttgaaatatttttttttttaattttttgaggtcacatatacatttgtcgacaacttttcttctagaaatttgacagatgtaattatggtacaatcgagttgtaattacattgtaactacaatgtcacttgtatgtaacttttaaaaatctcttcgtagcatgctattttcgtgaaatggaggtcaaccgaatcctctcacatgtacgcacaatttgattttttttccttccttgccggtaagaatcttgaaacaaatctaacaattcaaattttttgtgaaagttgcgtacaagttatattatagttatatgtaaattacaatgtaattatatcatgatagtactataattatatatgttaaatttctagaagaaaatttatcgacaattatatagcaaaactgaatggtttcataattctgaattaataaatattgagttgtactcagtttgtaatcttagttgtagcttaccgacattttgcttagtctagaatttggaatcaataaaaaccccgttgtatccagtttgaagccgggttttataaattcccattataaaaaaaaacattcatcatgaagtataaactcccacaatatgtagatgtagaatagataagtttttaacatgacctgaaaagttaaatgcatatagatcatgttaatatgatccatctaaaatggtcagatattttttaacgtacgtacgaccagtttttagcaagtaccaattaggtttagatacgtaggagagatctattgtatatataaatattctgattgttcattgtgctccaaaataaataaacataatatggaatattacatgttcttagtactacgagctatgattttctactaatatattcatgtatgaaaagatcggagtttagtgtatatattatctctgcatgcatggctccaggggatgatctaatataaggacggcaagggctcgagtctccactactggtaccagaattatgagagctcttataaagatctcactaaaactttttgtcatacatatatataaaaagggttagagttttgtctagtttatttagatctttgctatatctctctgaatctactactgcatggcttggctaggcagtgagacagagagtcgtcaaagacatggaagtacagattatgtatgtatatcttctgaataatcatttctgataatatatattgctgtgatctccagggccggccctgactttttggtggcccggtgcggaaaaaaaataaaggcccccattcaccataaaaaaacaagataatatttaaaaactcattgtcattaacgaatttcaagcctaataccatagtatacatattttggaggcccctaatttttagaggcccattacggtcgcaccgttcgtactgccccagggccggccttggtgatctctatagcagatagctagccagatcgatcgatgcggttggagcttagtactaggagacgtggcccatgcatgcaaagttggccaatgatcaacgatccatgcatgtccggattgttgagttgtgatccaaattcatttacacttaataaaggccagcttctgccgtacggatcatcatcccttttagggttccactatatatatacctcttgtaagccgccgtgcggcgatgtaacctcacctcagatatagtgaaatattttgctggctagcgcccgtggttttttttctcctgttttgagagggttttccacgttaaatctcatgtcttttgtaattgatctattgttttttatcgtttgttcgtctatcgtttcctaacacggatgtccccttatcattggccgacgatatatagaagatctcaacacgacagctagttacactgatcggccatcatctcgattgattgcaaaagatatgcatgcgcacagaggccacttctatccttaattagttaattaacacgaaaaatacgcacttaattagtttttcgatactccctcttttatgaatattgtaagacgttttagattgtgtaagaaaaagaagttttcgatttatcctaaattaagtttcattaatttttaacaagtttatatagaaaaatatagcagcattctcaacacaagacaaatatacaacggaaatattggatttaatgaaacttattcgatgttataaatgttactgcgttttctatgatcttcgtcaaacttgaaccttaaacgactaattataatacggaacggctaatactccatttctctgtttcactatacctatcaatataattttgattgtcactgttttacttttaattagtttgacgaactttcaaatcgtttgttatgatgaacggatatatttattgtctaacatacttcaataatatggtaggttttgaatactcttgaatttatttataagtcagcggtggacaaaataaaacaaagccaatcaaaattagtaaagtattatgaaataagggagtattgtaatatctacagtaatttggtcattactcagacaggaattaatactccctatacgtctaaaaagacttgatttctctaagcaatctaagaaaatttactagtgaagaaaaacaccaaagtgtctcttatttagtattccctccgtttcataatgtaagactttctagcattgtccatatacatatagatgttaatgaatttaaacacatacatatgtctagattcattaacatctaaatgaatatggataatgctagaaagtcttacattgtgaaacggaggaagtattatttgtaggaaagtagtattgccaaatgggtagctaaaggatatatgttgaatggataaaactccacgatttatatggacaagggtaggggataaaaattaattctttttttaacaaatattgaacgcagtaaattaagtcattttgggacagatggagtaataactattttagaagacaatattaatattatttagcagcgtgattaataacgatgtgttcagtggtcttgtgcgcaattagtaaatatttattttagttttcgaaagtgtttatagggataaaatgtacgtgtatatatgttcataggaataagtatgtactccatccgtttcagaatgtaagactttttaacattatccacatacatatagatgttaatgaatataaagacatacatatgtctagattcattaatatctaaatgaatatggacaatgctagaaagttttacattgtgaaacggatgaagtacgtgtgtatatgagcggttttcatctagaaagagtcatgcaatgctagctagctgtttatataatcaacaaaatattgcatacatatagttgtgcgtagtgtaatttgctagtatggaagcacatattatatatacacacacgtactgtcgaaaataattttaatttcctcaatactatactcgatcaattaattgctttactgcggctttagacaagatcagatttcatacaaatatttttttccatatttttattgttagtgacatagtgtaatacatggagggggttctatctctccatctctctcagctgctgtatacatatggtcggcaagcagatcagagagagcagtggcataactaattagttgtcacacgtgtagcacaataatgtggagcaccattgcccactcgtggagaaatcatgttcaagatgaatcaaacacagaagggaccataaaaataaaaaaaaatgaaattaattagaacggggcataatactaattaatgacatagtagtatatataaaaggaaattaacataaggtaaatatataaccatataaagaaatatcatgatcaaattaagcaattaaagtcatatatagtgtattaccacacatttgccaggtcatgaaaccgttctatatacatgaagtatatgtaggtctattatgataattgtagttagtcgtcttggtatgtctatttttcaatagacattatatatttttgagtcgttatcatggtactattcccatcaaaatagtctcttctgactcataaatgcatcaatgcatttttttttaatccatcatatatcaatgcatccggctcagaataatcatcagtgttctttgcttgatacaggagaacttctttgtgaatcacataaaagtgtcaggaaagtggggaaaaaatgtgatgtgtggggactcaaaaatatcaaaattaaattaaagtgtgcgttcacaagttatgattgacaaggttctacaaggaatcaaggaggtaggcctagccaactttttttaatagtgctcctcttttttttcctcctttaatttctatatgattcaataaacaaggggaaatatagtgtactactccagtagtactagtgattaatttggaatcggaatttcactttgcatatactcatattaagtaacaatagaagatcaatgaagtactagtcttggggcaaattcaaatcaaatatcacttcccagaacgtgcagtcatgcaccaagaagttggtaggtcttgattatgatgatgagctctcacttgttgaaacatgcttctcggaaaacaataattagggaaaaagcaaatcctgttgatgtaatactagttgcaaagtagtaatgttatgcgtgtcatcagatcacataagccaatgtacgtagatgatttattatatgaattaacaaaatatatatagtattccctcagttccaaaaataaatatatgtacttctaggattcaaattttataccacaatataaaatttccatttattctcatcatttcaatgtttctaaagccaatcaaatgcttggaaaggaaatctaagcaatttgaaattcaaaaattgataactaaagtgattaaaaaggattttttttacctaacttagtatttgtaaacaacctagaaatctttatattttataatggagggagtaattgctacgtatatatttctacattgaatgatatttaataataataaagatctaaaaatagctctacgattctactattcttaggagactgattaaccaagtgaattacaaatcgagtatatcaaaaactataaaaaggccagcccaacacacagtagaatgaaaatgaagttgcaatgtgttgagagtgccaacctaactaatgtctggaatatttctagcctattcatgaagatcagccaacttttttgacttgcaccaaactgccaagctaacttaattattggaatatatattataatcagcaatcagaaaaaagggggaaacaacaatgtctaccgaatagctagctaggccggtgtgtaattggcttcatatatgtgcatacatatatattgcacaaacgacctatgcttcatacatgaacgttactccatccgtttaaaaatatataacgacctaatataaaatgagacatattctagtaatataaatctgaatagggatttcttagtatcgagatgtatcccatcctgtattacgttgctatattttggaacggagtgaagaataatcaatcaactgagcttacttgcttggtagcttccaactctgtgtgatctcatgattacctttggagctgcagttagctgttggttactaaagaaactaaaggtgcaatataatataatggtacccttaagcttaatctctctcatcatggccgccctcgatctcatggtggcctagctacctttatttctgagactttttcatctctgaatctgccgggaccatgcatatgcatatgcatagaggtgccccaatttctctatctttcggaccatctcatcaaaaggacgttcacagatgatagatcaactgttgtgtaataggtatatttgcaagtttcctttaatttcaattttggcatgatcattacacatgttgagatcgatctagagagagagatggcaggagtctttcagctggcttgagtacgtgaaggcagagctggctggctagctagcttatgttgaattcatcacttttgggctaaccagcattatgcattatgcatatggccatatgggcctgattgatgaaagggccattgcaccttgactgaccgtgagatcgccttttaaatgattatgtgtatatcgatcggccttatattaatatggctatactatagtaatatggtgctactacctctgtaaaaaaaaacttcattattttcctatctcacacataccaatataaagtcaaaagactaaaatgctctccatttttttcgaactccaatacatttgttcctcgcttttttaaatctctaatgtatttgtgtttcacttttccaaactttgatgtattaactgtcttaaaaatgaaggcattatgggacaaatgaaaaaggtaacaataaagtctttgtgtgatggagggactactacatatgttttaaaatacaaattgttgacttttgactattcatcttattaaaaagttaatataaatatgaataagtcatatttgaagtatatttaatgataaaataagtgatatttacatactcccttcatcttaaaatatagcaattctagctatatatacggacatacttttatgcaaatacatatagctaagttatattatatatttcaggatggatatagtagtatttttaataagatgaataatcaaattaatttattatcatcaggagtcaaacacatcatatatttaagagtcctgctccggtgctttctacttggagtagaaagcaatctgagccgttcattatatttaattgtagggttgtgatctatttctactcccaccagagttagtggtagtagaaatgtacaagggtatattcgttcagggataataattcgtgcaggggtattatcataatttatcaatatctaactcatcttcggcgacgccaccgccgtcttccagcactgcgacatcgtcgcacgcttccccctccgcggccagcagaacaccatcaccgcccagtcccgcgccacaggcttctcgttccaggactgcagcatctacgctgacaccgacctcctccgcggtgcccccgccggcagcagtgtggagacctacctcggccggccgtggcatccgatcccgagcagctcgccattctccgacacagtggaaaactaatggctgattccttcgacactatggcaagaacttgccatggagctcaagaacgccctctcaacctcttcagaggcatctctgctaatcaagcacatgacgtactctatcactgatgcatcgcacgtcaacgtgatcctgccatcatcgccggcgaagccaaattcctcttgagacatggcgaggagctcgccgaaaaccaccgtgcaaaggtacaccaatggcaccctcgaaccgtgccccgtcggtggtgtacaccgcgctgtggcccttgccggcgagagacgacgacaccatgctgcagcaatcgcctgtggtgcctgccgtgcccatccaccgaacctgatgtgatgcgaaccgaacaaaacatcccatgccaaaattacccctaaactatattaggagattacttacctgcccttttaaataaacggtcgagattaattctacttgtagtagaatactgcaagtagagtgcaccggagcatcaccctttatttaaaagcagaggtagtcgtagtttttatctagatattaattatattacaacacatttattctgagacacttttgttagacacgtggaggaggataagtctacggttttcatgacaccacaggagtcatcagagcttcactagatggtggctgacactaccaacaaacgacttgaacgtggttcttataccctagaactactatgcttttgaacttcctagtcctagtattgccaaataacctcccaatattctttttttttgaacgatctacctcccaatcttctgaataccttgttcatgtgtatgagccattgatccatagatggtaagtacccacgaaccattattaatttagctagggcatttgtaaataaaatgatttaaatgatgatctgaacattgatgtaaatttacattaggcttttaaaacattcagaattgacaatcgtcttgaaatgatgatatatgtgtgtcgagcaataatgctgattaaattctcatgtctctgtcaccataagatcggtcgacacatccgcatgtgcttctgctttgttcttgtcatgtgtggctctcttccattaattactttgcattgcgtgcatgtatcatatgcttaatcatggctcctagctacagtcgctagtggctggatatctaaatgcaattaacccattcgatatcgatgtgcggctcatttctggagcgtgctcgttgaccaaggtggctagctgaatgcctgaatctgatggcatctcttttgctcaatactccgaataccatcgcaaaaaacagagtctaaaataccattgtataatgtgtcatcgacatatgattcgtattgtgtaactcatgtagtatctctattatatgtgatggtatttttcatatttctttctcttttggtaattagctcaattattcagacttgaataaaaagaactactactttcatcaagcaacatacgatgattacaatatatacacgccattgaaaacattactgctttcatcaagaaacatatatacgatgtttacaagatatacacaacattggagatggcatccatgttgacaaactccctacaaaatcattcgtgaatggaaggagactaccagcaaaaaattaggaagcccacaaagttggccaatgttcaaaataactaaccagcccatgtacatataactgggccggatttggagaaggcccataaacttgtacataaaaaacagtttttgtcactttgggttggtttggttcgtggcctaaataggccttatcaaattttgtcagtgccaaattttagcaagttttagcatgactaattttggtaaggcaaagttgtgtttgtattgaagccaaaatagtttgagttcactattgaaatggcctattttcttaggcatgtcaaattttggcttcaaaccaaatagacactaaacactattgaaattgccaaatattggtaagtctaatttaggcctcaaaccaaaccagccctttggcaatttacagtacaaatataaatttttaatgcgttaataaaattggacaatgttgtctataattttaaatgaactcaatgttctttcatcctatttgaaatacagtaatttcactaaaatagtatagttttcgtaaaaaaaaatagtaagagagatttctcgcgctccaaacattcaaatacagcatgattgtatctcgtcgtggaattgccagtatatgcattattgcatacacgttcaaatacaacatgatttgtattgtcagagcccaggtatatgcatgattaaccactacggagtactatactagtagtgaatagtatctggtccaaattaatagttcctctctgatctgggtctcagatgtgatgaactatactaacatgcaattagcgtatactaatcgctggaacctggaagcgcgcgctcatgcatgttcaaatgttctttgttgcgtacatgcgagcgagtggcttttctttataggaggacgaataacatatgccaaaaactttagtttttctttgaaactttgtccctcttctcaaattaaagttggcatgaaggggaaaaatgtcaattgtcaaaggcatttatacattaaattacaatatactccctccccgttccttttacttacaccagacacagttcatgtagagtaccaactttaatagcttatacttttttagaaagaaaagttacaatatgtcgaagatgtcatattatcagaatacttttattataaatataactatttagttcgtcaaaacatcacaacttaaaagtcttcaatgttctaaaataatacttccttcattctaaaatataatatttttaagctactcctattaatctagataagtgtaatgtccaaattcatagataaaaaataaatatataataacggatacaattcacgggtgcatgtggcagctagggatgcaaatggaccgacacgcgaacccatttataggtcagataagtgagtgacccaccggttcccatatatcgtggcagcttgccgtacctgaggatgcaagtggttcgacccgtgaacccacttatagattaattaattctaagtaaacaacatgtcaattcgtggcccgtgggttacccactgattttcggcctcgtattttcgtttatgcttatgcttatcagctaaattttgaattttcaaacttaaatttgaatctgattttgaggttcactcatcgaagtttattatttaggcattgcttttagatcactaataacacgtatataaaagttttattcataaattagttttcgcttgtaaatatgttattcggcatatttcaccaataagccaaacaataggatcctttacctgtaagtaggttcgtgggtctagcaacatcaaatcatcaaaaaccgtcgagttcagctgtgcgtcaacacgacacgtgtcacaagaagggccgtggcgtctgacgctgacaggtggggccagaaaggggtgcatgacgcagaacctgctggaagtatgcggaccgtctgtttcttgtgatgaacggccgagattgattgacgctgcctcgcatcgcggatcatgtctgctggtctccgtccgttcctgatctgtggacggccgggatctctccccacaaaatctgcacacgacgatcgtatcacagtggaattatttcttccaaatttttttccaaatcactttccaatcatcatcgcgtgcgccaatccgaaccaaatcacgcagagactgacaagactagctatgaatgacaaagctatgctacagattagccgtttctgaatctgcgatgctaatgatcttccaaagaagaaatctacgtacagaagtgctaatgattgtgagcagtgcagcagcagggctttttaggcgaaactgaagatcttatctacactgcattattacttgactctctctaatatacatctttaatttgcactcttttgactgcacagtaaccgctaagaacggatgctgggattaatccaaactaatccacatcaacctgcaccaatcatgccatcgagatcacaacagcatcttgcattgcaagcattcttcctgctgaatttcggaactgtcacattcagaatgatgttcagaagtttgatcgttaaaccatagaacagcgtataagcaaccacaaaatagtttgtgggcaaaacttcaatatctgtgctattcgtggtttaaaagaaaatgctagaaagaaactacaatgagaaagccacaaagtcaatttcaaaattcaaattctgacaatggcttataagctgaaaagcaaacaatgacattgcagaaattcagtcaaacaaaacttaagagagagagggagagaaatattcagaaatagtattttagtgcattcttgccacaaatgtagaagtattcaattaacaggtgatctttctactctcctctaatccatggctaataaaatgcagagaaggaaagaaacaggtgatcacatcacatggtctcatcagaaggtcaggattgggagcatgatggcatagcttctgcatgcccaatcgcccatgctgcaaccgcacataaagatccccttttttctccttggcatttgtgttgcatttgtgtgtcttttcattcattcccacaccacccaacaccaccacaccacatttacattacattacaaccaaaagcttcattaaggtcattagtgttaaactaatcatggggtaatggagcctaaagcttaagctgtcttgctcaaaaacaacaagtttttagcttagctaggcatagtgacaacacactcactcccctcatttcatcaaacaccttcttcttcttcttcttctccaatggaagctagtgcagccaaggagaaagacaaggatggcaagaagatgagcagggttggaagctggggatccatggcgttctactcctcgtcttcttcctccagaagccaaccagtgtctgcagcagaaggcaagaatggtggcaagaaggagaagaggaggagcagcatcagcaggagcatcacgtgtgccggatcgatctgcagcaccaaggagagttcggtgtcgagcagggggagaggccggcgccgccggagcggcggcggcggcggcggcgatggcggcggcggagggagcacgtcgagcaggtcgctgatgggtcccgggtaccacggcgactccgcggcggctgtctccgcgtcgtcgtcgttcaactctgtgatgacggcggcgacatccgccaccgcgaccaccaccaccaccaccaccagctcgtcggcaacctcgccgccgtcggcgctgtcctcgccgctgtcatccatcggcggctcgttcagggcgatgcagatcaggaagctctccggctgctacctccactgccactcggtgctcgacccgcgcaccctcgccgccgtcgtcttctcctgccccgactgcgacgaggtgttcgtcaagcccgactccctcgagctccatagatcaaccagacacgcaggtatcatcgcatcaccatctcaaaaccatcaaaatttcccacagtatattcgctcgtttcgtacatgccacctaaatagtcataaaaaaatttaaaaaaaatttggcaacattgattaatatgaaatatatcactccactaatatacaattttaaatttaacttctacaagttataataaaaataacaaatatagctaatatagctgcgagtgtatagtaactatttttagtttaatttatttttttcaacttgtagaaaatgaatttggttttacatgtttgtggatgatatatttcgtattaatctattaaactttttaaaaaatttaataactatttagaataacatggaaataacgagaggatgtctctcgagagatagaaaatccacatcccactgaatcttctcatctaaaaactaacaatccatccattgattcgattgggattgcagtttcagagctcggggcggacgacacgagcaggaacatcgtggagatcatcttccagtcgagctggctgaagaagaacgcgccggtgtgcaggatcgagaggatactcaaggtgcagagctcggacaagaccatcaagaggttcgagcagcacaaggaggcggtgaaggagaaggcgaggagcgccggcgacgaggccgggaggaaccccaggtgcgtcgccgacggcaacgagctcctcaggttccactgcaccaccttcgcctgctccctcggcctcgccggcggcaccgccctctgctgcgcctcctcgtcgccgccgccgctgcactgcaagctctgcagcatcatcaaagacggattcaggtaactcgaccaagatgttcagagcccataattctttttttcacaaattcatactacctccgtttcaaaatgcttgatgtctttaatttttgtataacgtttgactgttcatattatttaaaaatttagtatagatatataaaagtatatgttaagattatagtttctttaataacaaaacaaaatacataatatctatataattcttagacgaatgttcagatgttatatgaaaagtcaacggtatcataggatggatggagtatttcgtaataggttaatgtgtattttactgacaatatggatccgatcccacacgtcagtgagacaatgggtgtcatttaaaagatttatgaagaacattttgttgaattataagttgtttggtttgattgatgaacaaaaaaaaaattcatcagggtggatggcaatgggaggatcacgacgatggcgacgagcgggcgggcgcacgacacggcggaggtttcgccggacggcgagaagagggcgatgctggtgtgcagggtggtcgccggcagagtgaagaagctccacagcagcaattcttcagaggatcatgactgtgactctgtcagcccctgctcagaaggggtttactcagatttggatgaactgttcgtgttcagtcccagagctatacttccttgctttgttgtcatatacagtggctactagatcaaagaaaaccagtagaatagcttgattttgccactgttcttaatctagtttctttctctgttgtaggttgtagtatgtttacttacttcatgttcatcaagtcagatcataatgcaaaaatggaaaaaaaaaaactgcctgcaaagtgcaaatctttctcttgtgtcacagttgctctcaagtgtcattcaaatttgacatgtttgaaaagcaggtacaagatgggaacaaggccatgagatagacaccaaaaacagtgattttgcttgcttccaagatctaacagaagtacaaaaccattgtcaatgcagagtttttgtccatgtgtgctgagcaaacattagatgcttacacccatgaacactttgggttcttggaagaagcatctacttagacaaaaggctaagaacaaacagctactttggaagaagcaatgaactgctaaatgttatactattcctaccctgcatccagctacatccaactcaatatattactaaatgcaagtatagtacagatccctagcaaatgctgcttcttaattgtgcagctctacaaatataaattcctctaaccaatataggttaagagctaagcagtagaggcgatggtgattatacctgtattttagtcaatcatattctgaggttgtctgcttgtggacgacaagttgcacaaactgattccaaacaaagagagcacacattcaccagattcaagattgttcatcaacaatttgttaatctagcattatcgtggcctctgatctgttcactgcaaaactggacaaacgtcaacagacaattttacagcaagaatgtcatttgtcacgaaagcttaaagaagatcagtgtcctcaagttgcctgtttttgttcgtttggattcagcaaacaacgtgcttcgaacgctatgtcaggatgtgccatgatttgtttaaagaagtcaagtctgcagtagatctaaaattgattgtcttacctagttatctgcaatttcacatcaattggttcaggaacttgcatcagctagtgcttaactagttgtcttttgccgtacaattgtttgtcacaactcacaaaattaccatatgccatggattattgagctaagatgcctggtattgcaggctacattggataccagtgggtatcaaaattcctagtggtgaaaaaaaaatcgacatccttgtgagttgggaaatttggtcagatgaggagtacagcatattagcccaactcttaatctaagaaaaaacagattttgaggctataaatgtaccattaaaagtctaaaattgccaggtcaaccacattctagagtgacgtggcatgacacgtgtcgaatcaaaaggagtctcagatccacgggaaaatttgcaataatttgtatatatatataggctgtgttataaattttttttatcacacaaatatagataattagataaaatagataggttgagtgactgtcttgctcatgtatactgggttacagaataaaaactgagggccagaaagatcgcaacacaaaaatgtcagcaacgctcaatgatgatgaggccagcaagatcctcctctcaccagagcctgactaaacacaatcaccatccatggagcacgccggccgattgctgaaaaatcaaactctgcttcagaaacaaacggtagcataaattgtaaccatataactgaaatgtgtttcttcagtatttcttatagcaatgtaacagcattttgtccttataagctgttacttccttcgtttcataatacaagtctttttaacattgcgcacattcatatagatattaatgaatctagatatatgtgtgtctaaattcattaacaacatattcatatgtctagattcattaacatatatataaatacgacttacattatgaaacggaggaagtacgttattgctataagaactactgaagaaatgctacatataagagcaggtacaatagcagcctattagccagctataaacatattttaatgagataaaagatgagagagagcagcggactacagatctgtaaccagctacagcatggactccaagacgcagtgtgtgtatgactggtgggactatatattaatagtatagcaagcaactattgtataaattggctattagattggctataaataaattggagctaacagtggactatctaaaatgtcaacaccccccctccccccccccaagcaagtacagttctaaattattgaaagctccaaaatccaaatgatatattatcaagaaggcgtggtggttttacaatgcgccagtgatttgtcatttcaacagcagtacaagaacctcaagcacaactgatgcaggtaatcaacctgagcagacggtatcagggttaacattcggaagaaacctccaaaatttcggtgggtcatggtgaatgttctaccggctgaaaaaaacattagtagcaaaatatgcccaaaattcgttacggaatttcggtgacccacggtattgttaagtatcggatatcataaattaactgtatgtcccctcagatttgcttgaactacctagattgtgtttttgcaacacatttccaacttcactccctcgtttttcaagcgtacgtttttcaaacagttaaacagtactacctccgtcctaaaatacttgttgctttaagttcttgtttgtaacgtttaatcatttgtcttattcaaaaaattatgaaattattatttattttatttatgacttgctttattatcaaaagtacttttaagtatgatttaagttttttcctaacgttgaacattagtcttattcaaaagatgatttaagtttttttctaacgttgaacattagtattattcaaaagattatgaaattattatttattttgtttgtgacttactttattatcaaaagtacttttaagtatgacttatcttttttatatttgcactaatttttttaaataagacgaatggtcaacgttagaagaaaaaagttaaatggcatctaatttgggacgggagtagtattttttaaaaaaaaagtttctatagaaaagttgttttaaaaaaatcatattaatctatttttcaagtttttaattaatttaattaatcatgcgctaatgaatactaaggaacctcaactaaggaacactacccatttcaaaacatatgatttatgtaagtttttcaaaaaagtatttgaaaaacgtgtacattttagaatggaaggagtggcaatttactagtagtaaagatacaataaatatttcttcgtaaacacaacctttcccaatcataacaaaatcgaggtgcaacccgtaagatttttcttttttaaaaaaaatttgcacctctcctgtcgcggaactgcttacggcaacatcatatctctcggtgtgccgacatcaccggagcagtaaccacctccgccggcggcgccgacaccgacggcttcgacggggagacaccggcctccacccgtccatcctccgcttccttgtgcgttgccggcgatggagaagacggcggctgcccctgcatctgctgctgctgccgcaggaggcgccggaggtgaggcggggcgtaaaacctatcattggagctgaacacgaagcagcagcaggaggaggaggaggaggagggtgggtcggccatggcggtagggctacgaggctgcggatgatggggttagggtttccgagggttgtggggttgaagcgacgtggtggcgatcggtttttttttttcagagagagagagagatggcgatcgagttgggtccaggtttccaaaccgccgggccagggttaccacgccccgacagtaaacacggttatcgcgcggtaaccgcggtaaccgtgaaaaaccgtacaaaaccatgcaaatttcatcaaaaatttaaattattttttaaatttatttgaatttaaggaggttaccgcggtatttacgttaccgtatccccgcggtaagctcggtaaccacggtaaccacgcggttacgggcggtatgatgaaccctgacttgggtcgctacaatttctagcggtcaagattaaatgggctgggctagttgtccgcataatgggccagacacggcggtcaaggcccaatctgtcagaaactgatgggctgggcccaatctagtacacgatgttgcatggcctttttctgacgaaaatcgtcaaggttattggagagtaatgtaaagcagtgatcaggaaacataaagaaactgatgatgatagcacatttgcactgttgaacatattgatattcaggaagctggaagatcacatccaaatgatcattgcatgtgttagggacgcgcacgcgtgtgtatgcgtgtgttgtggtgtgagtgtggtgtgtgttagtgtgcatcctgagttatacccttttaaaaaaatgatcatggcatgaacatgttgaaaaattgcacgaagaaattggatgagctctgcaggaaaatttggctggatgaggctatcattcgccaatcttcgctaattttaatcattagtaattaattagtgataattaatatatggtgcaaacaagacgtcatgatcatacgtacaacatccgtccaaaaaagacaacttctagaaatgaatctggacatatgtttattcagattcatccccagaagttagtattttataggacagaaggagtaggtggttttcctctaaaacaatatttttacgcagctcttttaagggtgtgtttagatcccaaaaaattttggtcaaaaatgtcatatcaaatgtttagacacatctatgaagcattaaatgtagacggaaaaaaccaattacacagtttacatgcaaattacgagacgaatcttttgagactaattgcgccatgatctgacaatatgatactatagtaaacatttgctaatgacgaattatttagacttaataaatgtctcgcagtttacaggtaaaatctgtaatttgctttgttattagtgtacgtttaatagaaagaactaaacacggcctaagtaagcatagaaagtttgtgtttttgtccagcaaaagaaaaggtaggagtctgtatgtgaattggtgataaacaaattcttgaaagtaagaatgcaaaagatgaaaaattatcgaaagtagaatacagaaagaaagacaaaaaaaaaaattgggggtctgtcagaccacctctgcgccaccctgcactggtaccaccagtcaggaacgatcctctacagccgtcagatggttccttccagagatccatccaagccgttaatcacgctctggcccagaggtcatggacccatcaaccagactagagtgcttgcctccttattggtaaaggatgcaacggtacgagcctatagaacagatcctgttcaagtaaggtcgtgccccaagcctccaagctccagtttataagtagctcccgctccaccaaaactggcgaggtggtactaatcgacagcgcttgacctgcatacatttcgctggtagcataatgggcccagcccatctaaatcatctgcgagttattgaagtccacaatcacattcccaccgaaccacgtgtgctgtctgcactgtttattctgagattaagcttgaaagcaaacgttgtatggttccaattaaacaactccaagcaatatagagttttttttagataaaaacaataaagagatttgagctgcttacttatgggaaaataatactatttcaggttcaacaatgcatattttcgagtagaaactagtagcagataacttccatgtctgctgttatactaaggtcctctttgtttaggcttataagccaacttataaatcaaaaagtctaagccaaaacaaacaagcagctttttcatttggcttttttgaagccataaaccactctaacactattaagccaaaagctaggttggaaaagcttttttggcttatatgagatagatgtatgactccaccactaaacttaggacattaaatccactggcttataaatcatataagccaataagctgacttaaaagtctagtccaataagcctaagtctaaacaaagagggcctaaatcaaaggttacgagagaagcataatgctttgccagtttgtttcctggccggtgtgtactgcaaaacattcatgaactatcccatgcttttgctctcaagaaacatgcaggattgcaggttacctagaacatgagaatattcagttgcctttgccaattttttttaattgtggatgacatgatactgtgggagtagtagaacgacctgctgtatgtaaaggatgcaactttggaaacttatgtaacagatcaacaacaccagaagttcagttgtgagcagaaattcagatccatggttatgcaaaaaaaaaaaagttacatatgacaactgtcaaagatgcagaataattctatccaaactgtcacagctcacaagctgccttgggggagcactattaacctgctccaagcctccaactgcatatttgaattcagtgtgaactatgaaatggcaatcatgcagataactatatttcatcagtgttgttacccataccctgagactaggagaggaaaaaagagcacaccttcatacaaaagatataatcaacggtggaaaatgaggccaaatgaattgttcaaatactttgttgttggaatcaaaccaaacaacagtcataccatatagtattattagttagtgaactatatgcaacaagtaactctaccgaacatgttcaggtttctgcatattgagcaccagagacgcaaattggcatgcctgcatccaagcccaacaatccaaatgctcatgacacaacaaacataaaagagtacatgcttagtcagcgccagcaatcataatgttaatattataccatattccatttcctaagctcaaatacagatgtcaagaatatttcggtgaactgaacatcgcatcctaacgcatttcacttgtattacttgagcttaagtctaagaatcagtaacatcgtttgcacatctcaaattactaactgggaactcctcttaaaaacagagagatattgaagggggtaaaccctttctacaactctacagcaatatcacctagtgagagagaacagatcaacagcaatgccctgcgcctggaatgcattagcagtttagcactagcccgactactaatgaactccatacatacagcaaaaaccaaataaatagccgctgttattatagtaaagaaataaacttattgcagttcatatgatcaaaggctcaaagcaaacaggcaattagtaggtctttgatgctttccattgtcaatattgcttctttctattcatttcctttctttcccctttttcggtagaacattaagacaaacaatgacagggacgatcacaagtgactctttaatcgcttttcattctaaccatatttggttaaataaacatcaacttaggtatgtgactatatgaaatatcaattaatggactctttcaaaaccaagggacacatcaagacacaaatcattgcaatttatgctgctgagaattccataagatagtagttgtagtaaggaacatcaaattaatatatgttcggtaagaaatgcataaaacaagtcaatacataatcgcctgctaaaatccattactagtagtagatagcacactacaccatgttcttttcatcaaccgcacacataaatgtgaaatatattaattcatcagctatatgcaaaaacaataacataagacaagataacttacaatacagaactggctacatactaaaccaatgcttttccaagccacaagagtcgacctttacgcattgcaaggtttagtagacttcaatgaaattccagtgacaaactcatgagaaaaatgaactcttttatcaccactgcagaaaatcttacaagatgtaatgcaatcagaatcattttgacaggagcagtacatcaggcttccgctgcttgcctggtgtgtttggcttggagctgggtctagagctcgacgcggtgctaccagctgtgcctactgacacgattgccccagaagctgctgcagctgcctccttggcagccttgcgtgcgcttttgtcgagctcgatcaagctacgggacgccaagatagcctgtggcacaagctcatgacacgcgcgggcatagacaacccgcacagcttctgcggcggtatcccgcacctccgtcggattcagcggagctaacaggcagtgaccaagaactctcatcactggctgtagaagctcccatggaagtggcaccctcccctctctctcgccacaattccgaccattggtgtctccgttgacgcgcatctttgccatttcctcctccaaggccttcccgttctcggcctccgatgacaatggcgaaacggaccccaatgaatcagcctcctcctcttccaactccttctcatcaagctcaaatcggcacttgcagtactgccccgcccacgccgccacggcgttgcaagcatccaccttcgatgcaggcggcatctgcgaaatcttggcatagtacgcctcgaaggcaactccgataatccccgcgcgcttggtcgacttcaccgccgcctgtggctcaagcggcggcgatagcaccccgaccacaacattccccgcgggtggggggatcggcggcggctgtggccggcgaggggacttcgagctggggctggacagcggcgtgtggtagagggaagggacggagaggtcgggtacctggacaaggacgggcttgccctggcgattcttggcctcggaggagtagacggcgaggaggacggcctcgaagccggagagcgaggaggggagcgcgggcggcaggcggaggaggtagagcgacgagaggagcgggaggaacgcgagcgcggcgaggcggaggtcggggtccggggacagcagcgtatcgtagagccagtggcaggccgggtcgtcggcgccgccccccgaccggagcgccgcggacagcgcgacgtacgcggcggacgaccggagcagcgcgcgcgccgggcggtcggagtcggcgagcgccgcgacgtcggaatcggccggcgccgggaggatggacgacagcgccaggatgcgggacctcgcctgcgagaccgactcccaccaggacggggtggggtcggatgcggacgccgccgaagagttcgacggcgaggccgccccggcggcggacggggacggaggcatcgccggcggcgagagagagaggaaagcgagatgagatttgggcgatctctctccacagctctcgaatcgagggacctttctgcgtctcgcctacttctccatgggctcttttgtaaataaaccacaagcccgaggtgttattactagtactactagtaggtggtagttgaccatttctttttcttttcattttttttgagagagaaaaatagtgagacgtggcagttgactggttcacacgtcgacgtcgtcgtcgtcatcacgtcgctgcaccgagcggccgcatgcgcacccatgccgcggtgctgggcacgccggcgtggagcacgaaccagaggtagtaccccggcggcgccaccgacggcgacggcggcgcggccacctgcgcctcgtacagcccggcggccagctgcgcgacggtgcccacggccagggacaccaccctctggttcatcccgaaggagtgcgtcgcgaacgccggcgccacggccgccacgcgcacctcctcggggccaccggagaccgcgccgccgggcacctcgaacctcaccgccgccgcctccccgtacccgacctccgacggcgccgccaccagccgcggccgcacgccgtcgagccgtgcgtcgaagtatggtggtaggaacgcctccaggctgagctctgtcgggtacgtcacgttgtcgaacacgtagccgacgtgcgggttgctgccgccgacgagcacgcggccgagcgtgtccagcgtcgccgacgagtggtacatcctcgggatggttgacgcggcgagcacctcgaaccgcgcgccgagctgcatgtccggcttgtacagcaccgggtaggtgaccggctcgcgcccgagctcccaccccgccgtgccggccgccgcgccgttgacgatgagcacgtcgccggtggggagcagcaccatgtcgcccatggcgcgcggcagcggcatctcctccatcgcccacaccgggttcgcgtcggtcggcgcgatccggccgcaggtccggtcggccggggcgaacgtgccgttgcggagggcgaggcggtacgcgccgcgcggcgcgccgccgcagacgagcacctcggcgtgcgacggcgagtccggccggagcgggaggaggacggaggatcccgacgacgggtagttcctcggcacgccgccggggatggcggggaggcggcggagcggggcgcggttgtaggggtcgaacacgacggcgcggtcgttggcgaagacgaagacggtggcgtcggggaggaggtggaggaacgggtagaggttgtcctcggcgtccatgtcggtcgtctcctccaagaacgggaacaaggtcggctgcggcgccggcgcgtcgtcgtgggggaagaactcgaagttgaactgccgccggccgccgaggatgagcacgcggccgtcggcgaggaggatgtcggtggcgtaccaccgccggacggccaagaacgacgggagatcgacccaccccgtcgacggcgagaagaggcgcgcgatgcggtcgccattggagaacccaccggtctgcagcagcgtgccattggggagcagcgccgcggacgaacaccatgggttggtggcgagcgggtacggccgcagggcgttcgaccggaggtcgagcagcaccgagtgcgcggtgcagtcaacggcgccgccgccgccggcggcgagggcggtggtcgccgcggcggcgcacggcgagagcgcgtcgagggagatgttggaggggccggagtcggtgcggtcgaacatgaggacgtagtcgccggggagcagctgcatgtgcatcgccgagacgccggtgttctggtgcaggagctgccactcgccggcgaggacgacggctggctgctgggccacctcgggctcctgccatgggtcgccgccgatggcgtcaccggcggcgccatgggcaatgtagatggtgatcaggaggaggaggaggaggagggagaggaaaggtgatgcctttggcatggttgctctgcatgcatgtagattgatctttaagctgtctgatgcacggcattgctgtgatgtgatgcacaagggtttgtacaaaagtgtggtgagttttttggtacaagtttggtttgaggaggttgaagggaattcacatttgatggttaaaccttcaaactttaaaattcagtttaggttatcaaatagttttgtggctccgctctgtttaattgctacgcctatgttaatctgatcgaaaactatatttgtgttttcacatcatggtctaagtactaaaacaggaagatgagcaaataattgttgtgtttagttccacgctaaaattaaaagtttaaagaaattggaacgatgtgacagaaaagttagaatctaaacaaggccaatgacacaattcgatgatatttaattgttgtcgtttacgttagtttatttttctcatgggataattttcttagaggcagtggcatttccagcaggatttcctttggttggtttggagttagcattggaaaagagagagccaatctcttgacatcacgccctattgatgaaagggatttgtggtttctagtaggtagaaattacatttaggagaccggtgataagaacaataagataaagggatttgatgtttgctcttatttagttccaaactttttctttaaacttttaactttttcatcacacaaaatttttctacacacacaaacttccaactttttcgtcacatcatttcaatttcaaccaaacttttaattttggcgtgaactaaacacaccctttgtcactctattagtcgagtttcttgccattatgtttgttttattgggcccgcttcaataatcgggtcgaatacatttgctactaaacttgtaactaaaaaagcaccttgtgtctcaattgttttatcgatacacgtctaatccagtttgaactataaattctcatatcgatggtttcctctccacatggtttcttaaggacacgtttaaatcttaagtaagaaaaattctactcctactttgctaaggcacgagaggcatttggtacaaatggaaaaaaacagagcttttaaggcaagccgcacataaccgcctcaaaatccttgcccaccaaggatgatcgactctcctccgttgataagcaatggacgcgggcggttttctttaaacaaccgtaaaaccaaatgaacgctcctgccataggttatagccaaacgtggctgccttagcaatagcgatccatatgatttgtgtgttggtgatatatgttcatgtttacagagctgctcattatgtagtatgttgtgataaaggatataaaaaaacaatgttataggcaatttgcaccatttatagtttttttcttgag

SEQ ID NO: 5375 - DNA, 1080 bp, Oryza sativa
cggtcggtgaagacgtagacgcccaacagcggcggcataataggccaagacgcccaacaacggtggcataaaggccagccgtgcaggcggaaacaccagtcagcagcggcgaaggcaagccggtcggtgaagacgtagacgcccaacaacggcggcataaaggccagccatgcaggcggaaacaccagtcggcagtggcggatgcggcggccggtcggtgaagacgtagacgcccaacaacggcagcataataggccagccgtgcaggcggaagcaccagtcggcggcggacgaggcggccggtcggtgaagacgtagacgcccaacaacggcggcataaaggccagccgtgcaggcggaaacaccagtcggcagcggcgaaggcaagccggtcggtgaagacgtagacgcccaacaacggcagcataaaggccagccgtgcaggcggaaacaccagtcggcggcggcgaaggcaagccggtcggtgaagacgtagacgcccaacaacggcggcataaaggccagccgtgcaggcggaaacaccagtcggcagcggacaaggcaagccggtcggtgaagacgtagacgcccaacaacggcggcataaaggccagccgtgcaggcggaaacaccagtcggcagcggcgaaggcaagccggtcggtgaagacgtagacgcccaacaacggcggcataaaggccagccgtgcaggcggaaacaccagtggacagcggacgaggcggccggtcggtgaagacgtagacgcccaacaacggcagcataaaggccagccgtgcaggcggaaacaccagtcggcagcggacgaggcgaccggtcggtgaagacgtaaacgcccaacaacggcagcataaaggccagccgtgcaggcgtaaacaccagtcgccggcggtcgaggcggccggtcggtgaatacgtagacgcccaacaacggcggcataaaggccagccgtgcaggcggaaacaccagtcgccagtggacgaggcggccggtcggtgaagacgtagacgcccaacatcggcagcataataggccagccgtgcaggcggaaacaccagtcg

SEQ ID NO: 5376 - DNA, 8701 bp, Oryza sativa
gaggaggacaacacggacgcggcaacagatgaggaagtagagtgcgaaggtgttgccctcaccaccgccgtcggcgcagagcacaacgagcacgtacttggctagctcgtcgaggtggggaaggacgtggccgtcggcgacaagctccgacgcggcgtggacggtggaggatgcggccgtctacgacgagctccgacgtgggacatggatgatgaaggacgcggtcgtcagcgacgagctccatcgtgggacgtggatgacgaaggaagcgtccgccggtgatgagctccgacgtggcgtggacagtgcaggatgcggccgtctacgacgagctccggcgtgggacatggatgacgaaggacacggctgtcggcgacgagctccatcgtgggacgtggatgacgaaggaagcggttgccggtgatgagctccaacgtggcgtagacggtggaggatgcggtcgtcgacgacgagctccggcatggggcgtggatgacggaggacgcggccgccggcgacaagctctgacatggcgtggacggtggaggatgtggctgccagcaacgagctctagcgtgggacatggacggtgggatatctggtaggtatcgtctgatacctcgcaagtatcacattctacgtggtaagaatcgcatgatatctgataggtatcatctgatacctcacaaatatcacctgatacgtggtagaatcacatgatacctgataagtatcacctgatacctgataggtaccatctgatacctcgcaagtatcatctgatacgtggtagaatcgcatgatacctgataggtatcacctgataccggttaggtatcaggatctgatacctcacaagtatcatctgatacgtggtagaatcgcatgatacctggtaggtatcacctgataccggttaggtattaggacatgatacctcgtaagtatcaccctctatgtgataagaatcgcatgatacatgatagatatcatctgatacttctcaagtatcacctgatacgtatgtgatagaaacgcatgatacaggttatgtatcaagacctgatacctaaccggtatcatcccgttcgaaaacgagattccgttatatagcagcccccgcttgaaaactaacccctcttaggacaaaaacacattgtttgaacatattttaagtcacaatatttttaacatatgaattgcatgtatgaaaaatcatatattttgatttgttggatatttagttatcttttatgaaaaaaaagcttcaattgaagactatatcgatgttgaaacgatattttttccaccaaaagtgagtactatttaggtgtccttggaagtaaatttagaggttttatttttttaagataaaggaaactttcttgatggatgtaaacaattataataaagtgatacaattaatctaagatcactcttggcaccagcatagtaggttgtccacaacctataattattttttagaaagaagaacgacatgataacaaatatcatgccatagtgagctacaaccacaagctttatactctatacacgcatcacttagaaaaccttaaaaacaacacctccaaaataaaaattgcattgtcattgccatgatccgatcaacaaaacccaaatcataggttttcatactagagaccaaattcttcgaattctagacaatgccttcaaccatgcgtaatgcgcatactgtagcggcaggaagccgagtctttcgatgatgcactagcactgagcccgaagtgtccacacttgcatagttggtccctctcaatttgcttgtgtttgtgttggagaagattatcgttatgtcttgctgaaagaatctatataaactttctacctatattaagggaaaaaaatcatgccttaccagtctacctaccaattagtaccaatttaagcaatacagtaatatatcgtcggagagtggattttgaactctcgagtgaatgacccatcgttgtttacatgtcactcaaatggttatgaaatttttttgagaagatgtattaacatgtgatatattactccacaaacatgcaagttaaatcaacttttataagttgtaaaaaaacaaactacagataattaaagtatattcatagtcaaatttattttttcgttacgatatgtagaagttaaatttgactttgtatgtttgtgaagtgatatatcacatattaatatattttctcaaattttttcataaccatttgagtaacatacaaacaacaaggagacatcccctcgagagtttaaaatagtttccccgtattacccagtttggaggaaaccagaaatattttaggccatagccatgatacaaggtgaaacggttttatttcagaatctggttacaagagacttgaatttcctttactacaacggaactaaattcaacacgaataaatctacagacaatttaatgaaacaatcaataactttccgacaccttgtaatcacatcaacccctgagcccaacgtccatcagcatgagcaactttattctccttaatatcgtgtgttgcagtctcagttaatcgctcgtctgaggtgatgagcagccgcagaggagctgccagatgctcttcttgacgttgttacgcttggacttccccattcttgctccaggaatatccgagctgcacaagctctaatgctccaaatgaaatgctcctgtaaacaaaggaaccaattgaaaatctcctacaaaattacgcgaagatgaaagaaatatacacagctaaatagcaaaaaggaaccagcagagtaaaaatagaatgctattgtaacctccagttaacttcttcaggaatcaggggatgtcaagcttggtgcatttggtgaatgagagaagctactcctatttataagtgttgcaagactgaactgtacactgcataccttggcttctgaatattgtcggactttgcaagtaaaagttcgcgagaatccacaagaatattcaatgaagaaggactgaatgagtccagaacttgaattctgtccacttgcacaaacttaattcggtggtatttgcccgggattagcttattcaacccttgtttaattgcacctcacctctgcttgttagagacaagtagaggtgaggtgcttgttagaacgagaaatactcaggggtctttcggctagctccacaagatggtgggctagacgacctgggttcaaaacctaaccccttctaattatttgatattaggtccttccctaatttttgagttttttttttttctgcttgttagaacgagtcctagacgtcccaaactgctttaatcactatattagatgcaagcgattagaatgcgcgtaattaatcggattaagtgaatggtttggaacttcatcgatctatgccatgtaaaaagaaaagcattgcgtattccctgggttgcttctactgttacataaagtgtgctgttcgtcgtcctgttgattgaatctttcatctaagaagaattcagacacagccacgggttgcgaaatggcccggatagactctgatgatttgatgggctgcgcgggcccaaaaccatgaaggtcgccatcccttgggcctagtggtagggctttgtctcgcgcggcccagctcgtcggtcgctgttggtctgctacgccaccgatcaaagaagttcacaagcacagttggtttgcagtagcgtactctcgatctgttctaaaataaacaaatctattactcttaatattataaataatatataatatatcttaatactataaatctgttctatcaaatattatgtttttgtttattttaatatgaagaaaagtaggaaactaggaatgtacgtaggggcttttcaactgaagttgaccgaagcatatgtgcataataatttgttgggattattgtattgagaggcattgagcgtttccatccagggcctatagctgtgaagaagaataaaatttgagcatacgattccgctcccgttttgtaaaccgccaacatgcccatggttttggacctttttttgtgccaaccttgcaatcttcaactacaaataaacttggatggaccagttctcaatacgaatgaacaaaacatagtactagtaaattacggcctgtttatagttccctaacaaaaattttgcaccctattgcattgagcgtttgaacacctttataaagtattaaatatagaaaaaaaattaattatacagattgcgactaatttgcgagacgaatcttttaagtctaatcgctccatgatttgataatgtagtgctacagtaaacatttactaataatatattaattagggttaataaattcatctcgctatttactgacggattctgtaattcgtttttttattagtgcttgaacactacatgtgacaccctatataatacccgatgtgacatgctaaaactttacacctctcatctaaacaccccctacagctgctaggcaagtgaaatatctctatgttctggaaccgtacttgtttccatgtcattggccaggaaaacaagaaactgcgtcagaattgagacctggaaacattattggctcctaattaacgcaattgacactgggccacagatcaaagccatacttgtactgagcttggacgaaaatattcttcgtctttccagatgattaaagagccttctggagagagaagcaccatcatggctgcctatctggcgaacggccgatcggccatgtaaaggagaaaaggcagtttgcacaaggaataaaggcaacctagtctacaagttcgctatcaacaggcgatatgtcaccctatttctgttgctgttcaacgacgtccttaaataggagtacttgtgctacaagcctaacccagagatagcaccacaaatacctctcttttctttaggtgtttacttcgacagcttcaccaccttcgtttacccattgccatggcggctgagaagcgaaccattgggctcggcatggactactcgccgtcgagcaaggccgcggcgaagtgggcggtggataacctggtgaaggccggcgaccggatcatcctcgtccatgtccttcccaaaggagcagatgccagccacaaggagctctggaagagcaccggctcacgtatgtaggggcattgcattttttttttcttttgccttttcagtttcttctcttgttcagcaaattctggttcagaaaagattgacaggttttgcatctgatttaccgttggtttttgactttgtgtagctttgattcctctgctggagtttatggagatgaacgtgcaggcgaggtatgggatcaaccccgataaggaggtactggagatcctgcaagctgaatccaagtccaagcaggtaatgattctgcagccttctctgaattcttcatgaattacctgtgatgggactgtaaaaactagaagggaaggttgattcaaatgtaatcaaactaaaaagaaacgttgatccaaatgtaattcaaagcaaaacactgattccatattggctggatcaggttgaagtactggcaaaagtttactggggtgatgcaagggagaaactctgtgaggcagtagacgatctcaaggtgaatacctttgttcttggttgcaggggactaggacccttgaaaaggttagcatttaaacctttttcattctttgatctaaacctcttctcagttaaattgcgtgtgaatcaatggtttttacctcaatgcagggccctacttggaagtgttagcaactatgttgtcaacaatgcaacctgcccggttactgtggtgcgtgcaccaaccgtgtcaaatgcctgattctatgctacatgggactgctggaaattggaatgctgggcttgttttgctgttcatccatcttttagcagagaaccttcatctgagttggtgccattgcaaggattggtctctggctcctgcacttagcttttccatgctattggaatgttattaagttgaatcttcggtgtatttccttctgttacttcctatgtatagttcattactactgtttaatggtgaatgttaaagattgccaatggtgtgcttgctttatgtatacgacaggggccctaagaacagttttttgcttaggcaggtctttgtaacagaaatggcatatctgattttcttttttataaaataaaacaatcttacataagcaaagataatagaaaaggtgcctggcagtacatcaaatgtatataaacctttatttccaaatggcagaaatatatgctttattctttaaatataacaaacagtgttttacattaaccatctgctttgaattttgtcgtacaaattgaggcgaatactctttttagacaatgagatgtctgaaacctctaacaacaatggaagcaattttggagcatagcaatcagaacatcttaccagttccatctttgcgtggaacagattcttcaagatccattctgcgccaactcccactcaaagatgataactcatcaaccttatcatacaaaccaagaagaccacctgtatgtacaaaaagaatttttcgcccttcccacttagctggattagcacccatgtctttcagcattccatatgctgcctttccactgcagaaatatgaagcatatatctttaggcaatgatatggccagtctatcatgaacttgtgatgaccttcaatattagtctaacagaacaaaactttttatacttttcgacaaatggcaagtatactggttgtaaaattagagttacatgcaaaaggtgtttcttgggattaatgtttcaacaaaaggaatatattgtacctgtagactggatcaaggacaatgcctgttgctgtagctatatctttaacaaacttaagctcctcagctgtgttcatggcataacctaagcccttagcctgtgaagcggcagttgcaggtaatcaagtcaaatgttcacaaaattctaccaatgcacattagcaggaaatatcatcaattagagttgcaccataaaattggaacaatgaaatgaataaactagtttcagaacaattatgttatatactgatacgcgcataacaatgtcataattagaggatgtaagtccactcttcaataccatttaaatatcaaatatagaactttaaaaatgtacttacattttcaatgttgactaaatcatgtgaacgcaaatcagaatgaagtccatcaatcaggtcttgaacataggaatggaaatatccaggatcatcacaaacagagaaagcatggacctatcctaaaaatggataattagtcgaacaatttcagcaggatagaaaacaatcaaagaaagtgcatacttttgcctttaagctactcaattttgatcctaaagcaagaccagcaatggttccaccgctgcataaatttaaaaatcattcaagtcataaagcagcaattgctactttcaggaactaggcatgacgcaataacaagtgagtacataagtaccccttaaaagtaaagaatggtgcgtattgacaaaatacctgccacatgcaacaacaatgtcgtcaaactgaacatcacctgatatctgaatttgatgttcaatctcccttattgcttctatatatcccctatcaagaaacaaaacaagttctgatttacaaaaagaaaaaggaaacaatacaagttacaaagataggtcaagtttcaacaatcgggtatcactttcacaaattctgagacctgtttgaactttgaagtgcaaaccttctctttacagtaatcttatattctattcaatgttgttgattaaatgtggatagaatacactacatttgtccttcagctatgctccacttgttagccaccacacaagatagaaccggatcttctagtgttgcatgagatccactagattcagagcctagggccttagacaattccaacattccaggtccaacatagtatattgaccaatagaaatttgccaaaaaaaagtgatgccctaatgtttattcaaatacaaactaatctcttcttttctgatagactgatggcaaacaccaatccatgaataataatagtccctgaggaatattcaaagtatgctataaacgcacaaagaaattgaaaatgcaaaaatggttcaatagttaggattgaacagaaaacaataccaagttcctagagagtttgatccaccaacaggaataacatatggttttcggccttcttccaaaagcttctttttcagcaagtccgctaaagcctgaaccaaataaatccatactaggcttagggacttttaagcaatatcaatatgaataaagaagttctaacaagaaaaagatcactcagatattttaataggcaatgccactttaccagtttatctacatacatattcaaagaataggcaatataatcatgatctttcctcagaatagggaaaaaatgaccatgctaattgtatgatgcagacatatactgcaggatgcattacttgattggacctttagcccctttaataactacttgagtatggatatcaagtatcagtataacaccaaaatataaaaagttcctttgctacacatggcccgatggaattatgaaaataataataaaagcaataatagcacatcatcgaaaagagcataccacactgccaatttttccatattcttcttttgaaacaagat

SEQ ID NO: 5377 - DNA, 9867 bp, Oryza sativa
  unsure (1)..(9867): unsure at all n locations
ctgtggttctgaaagttccgaatgnacnnnacnanngngcnngcgcgnggcgcgcgagagaggggcactctgcgcggcgacgcgcgctcgcgcgtgcggagcggtgttgatcggaaggagagagggagagagggagcgggagcgtgccgggggagagagaggaaagggccggggaagaggggaagatgggcccagagaaaatcggcccatcgaccccgggggaggcaaaatggacttttgcagaggaatttgatttggaaggatttggattcggagttgaactcgacgatagatcggggatcgagatcttgagatggcacgggcactagacaacaagcaaagaaacagatttcgcaattagggtttttaggagataattttcccgctaggcgccaagacggaacgggcgctacagaccaacccccctaacaagaatctcgaccccgagattcagcacctaagggagcagctccagaaactcggcgcggagaagatcttctcgctcccaggttgcctcatcttcagaatggttgctccattggactttgtagaacttgatggtcttccttcgagtctgacgttctgcctcttcaagaaccttgatcggtctttccttgtaggtcagattctttttcagcacgatattacccaggggaatttgctcttctggaactcgaagacatttctttagctgggatacgtggaacacgttgtgcacatctgcgagaccttcaggtagctcaagctgataagccacttcgccacgtaggggccgatgtagcggggtgctaacttgccggacatcccaaacctcctcataccacggaggggtgatacccgcaggtacacatgatctcctttttcgaactcaaggtcacgccttcgattgtcagcgtaacttttctgacggttctgcgctgtctttaaacgttctcggattagcttaacttgttcttctgctgacttgagtatgtcaggaccgaataccagcgcttcgcccacctcattccagcacaagggggtgcggcactttcttccgaacattgcctcattcggcgacatctgaatgctggcctgataactgttgttgtatgagaactcagcatacggcaaacaacgatcccaagtgccttcgaaatccagggcacacgcacgtagcatgtcttctaggatttggtttaccctttcagtctgaccatcggtctgcggatggtaggccgtactaaaatttagatcggttccgagggcttcatgcaattgtttccagaaccttgaggtgaactgagtgcctcgatctgacacgatcttcttgggacagccaaatctacatacgacatgggtcatgtagagttctgctagtttctttccatcaaaggtggttttcactggcacgaaatgagctgatttcgtgagtcggtccacgattacccagatggagtcgtacccgttaggggttcttggcaaactggtgatgaaatccattccgatctcttcccatttccactcgggaatcggtaggggttgcagcagaccagctggcctctgatgttccgccttgactctttggcaaatgtcacacagggctacgtattctgcgacatctcgcttcattccagcccaccagaagtatgccttgatatcttggtacatcttcgtacttcctggatgaatggaataggcggactcatgagcttcctttaggatgagatctcttaactccttcttggccggtacacagatgcgtggaccgcaccaaactttgccttggttgtctatggagaaattggtgtctttcttctcctgtattctttttattaattcttttatcccttcgtcgtctttctgagcctcccggatttgcgactctagggtaggctgtactgtcaagctggcagggacacctgactgtaccacggtcagccttaacttctccaattctctgcacaggcgatcttggtcaggccgtatttgagctacattgcaataggccttgcgacttagcgcatcagcgaccacgttggctttaccagggtgatagtggattccaagatcgtaatccttgattagttccaaccatcttctctgtctcatatttaactcggtctgtgtgaagatatacttaagacttttgtgatcggtgtatacttcacatctgttcccgattaaatagtgcctccagatcttaagagcatgaaccacggctgccaactcgagatcatgggtgggataattgacttcatgaggcctgagctgcctggatgcataggccacaacctttcgttcttgcattaggacacatcctaagccttgtcttgatgcatcacagaagatctcgaaatcctttcggatatctggcaaggtgagaactagggcagtggttaaccttttcttcatttcttggaagctgtcttcacaggctgcagaccattgaaatttcttttccttctttaacagctcggtcataggtctggctagcttagagaatccttcaatgaatcttcgataatatccagctaagtcgaggaagctgcgaatctctgacacattcttgggcgggttccaagcaagtacagcttcaaccttgctgggatctacttcgacaccattggaggaaatcacgtgtccaagaaatgctactcggtctaaccagaattcgcatttcgagaattttgcgaatagttgatgatccctgagcttttccattatcaacctcaggtgttcagcatgttcttcctcgttcttggagtatatcaggatgtcatcgatgaataccatgacaaactggtccaggtattccatgaagattttgttcattaagttcatgaagaatgctggagcattggtgagtccgaaggacattactgtgaactcgtataaaccataacgcgttgagaaagcggtctttgggatatcttcagatctgattttcagttggtggtaacctgacctcaagtcaatttttgagaaaactcttgctcctttaagttgatcgaataaatcgtcgatccgtggcaacgggtacttgttctttatagttacttcattcagggctctatagtcgattaccattctctcagagccatcctttttcttaaccagaagcactggggctccccaaggggatgagctaggtcgcacataacctttactttccagctcttcgatttgtcttttaacttcggctaactcattagctgccattcggtagggtctttttgcaattggtgcggtgcctggtgccagttctatggcgaactcaatctctcggtctagtggcattcttgttaattcttccggaaatacgtcgggatattcacaaactatgggcaccgactccaaggaggtgacttgtaaacaggttaagatagaccgacttgcggtaggagtgttaggggtaaagcggacttgctttcctccaggtccttgcaaggtgatggacttttcggcacaatctatctgtcctttgtgcttagccaaccaatccatccctaggatgatgtccaagctttgcgagtctaggactatcggtttggctaggaagtcaacttcctcaattctaaggttaacttccgggcatatttgagttgcccttatattccttccaggggaatgtactatcattggtacacgtaaattttgggttttccaaccatttcttttcacaaaagcttgtgatatgaaagaatgggaagctctcgaatcaaacagaactattgcgggtatggagttgacagagaacatacccatcacaacgtctggagcatcctgagcggtttcagcttgaatgtgattcacacggcctcgaccaaagtggttggaagcatgtgaaccttgtccacttgcctgagtgctaggacgagactgagctgccgctggagtaggagttctggcagtgctgccattagcatgccctgagttggtgttggtagaattctgagggcactagcatagtgacccatctggttgcaccggaaacactgaactgctgatggtccctgtggtgacttgaaagaggtaacactgtttggcgcagtattgccactaggggcacgctgctgtggctggggtgccgggcggttcatctgaggacgaggggcgtagcctggctggcggttagcctgagtgaccgactggtggtattgcatgggttgaccgtagcgagggcgaggtgcgcctcgggaggaattcccctggtggttagatttgcgtttcttgtattcttcggtagcctcttttctggcatcctcaagtagaagtgccttgttgatcatatgttgaaaagtggggaagtcatgcgctagcaactggagtctcattccaactgcgattcctttcaagaatttcctgatcttcttcttatctgagtccacttcctcaggggcgtaccgagccaacttgttgaacatacttaggtactcattgacactgctgttgccttgcttaagtctgttgaattcctctttcttcatgtcaatggtgctttcaggcacatgagctgcacggaaagccgtagcaaactcatcccaagcaatgttagtgggttcagggtgtgcattgcagtaattctcccaccaatctgcagcaggtcctcttagctggtgagaggcgtagagcgtcttctcgaccggagtacactgcactaagttgagttttctatcaacatctttcaaccaatcgtcagcctcgacgggctcgacggtctgagagaactctggcggacgtgacctcagaaaatctgtcagcttggatctattgttgcccatgtgagggtggccatttccatgcgcattatgctgataaccggctacggctgcggctattccttgcaagatttgtgtctgaactgccattaagtgttgcatgttgttttccacatgagatggggaagggaggcgttcttctccagaattatgactggcagtgcggtgagagcggtgagactgttccatttctgcatcacgggaagctgtgcgatgcgagcggttgctacggcggggttgctcaacttctgcattgccggaaacagtacggtgcgaacggttgctgcggtgagactgctcattagctgattcatgatttgcttctggttcgactctaccttcttcaaaaccgaagcgggctggcgcacgagctgcacggcgggggcggctagccatctaaactcccagaagagggcggggtaagagtcagataagtacttaggagggcaaggagcaaagtaaatagcaactcagatagcacacactaggcataaactagatttttcaaatcttaaaaacacctgatacaacgggtgtggacaagtcacagagctacgccgagcttgactgtgcgcacaccacctaggagaaccagactaccaaacaacacccacaatcaaacacacgcacgcactacctcgccacgactccaaaagagttggcggcggaacaaaagggcctaacacacggacgactgctgaagactgcctcctctactcctcgtcggcctggctgcctcctgtagtcggctcctcagtcgaagaaacgtcgatcggctgacgtgaagggaccggcggaacctgtcgagggccggcagcagcgcgggccgctggcggtgggggagctgggtggtggaaacggaacacggtggaagaaccaacaacacgcttccacgcagtgcggataaagcgtggaccacggcgggaggaaacaactggggtgtgtccgggggtgtaggaagggctaactgggtgtgggtagggggagtacactggtgagtacggcgcacgcgagctgggggagcgcgggccactgggagtgcgggcagagccgcgggagctgtgggaggacaggtggctggcgtggcagaggcggcctgagtcccaggagatagtgtcaactgaggtgacaccctcctcggccagacgggcctccaaagcggcgtagcggcgggccagggagcggtaagcctcaaggagtaggtcgtgctgagtggcctgagcctccgaaagctcaaccatgcgagtcagcactggctgagactcgctgtacggacaagggtacctggcgtctgagtggccagaaggaaggcgtggaagctgccggaaggcggagcctccgagacggtggctgtagtcgtgggctaggcgacgaagcgcagtccaggaaaggtcctggtacgcgatctggagagtgggcctggccacggtgaagtggtgggggtgaaggccagctccgtgtatacctccacgagggtagaggtacacggagagctcacagtgagggggaacacggtccacggagtaccccgtgtactcgggacacgagaagccaaggaaacgggtgaggtcacgaagctgagcgacgtggtgaccctcaccaaaaccgtgggaactgaagctggcgttcactgccatctacaattttgaaagagggagaaggatcagtaaccattttagaaacaaactattgaaaataaagaaaacaaaagagaccttagcttttcgcaagtagttttgaacttagtatccttagggtcgtcctaagcgtcgggtttcgccctagggccaagcctgtgctctgataccatctcttgtcacgccccgagctagtcccgactggaattagcccgtgacgctccaaattaacctgttaatcgataccagtcccaggaaacagtgctggtatcacaggaagatagaatatcacagcaacagaggtctctttattatagagtaggagtacagtcatgttgggctgcggacagatcccgagctcacaactgcattagaaaagggaaacggaagccgggacttggaccaaacaacacaggcgcgacttgggaactaggccgaaaccctaaaactcatcgtaaccggcttgctcctggaagaactcctcatcagcaggatccgcttcatcttcatcagcaactagggggggaatatttatatagagcaagggtgagtacgggagtactcagcaagccatgggaaataagtgtttaatgcaggcttcaaggaaaggctgttgttttcgtaattgattttatttgaactcttttctaaaaacatctaggtgagtgcttctcaaacgacacggttgagacagtgcgtcccgtccggtcggagtatgtgcaatgtatcaatctttagatcttaaaacaaggttggcacccggccaacagcttttcaaacggccacccgggccaacaacttttcaaacggccacccgggcctagctgatcccgtcagctgctgatttttcaaacatcgaaccccttttcacaacagtaatttcacaagcagttgtcaaacaaaactacgctaggaatcacctcacatccgcccatgaccgtgggcacggctgttcgaacagtttgttaatctctgcagagggggtacactttacccacacgacattactaacccggatcacccagcccgtggggatcagccacgtcgggagacctccaagctttcatgacaaggcatttccaaagccgacacaggcttaccatatgccgacgagaggggtcccagaccaacaacaggttaggttccagaccatactgtgctaggaagcccagggggggtcctctccgacaccaccccggcgaatccacatgtctctcggcatcatggctcccctgataagctagttactcagccaggggtgtcccattccacccatgtggtcgtacttgtcttttgttcggatgaaattccaaggaatcggtccttaagtgcgggagtgggaaaaccgtacacccggtacgttccccggtccgcggttttataaattcatttagttcgcaagcaccgacccaggtgtcgggttttccaagtcttttgtaaaacccaagttttacccaagttgtttttcagattttaagtttgaaggcgaccgtcgatactcgcacagagtgcacgaatatcgaggcgcaactgggtggttacaaggggacatggtataacaattaacaaaggaaggatcaaatgcaacaaattaggcaggtccgccaatctgccttgcagacgggacaacagattaagtgcgatcctatcaatgcataatattttgcaagcaatataattaaatttcaaatataggctcaagatgttcaaaggtggcttgccttgctcgagatctggagcttaatcctcgaaatcctcgcactgcgggtctacgggctccgaaactacacgcgaaacgggacaactcaacaaacggcgaaaataaagccttattaatgacctctaagcgtgccattaggtagaactcgagatttggggaattttggaagttgaacggagtcaaacggatttacggtggggaagatattgaatttctaagattattggatttttagtctaaaggaaaaggatttaattaaatcctttttggaaaggataaagagaagaaaaagggagagggagggaatatagacttccctcggacggctagggcgcggcccgagagaaagggcggctcggccgagcttaacgggccgaccggcccaagaaggcggcccagagcggcccaagacgcgtgcgcgcggaggaaggagagagagtccggtggaccgagctcaccacgcgcggtcccgggtaggacccgcttgtcagcggctcggctcaccttgcggagggagcacgcggcgcggcgctagggtggaggatggacgtggtgcatgcacgcggttcgcggaggacgcaggtgcggcgggcccacgcgcagcctcacggctcgcggtggaacgcgcacacggggagggactgaccggggtcggcccgtcccgacctcggctgagctggcgccgacgtggcgcctacgtggctgccacgtgggctggcgggaggtagacgacgacccggccgcgaatggacggcgggcggcggcggcgagcggcggagcgaaccacggcgatacgggcgaaagcgagcacaccgggcggttgttcgtgatgaggggagacgagccaacggctcggattcgccggagggagcttgacggcggcgaaacgcggcggcgacaaccggcggggagggaagagggaaacggcgacgaggccacgaggggtcgattcccggcggtgagagcatctacgcggtttcgggaactcgatgctagcgtcggattggatggagctacgccgagcgaggctggcgacgtgcgggtgctacggagctcgagcggcgacggcggcgagcacacggcgagcgacggcaacggttggggcggcgccggctagctacggggagtctactcgtgctaccaccgaaaactaaggggggaagatggagcgaggaggaagaacggagggagacactaccgtgcgggacggggcgctgtgacgagaggccgacggcgcgggagtaatctctccggcctcgggccggggaagaggaagaagagggcgcggccgaagtccccttccgcgtcctcgaacgcaccggttctcctggcgctcggcgaaggacggcggaggcgagacagagcacgggggcggcggcaatggcacggaggcgaatggaagaggaaggggaaaggggaggctggggtttaaatgggcggcaatgtcggtttgggaaccgacttgcgcggtcaagggcgcgagctggcgctcggcggtcgcggccaaagcggcgacagggaggatgacgccggcgaggaggaaaaaggggaaaaggagggggagaaaggggggcttgcccctttgccgattcgggaaaaaggaggaggtgagcggtggcgacccggcaaaaggaggagggatgcttgcttcgtccttggcggcttgcgccggagtggcggtgccggctatgaccactgcgatgacggcggggcggtttggaacggaacggttacactggcaaagggtcct

SEQ ID NO: 5378 - DNA, 10851 bp, Oryza sativa
cgccggcccgcagccacacgtatccagcgacggcgccgataccttcccttgtccaccgcgatcgggcctccacgacggcgcattgcgcgacaccatggcgaagtgagtatggctggggtcacacaccacgccgtgcaggtgcagcgcggcgagcaggagcgcgagcgcgagcgcaagcaggcgcgcattatggcctgaagccgccgccatggacgcacgttagatggtggtgagacgtgggggggaagacgagttttaaggaggaggaggaggagatgggtccatggctccatgaactccattgacatggaatggatcagcacaagtggagcgtgctttatgggaaaaactatattcattttttaaggggatatcatctcgtttttacatgtcactcccaaaataagtgcagttttaacaccgttcatgctcaacgtttgaccgttcgtcttatttgaaaaacaattatgactagtatttttattgttattagatgataatacatgaatagtactttatgcgtgactaatatttttattttttttataattttttcaaataagacggacagtcaaaacgctggacacggatatctatggttgcacttattttgggacggaggtggtaaaaaatttagtgtagcagattatggctcggtttagttccaaactttgaatcccaaaaacgtcacatcgaacttttctacacacacaaactttcaacttttccgttacatcatttcaatttcaatcaaactttcaactttagcgtggaactaaacacaccctatatgtgatatgtcacttcaaacatgcatattcaaattcaacttatacaagtaaaaacaaaaatagcaaatttaactgtgaaaagaacacgtaatttacggttaaatttgtttgttatttttgtttcaaattacatatgtcgaattttaacttgcatgtttgcgaaaagatatatcatatattgatcacaatatatatcttgataattttttttaaaaaaattttgataactttttaaacgatacgcacaaaacgagaggatgtcccgacaaaaatccacttccgctttatgggtgaaaagaggtgggaataggagagaagttgttttgccggggaagagaggaggcaatggcagccagcaaagagagaggcggtagtggggttggcggttaattagtcgtcatcgacggtaggagtgaagaagaagaagaaatgaagcagcgctcgtgcgtgcaggcagcggcggcgtgcagctcgcgaccactggccgagccgagcggggcgtgcacttgattccagggcgaagtggctacgtgcctagctcgcgaagtgaatacacacataatagtatggcagtgtgcggtcaaggcgttttgtgattttgagttgagttgttgatgatgggtcagtgcggggaaggcaatagcgtcggctttcctcggcaggagggcagaggctgcctcacgaccgggctcagtgctctgtagtctgtacataccggtagtatatgattggggcactggggcatgacaaaaggcacaatgtgtgtatgtagcaagtggaacatcatcatcttctgggccaggagcaaagatatgttcatatagcatattagcgtttgctaaacatgaagtcagcatgacatgactcggccggaagcaatatttgccgtctgattcataatagcaaaccagaaaaaaaaaggtgtcttctctttgccagaataatgcttactatattccatatcacaaataagtgtgcagatatgtgtactgtggagtatagaaaaagaatgttggaagatggagaacttatctgcttgacccagtgagtagtgaccctacaatttggatacccacccaagtttttatgttagtgtcccaaaaaggctctgcactggtagtcttgtaccataatgctcacacatattgaattgccaataggcgtcccctttcggatatgcctaagccaatttgtccactggtgcccgtaatggccttagcccctctaaagagaggtgttgcatactggagcctgagcagacaacttaagtttgaaaatatgttatcaaggctggctcatgcataatttgtttctacaatgaactgcacagaatttccaaatatgcatgtggttgctctgacttgtcttgttaatttttcttaatttctagcatagcgattttacaccaacacaaaatacttacatgatacataagttttgcagcaaattaatacaccagaatagtaaaaactgaacacaacggttcataagtagtagagaaaaatggctggccctagacgattaccaaagattcaggtatgcatgtgtgcagtttggcatcgaatgagctcactaaagtttattagggaactatttaacaatgagaatcaagaacactaaaaaaacggtttagtgcaccagcaaccaacatatttgtatatgccggctacagaaaatgatttcaggggaaaagtatatatcattatccacaagatatgtgcccatgataaacctcagcatgtgtcatgttacttgaaaaaatatacaaagcattccatttctcaaattgaacagagtgcatgtaaactacatcagcagtcaaacatgacatcttcgatatccaagaatatttccagtggtggttcacaggtatggagagtaactgacgaggttcatgaccaaccacatatgacaaaagaggttcctgataagacaaaagatgatcattatagagaagtatcatttctcaggaacaacagaagatggtctcagaacatttgtaaatttcatgtgtggtaacagttcaactccagaaaaacaaacttctgaaagtgattacttggttgtatttagagtgccttgaatgccattcctgggctggtggtttctctttttattaacaaagggaggacatcactgcctcgcctttctaagaaagaccatttttgccttagaaaaatacaacagaaatacagaatacggtgagaagtaactctatccatttgttcaacgagaatttatctcatctttgctgcccttagcccttaggtttttgtgggacttttcgagtaacaaagatccactggcattgccgttatagcatcttaaaggttttttgaactattgcaacattatgtaaacttgagattgcaagagttaaacaaaaatgttgtccatgctatcatgttaacgaaatgtgtagcatactaaatatgtgaaacacaaaagctattagtggtttgttggatttagagtataccatgaactagtaaaaaagattcaaaccgtcttagaagctcacccaatgtagcaaaaacaccggttactcagtcttcttttgcttggttgattctccagtcttgctaatgatggtatctaagtgccttgatagtacactgtgcgccataccaatcttttcatcgacttggtcctggtacttctcatacaatggtggaactaacagagaaaacattacacctagagaaaagccagaatgatacaattattacatatgagctatcataaaagaacgattgatccatacatgaataggtccaggaagttaaagagaaacaaattcagtagtactcaccaatgtaaatgagcgtaaggaagttgaagagcattccaatgtatgaaaccacccataaaatcaatataacctatatgaccaaacaaaataaggggcataagaagaaagcatacaaaggcaggtacagccatatagacgtacagttgtgtgtgtactagtgggcatggatgtgtgtgtataagagagagacctttataaaaacactcctatctctcttgatggcaatatcatggccaacagccaacaccttgttgatccatacaagagcccgatctgcagctttctcaacaaccacatctgagacctctagtttagggagtggtggaagaggcctgcaaaaatcacaactttgtgtcaaacttggatagatgatatgggcaatggaagtacaatgccagtcacagagaacaacataaaacaaccaaagtgccaaaaacagctctttctttttcggtttagcgatacaatcgcagagacactgcataaatgcatatcaattctaggcaacaatcaagtcagatggggaacacaaactcataaatgagccgataaggaatggcaagcgcggtgattgaccatgtaatgtaaatctaggaaaaaaaccttgtggattgcttgcagaagagaccatatagcacagttacaagctctagagaaaatgacacatgctagcagaattaacttatcgaactgctatcgcggcttagctttaaagtaaagcagcctctttactttgtagataagggatcggatagatgcattattggtaatgtaataaaaacgaaatatgcaggtttcaggaaaagggataattaggaaaccccgacatatgcagagttcaaacctttgaacaatctctaatcttaggagatcatcggatcacttccaattacaaactgctctggcctgaagtttagtttcttactgcaacccgtaattcaaaaatgctaagcaagttagtgtatgaaacagtttggcagtgagcttcttgaagccaaaaagatgcaacaaccaaacggttggggaaaagaaagtccacattattcagcaaaacctcatacacattacagtgaacaccgcagttacaactacagcgaatcagggccgcagggcgcggcgcgactctacatgagatcagaaacacgcggtgctgtagagccagggcaaaaacccacctgttgagcagcgaggcggacttggcccagaagaagaggatggcgacgaggaggagcagggcgttggccatgactgacgggaagctgtaccccgcgcgctcgaagaggaaccacaccgccgtggcgcccgccacggccgccgcggacacgttcctccgccgccacagcaccaagtcggcgactgcgagacgagagaacacgagtgaggagaaaaccgaacccaaattctcgacccggatcggagagcgccgggaatgcgcgtgcgtacctgcgccgccgccgaggagggcgtggagggatcggcgggaggtggtggccatcgggatcgccgcggggagggttagggtttggggccgcggccgaagcgaggagaggaagtggggtaggtgagtggagctcacgaggcggaggcgacgaggacgagatgggatctctctctgtgtcctttgctggatcaggaaatggattcggtttcggagacggcgcgagcgaatgaattccgtcgaattattttgaaatattatggtgagttattgcaattttgcgggcaagtgatgcccgatggtgttggaataactccttccatttctatacttttaagatttaaattttacaccataatattcttatttttcactgatttttgtgattcccatcatttcaataattttaaagctaatcaaatgcttggaaagagagaataagtaaatttcatttaaccacccgtattatgatctacctcttaatcacaaataataataacctataactagatgggatacattatagtactacgaatttgaacatagagcatataatacccaacgaatttctgtcgagatttatagtactatgatgtgtcctatctagtactaaattttagaacaaattgagtaaattaaaaaaacatacgattttttagcacataaacatatgtattatggtcatttcaaaaaacacaatatttatcattctaactttgaattaccataattttaagttatacaatcgcatctcgaatttatgagttatttatccatcatataaatgttacatccatggccttttaaaaatttgatatatgagtatgtcaaattggttacaatgtggttttgtggaactttatatccatagtacctatgggtcatgtgctatgtgtcaaaatccttgtagttttgtgtaattttgatcataacgagtgtatttttacaaaatttcccaaaagaaatacaagtaattcgaaattcaaatgctaacaactgaagtgaaaaaaataaattatttattgtaacaatccttatattttaaaattgatggagtaattatgtgcttggaccttctagtacattcagtaaatatatactgtttagaatgatttttttctcttaaatatatcatggccataaatacgtttggtcatgcaagctactagtttcatgccgttcaatttggaggactggcactttcatgctgctttgtttagatacgatgtcatttcgaagaaaacaagtatccaaaccaacagattagtggatgctagcatttgacgacgacatgtttaaatcaagccgaattatgggtccaaacatggacatattcttcctatttgttgaaaacaacagcgtggaacatgagtacccgttccaacgccaaccgagtaatcggtccgatgctaccttggctgtgtttagttcagcgcaaagtttggattttggctgaaattgaagatgatgtgactgaaaagttacgtgtgtataacaggtggaggtggatgtgatggaaaatgattgaagtttggatccaaacacagcccataccaactcacatagttcgtggaagggagacaataattgtgatcctctaaaatatcacagtaaatttctatttttataataaacacacaaacgaacctgaacagtaaccgtttcatattaaatgaatatacggtccttacctgagacctgttttttcagcaaaactatatagtcatggcatgtatctatatatagaagaccaagatgcacttatagaatggaatgtgtgatttcaattttgagaccccgtgttcaatatctaacgcgcttacaattttttttaaaaatgtgtttggaatccaaatatcgtcttttatctatagaagaacattttgttcagtacaccatattgagtctggtggatatcctagaaaattccaactccaactgacggtacgccagtacaccgccattggcagctagcctgaagtgatccaatttttaatttttaaatttttctgatctttttaactcttatctcatcatactttaagtgaacaaacacttatccaaaattatatcagaaatgctattacattttaaaatggagaaggtatggcacgaaaagcaccaaatccaatagctagaagccgcattcagttcaagatttgaagcaatatattcaaaactcaaaaatagcctgaactcctcaagattagctcacacgatgatgacatgactcaactgaagaatcctggccttgtaccaaaaacaagtccaggttcagagaaccgcccccttccgcggaaacggcagctgttacaaatcccacccgagcagcagccacttccaacacacacgctcacccgattccccgcttcgccgccggcgctcgcatcggtcaagtcaactcgacgcccacacacgcaccggccatggccgcggcggcggcggagcagcagcagcagggcttccgcccgctcgacgaggcgtccctggtggcctacatcaaggccacgcccgccctcgccgcgcgcctcggcggccgcctcgacgccctcaccatcaaggaggtcggcgacggcaacctcaacttcgtctacatcgtcctctccgacgccggctccctcgtcatcaagcaggtccctatctcctccacgcgccgccaccgtcgccgctgccacacatgtagtacgcatcttctgtctccgttctttcgctgacgacgctgcaatccaggcgctgccgtacatccgcttagtgggggattcatggccgatgtcgagggagcgcgcctatttcgaggcctccgcgctgcagaagcaccgcgccctctgcccggaccatgtccccgaggtctaccacttcgaccgtgccatgtcgctcatcgggatgcgctacatcgagccgccgcacatcatcctccgcaagggcctcgtcgccggcgtcgagtacccgctgctcgccgagcacatggcggattacatggccaagacgctcttcttcacttcacttctctacaactccaccactgatcacaagaaaggaggttggttgatttattacaggtttggtttgcctgtgaaaattgagaagggagaaaaatgagaaccgaattgatggcatgttgtgttatgtgaattgcagttgctcagtattgcgataatgtggagatgagcaggctcacagaacaagttgtattctcagatccatacagggtcgccaaatacaatcgctgcacatcacccttccttgataatgatgctgcagcggttcgagaggatgctgagcttaagttggagattgctgaattaaaatcaatgtaactagctctcctgattaaaccagcgtttctctttccttttcattggagatgatggacatgatttgcatatgcaggtttattgagagagcacaagcttttcttcatggagatctccacactagttccatcatggtgacaccagattctactcaagtgattgatccagaatttgctttctatggcccaatgggttacgatattggggccttcctggggaacttgattttggcatatttttcacaagatggacatgctgatcaagcaaatgatcgtaaggtgtgtatggatttattggctaataatagtaaatgaaagtgcgtaatcttacctgggtggttaagttgttttgcgtttgctaagataatggcaaccacatgtcttcctgtgtactaatttcgataggatagaagtttggaacatgatacttgtatcctatagaataactagcaattgatattgttgatatatgccgtatgtaacagagggaggagggtgctcagcagacgatgaatgtccctgagtattactccctccgtttcatattataagttgtttgatttttttcttagtcaattttttttaagtttaaccaaatctgtagaaaaatagaataacattttcaatacaaaacaaacatattatcaaaatatattctatgttaaatttaattaaactaatttgctgttgtaaatgttgctaatttttttctataaatctggtcaaacctaaagaactttgactaagaaaaaagtcaaacgacttataatatgaaatggagggagtacttaatgggaactgcagaaatgacaagttatgatatggcaaagtgcaattgcaacatctagattctagaaggtattttcatgatgtttcgccaggcataaaataagttctatgtctgtacatattttgcaggcttacaagaaatggatcttgaagacaattgaagattcatggaattttttccacaagaagtttgtcgaattatggaataaacacaaagatgggaatggggaagcatacctgccccctatatacaacagctcagagcttttgagccttgtacagaagaagtacatgacaagcctatttcatgacagtcttggatttggttcagcaaaaatgatcaggtaattaaacagtacaattatgtagagtctgtactactaagtcaatttgctgaatcttatttacgtctagactatgaagatatactagacctgccctttttaaatgtaagaagctcaaaggcacagtaagttagtccaaagtagaggtttccgatgccaattttgatgcagcacttctttttcataaatgtatatcagtatgtgctatcctaaaagagatgttccagaagaccacctttgacgattataagtatgactgaaaaccgtcataaatggttaaattggaggctattcaggatattatgttgtgagaagctaagtgtaaagaacttaaaatcacatttaaacgccattttcaaattttttatctgtattccgatgccttgtgcatgatcctcacgcgacttctgtttactaaattggaccatacatatgtaggagaattgttggaattgctcatgttgaggattttgagtcgattgaggatgccagcaagagagcttcgtgtgagcgacgtgcccttaattgtgcaaaggcaatcctgaagggaagacgccagtttgaaagcatcgggcaagtgattgtgcatgtacaatcgtttgatcgggactgataatgccaaccatctacacgacctttctgattgaggagacaaaagttttcatctgtttaccataagcgattatctgtgcctattacaaagcagaattggccagttatttgtgcttttagtactttggatcatgaaaagtgtgtgcactctgcaagatcgatgttttttttcaccacttggctaagccttccaccagcttccgggcttcttagtttatgagctgaataatggaagttcagcacaaacgtttgtccatggatatggacgagtgtgttattacaaataaagttgatagttttcggcaaatagattgttgttgttttatttcaaagagatgtagtcccccttttgttccttttcatcacttaggctgcgttcaagcgcaggagaaagagagaaagatagttttgttttccgcgtgcatgcttcccgaactactaaacgatgtgtttttttgcaaaaaatttctatatgaaagttgctttaaataatcatattaatccatttttgaagtttaaaataattaatactcaattaatcatgtgttaatggctcacctcgttttacgtatctcttcaatcccctccttctcaaacacacccttagacctgattacttacagcttgtacaagttatggttggaggttcagtaatttcagctgtaccttttcactcttcttttccatcttaacataaaccaggcaggaccgcaggagttgttttgttggcacaatttgcgagttggatgggg

SEQ ID NO: 5379 - DNA, 2787 bp, Oryza sativa
taatagtaaaccacctcaatagtatgtctacataggtatctatagctctctcatgcattgcttcgtttttctctatagactatctctaagctagtagatagctttgctctctctcttcatttaatatcttccaagtagaaaaatatgctgacatggatctcttgtagatagcttatagataaccattgtgggtgccctaaagtttaagtccctaaatccaaataccacccgacaaagcccacctcacgggcacccctaaacagaagtaaataatttcaaaatagtccctcaagccgtcgccttcctcacgctctctcccactccgccactgctccagctccccctccccgcaaggcggcggagatcccaaggtcgtcgggggatggcggcggtggcggctacatctccggcgctaaccctcgctgtcgcggccgcggtgatagcggccgcgtgcctcctcctctgcgcggaggcggtgtggctggacttgccgcagtcggggaccaagtgcgtgtccgaggagatccagtccaacgtggtggtgctcgccgactacgccctcatgtacgagtcccacccctcctcccaccccaccatcgccgtcaaggtaattccccacatttctagccgtctctcgcttcggattctatgatgcagtgaggcgcttccgttgttttggaatttttggatgggctccgatctaggttgcggtagttttggacgaattaggtcaactccatggtagaacgatagatggatgattattccgtgaaacggagcggtggcgtgaagtttttggttttgctgcgggtttagagatgcttagcgcacattatattgtgctggaataatcgttgaactggttgagtccttgagtgcgagggattatgtgttattggtgcagctgtgctcgcgaaagacagaaaaagtttgtgcctagtgttcaccggattgcgatgggagctgaaacttggaatcatatattctttgtgtaacctgctaggaatttgttgttctctaggatctagtgctctgtctagattccatttgcatcgcagggaatgatgatgatagtattctagaataactggctgatgcgtcaagtggattggtatgattcgcattgatgacgcagggtatgcttacatatgatccacaaaccgcgtcgattccttctgtctaaattgcggtggtttctgtccaggatgtcactcgtaacagaatacaaggtgattcatcttacagaatcacacacttgcttttctagcgacttctgtaagaaactccatgggttgtgggaagtaaaaggtgatcaataagaatcgcatcgatgcgaaataatgagaagacaacgatgcaatcatgttattatgtgatgtgaaattaatactgtaatgacttggtaccatatgtgtatctttttattcggaatcatttgcatgaatatgacagtgtgttgccatgctttttgcgttcgaacaaacaaggggacatactgaataaatagactaacgtgtagacatatggttgataaattgcgagtgccgtataagattgaataagtagatagacttaggtgagataatggtaatgtcatataaattattaattgtagaacccacttaagtgagcaggtgatatctcaactctttcttaatattattttccttgaaaatgcacaagaggaacttcatgggactaaaatttccaattccaaggcaaatggatggagtagattgtaagggttactagggttaaatggccatgcaactcgctatatactagtttctttagtctttactccaatttatgtccactgattgtaattttatttatgtgaagtataatattaattcattaggagatctattttcatccatgaattagtactggctagattagacactaagcatactatttgtgtttgctccattttgaacagtccttatgttttttcttttcgcagctttcgaatcaagaatatggttttttttttttactgtgcgagtatcaatctgcagttactgcagtccactaatggagtaaacgatgctactccaatcctctcaagcttagcatttcttcgagaagcttagcaatttgcttttacatgatttgttgaatgaattactatctacttgtgctgttatagttctgcaaatgcttatgcttggtgcaggttacatcaccatatgggaacaccttacatcacaatgaaaatgctacggttggtcagttcgcattcacaacttcagaagcaggaaactagaagcaggaaactatcttgcatgcttctggatagatagcgcagagaaagggtcaggaatatctattaatcttgattggaagattggaattgcagcaaaggattgggatgttatcgctaagaaggaaaaaattgaggtaggagtaggcttagccaaactgctgacggtccatatgaccatatttcactgatgtccagtttaattcactgcttctctaattgctgcaatctaattccttttgtagggtgtagaactagagcttagaaaacttgaagtggcagtacaatccatccatcagaacatgatatatctcaaagcaaggtaagttttacttccacatgattgacttactgtggttgaggctttaaaacgaatattggtggtactaatagagggttcagtagaatgccaatggaacttggaagtggtaatgaaacaatcatattgtcttcaattctcagcactagataccattcaaccacaaagagcgagcattgtttacaaaacttacgatctgcag

SEQ ID NO: 5380 - DNA, 1776 bp, Oryza sativa
acgcatatacttcagttcatctcttgaatcctcatctgctgaggaatttgttgatccgacggaagcgttgcttcagaaatagagaagaagcaatacttgttctggagtactgcttgagtgacatgggagatccttcctttcctgataaattgcaagggttagctcttcttcctttggcaaatggatcattcacaacatttaccaaccggggggagggtgaaagagtattcttttcttcacaaatggaatttgagcttctgaaggactctataccacatcttgttgttgataactctttaccggatgccattttgaagaagttatatgacatagcttgttctgcacggtcaaacatttacttattcacatgcaattttctccttgagttgttgcctaggatcttgccacctgaatggcagcatgctaagcagttattttggtctcctggacatcaaggtcagccaagtgtggaatggatggtgtcactctggaatttcttgcgacattcatgtgaagatctttcaatttttgcaaaatggcctatattaccactggtagatggcaagcttatgcaacttggcaatgcttcaaatgtaataatagatgatgggtggagtgaaaatatgtactcgttgcttcagaaactgggatgtttctttctgagatctgatctgcagatagaacatccgcagctggcaaattttgttcaggaagccactgcagttggtgttttgaatgctgtgcagtctgttgcttctaattttcaggatatcaaggaattgttcatgggtatttcactggcagaaacacatgagctacgcagttttattttccagtcaaagtggttttcaggaaatcacatgaactcttcccatatgaatacaatcaggaatcttcctatatttgaatcctataaatctagagagcttgttagcctgacaagtcctagaaaatggcttaaacctgaaggtgttcatgaggatctgttgaatgaaagttttataagaacagaatcggcaaaggagaagtcaattttggtatcatactttgctattacggaacctcaaaaggctgaattttacaaggaccacgtgcttcctcgaatatccgagtttctatcacaaccagctgttgtttcagcaattctccgtgatgtgaaactattggcagaaaatgatacttctgtgagagctgcatgacatcaaacccctttcgtcatggcagcgagtggtgcatgggtacatccctccaggtctctctctctctctctctcttgcgcgcgagcgcacacacatatgtagaagtgtattttgtttagtagacctcttgattttattgtgtgctgcatcatctgctatgtgcactaggactaatgttcatttggcaaatgctttgtctaatctgtacatcagcttttcctttgatatttgatgaaacagcatcccatgtagaagtaaaccttcataatggaaacaaataactggaacctatttgatgtaggaagttttgtataattctatattggatgtaatctgcaatttctttttattttcatcaataatgagcttgttacgtccatgaataccatggatttcatttttatatttttctgcttccctttactatctagattttggtacatagaaataacttatattttccttcagactttatgatcctcgtgtgcctgagttacataagttgctgcacaaagaaaccttctttccttcagagaagttcatgacgactgaagtaattgaactgcttgcaagcttg

SEQ ID NO: 5381 - DNA, 8392 bp, Oryza sativa
cgaacccgacggcgccgacggcgtggtgcggcggcgaccctagcggcggctagaggcggctggagcaatgaaaaaaaggcggcggcgggtgggagcacggtgcgggagcgatggggagcttgggagaggccgacggaaaaaaggaaaatgaggaggaggatgtgggatgaattatataggggcggagaggtcgggaacggccgggagtggctcgatttcgccggagttagtgggggaagttggaggtggggagagagagagaggcgggattcgaatttgaatcccgaccatctcgtgacgtgggcgcgagcgggagtgagggcgtggacgcggggaaggcggggcgtgtgggggtggggcgcggggaaggcggagaaggtgggcggcgcgcgcgtggcgtggctgtcgccggctcggggaggcggccggaggttggggaagggactgacaggtgggccccacctgtcagcgcccgagggagatagggggaggcggcctggacttcgggaggagaaggggaagcggaccggcccgatatgggaaggggcgcgggaggaggaggaaatgggccgacagcccatttggggaaaagaaggggaaaaaaggaaaaaggaaaagaatttccagggattaaatattgcttgtgctcaattttaattggttaaaattatttctagagctctgaaaattccactaaaaatcttgttagcgtatttcgacatgtagaactcaagaaaaattccacatgccaaatccgattattatttgcattaattcattagggttttctcttgcttttacaccgatattttctctggtggattataaattcaatttaggcttgggaaagaacttcagggtgtgacaggtagcttgtgaagttgtatttggataaagtgaagacaattaatgtgtgtatttttctatttcttggtatctccaaaaaaaattatatatggaatagtactacatgtaaaatctcatttacaactagaattgttactataagagaaactcttctttaagagaagctaatgttttttttttttccataagggactttctagaagtacagtttgttaaatgtatacaactacaatggtcgacgttccagttcgcatgcacacccagcagcccagaatgaattgaacccgtggtcggcggcggcgcatcccgccggcaagccaaaggggaaagtttcaccggagcaaacgcaagaccgattcgtcacgggctcgcggctagggcatcctctagggttcatgataccatttcaagcatcctcatggcatggcgcggcgcatctaggtggccaacggcgaattagcggcggaaccaggtgaacacgagtgtggggaaatatggcgagcaacaagacacagcggtaagctagctagctagtagcctttggaaggtgtatgagctagggaaaaaggattgggagactaccgagacgaagggcgcgtagtgaagaaatgccagcagagcggaagtaatcttccgacctcggcgcgaaccaattaaggtcggggtaagggaagacgacctcgccccagtcgccaggaacgcaccggcacctcgggcgagccacgcggtggacgagagcggagtggtggaagcgatcggcgagctctagggatggtgaaggagtggaagctaggagggagaaagagagccctggggcggctttcatagttcatagagctatcggtctggaggagaccgagccagcggtgtgtgccgagcttgttgtaaaagttagtcgatatagtggaacgacgactaaccttcccgatcgtttcagtcgttgatcgcccaagacatgccagatgacgacacaggaacacacgatatttgttaacgaggttcagccgaagcctacatccccggggctctgattatggacgctcctccccaaccaacatagcacctagccgctacgagtccatggccacgccgccatcctctcactgcgtgtctacgctacattgtagtcgtcatggttacatcgtggtgcccccctctctatttaagatagttgccgggttacagagtccgactctaactccacccctaacacctattacaactccaagtccaactataaccaaataggactagtatattcgacacctattctaacagagctggcgtggtcaaggtggggcgagcgcgtcagagcggcgacgtcatcggcgtgcctgcctccgcgtctccccgagctagaggacaaggtagaggcaaggaggaaaaaggaaaagcgcgaggcgaaaaagcgaggcctccctctgcttgactgcttctggtggcgcgactggcaaggcggactgaccggcgtcgacgccttggacactagcggcggggccatggtgagacgccggctgtgacggtaaaggcaggcatggtagcttggcgcctggcggcgagcggaggcaaggcggcggccagagcggtgactcgcacgcgagggcgggaaacggcgaggttgcatggctggccgcgctggcgagcgagcgaggttgcctactctcctgcatgtgcgcggcagcacgtgatgagcagccgtggcgagtcgggctcgggcagaccggagcttcggcacgcgagcgtaagggagagggatctgctgggctgtcctgcttagataaagaagggagaaagcggcctgattggagaaataggcatgagagggatttatttggatgaagtttgagggtgatttgatttggatttgaaattggacgttacggagatttgattcaagtttgatatttgaatgtagggactactcaaggaagggaaacacggtgggactcaaatattttggagttgtaagattacttgaaacgaggattggatttgaatagttgaaaggatttactgatagacttaaggagggaggttcaaacaagcaaatttaaactccgagtctatttcgaaacggtaattttgaggagtcaattttggttttgaaggaaaggagataaatagagcactcagaatacgagattttcacggataggtatttcatcagttttgaacgccacgtaaaaaacggggcattacactagctataatctcaaaagaattgtaatttagtaacgtttggtttggctttaaatccactattcacaggatgagaatccagagctgaagctttgtcgtaaaggacagtaatcgtgccctctggtaggcagtgcacctatttgctcgaaaacttccgtaagtttttttttttccttcaaaactattagatttttaaccattggattacctcgagatttgcgcatgaaagaattttttttctagaaataattttttacacatatcacgcgtaagaacatgatgctaactaatcaaaccatacttgaatacaagttttatataagttactatatcgtagttaccatgtaattacagtacagttacaatgtaattgtgtctcaattatatactactattgttatatgtgaaagtttttcattaaaagaattgagacatttttttagatactcccgtaccaaagttactaccactatataaggaaacatgcaatttatcaaaattgtagtaaaaactttatattagactgaaatcgtcttatatccgtgtgcatgggccataactttactcagtttaaactagtttagcggccgtccatgaaatgggcctggatttagcctatataaaataggccgtacatgggccgataattggatctgaacgatactctgaatattaaattctcgcggagatgcgtcccgcccgcccgtgacgcgtacagccgtacacccattcctccacgctgtttgctccccgcgcgccacgaagtagagtactccatctcccaacgattaatgccaagtcaacaagcaacaattctttttgtcgaacaccagcaagcaacaaatcatccagtcagcccgaacacagataatgcagccgtcgcaacgatcccgccggccaccgaggttgagccgccgcaatgccatccggcagtcggcgtacgtggcccggccggcgtcacagctctcgccgccgtcggagtcggaccaacccgccttctggtattcgacggaggaatccgttctggaggaaagggttgtggaagatgaggtcggagatcatgcagaggcaggtggagccgaggcggccgcattggtggtggaggaggcgtcgacttcgagctcgtctgcggtctctgtccacgcggctatggtgatcaggaggagcatcttgaattggagtaagctggatcttatcggggccggatcgtccggcagggtgtacaaagcggtggctgagtaagtccgcttgcgatttaccgtttgccttgctcatgaactgttcgatgcaatgcttcattgtacttcgtgtctggttgtgtgttctattctttcagcagaccggcaatttcggatgagttatctctgtatttctcaatgcttcttcgtattattgccttgtcagggatgggtttgtatttgctgtcaaagaggcttcgttgattggtcccgaaagctatacgaagcaaaccgcatgtcagctaaagcaggtagttttatctcttatcaattaattaggtgaaaaattatcttgtaagtgtttaattaagcaaattgcaatttttgtcaggggtaaaatttcagagtattgatgttctccaattctaaatgattccaagtataagctaattcagtattagtaacaacatttcaggaaatcttgcttcttagtcggttggagcacaagaacatagtgcagtattttggtgccaaaatggtatgccagttctcatatgctagttgaacaagtgtcttcattatgttgctgatcgcctctgcaaactgttgcctcccaaacaccttcattttaggttatttttcttcggtttgagcttactatccctgtttggatttgcttgcagggagaaaccgtgctatgtattttccttgaatttgtgagtgaaggttctttggtatctgtatatgagaagcaacagctggaggaatcaactatatcatctttatacaagacagatcctcaatggattggcttatctgcatcatcataatgtaatgcataggtgataacacattatctccacaaaaaaattcttgctgctggcccggtcatttgaaaatgtacttgttatagtagtgatcaagttaagtacagatgtacaactctcgatcaaatgactaaatgagtgaagtacttctttgtcatattatggtaaatctgcactgtccttcccttttcaatgcagagatattaagtgtgcaaatattttggttgataaaaatggagcagtgaaggttggagattttggactggcaaaggaggttacttcatttttggtttcagtgtccttttttcccctggtttgactgacagattatgaaatgattttgtttgatattgacgatgtgaattctcaacccttttaattgatgtaatgccagataaaagtctggaagcagaaaagatcttgtaccggaagtgtatattggatggctccagaggtaattgtttgacttagtatttatacatagagttttgctcccatccagcaggtaccatcgggactgtccggtaccaaatctcagccatttaatcagcgaaatcggacggtggaaaataagtggtacctccaggtacaaatttgcccatgaggaggtgctaaaaaatttcgagtggtggaagggtaaatttgttttttcgcgtaggagtgtccagggaggcagtggcgagttgcttcgtgcttcgtcggcggcggcgagttgcttcgtcggtgacgacttgcttcgtgggaggaggcggcgtggcggcggctgatccgtttgaggctgcggcgtctgatccgtttgaggcggaggtggcggcgacggcggtggcggcaggtggttcgttgcggcgaggttgtgttgggcgcagtggtggcgggcgcggcagtggcctggtgctgctggtggcgggcgcggcggtggcctggtggtggccacggtcacgaggtagcggcggcggctggtgtgtgggcagccttggctgcgaggtggcgacgggcgcgatggtgccggccgtggtgatgaggtggtcgtcggagccggtgttgtggcggctgcagcgacgagatggtcatggagtcgtcttagcaggcgatgtggcagtgtatacatcgatttcttttcatccgatctaaatcattaggttcggttggttgcagcagtagatactttcattttctgggctgcatatactcttcttcttcattgcttataggatttgtattgtacgatttattggatgttttgatgagctcaaccattacttgttctttgtgaatgttcaaatggccaataccctcccatatcatttactgattactgcaattcgagtaagggcgtgaatgaagccgctggtgaaggagctcgctggttccgccgccgcggatggcagatgcggggcgagcaagcgagcgcacaggcgggggcatggatgcggggtgagcatgcgcgcggctcaggtgggcttcgcacgggtggggctgcgctcggagggaggaaaaaaaaggagattagatgagaaagcagcgccacacggagggaggaaacagagaaagagcgaaaaagagaaagcgagggtgcgactcctttctctgtttcccgatcgtacccttctaacatggacggatggatttatctctgtacctgccggtaccagtacctgccggtacaagttgctggatgggagcaaccctcttagacatattagtatgaagtatctagataaacgttactctgaagaatttattgcacttttactttacgatagtcgtccaactttccggaccagcagaatctatattggttatctgaatatctgatgatgatcaggttgttcgtggcaatccgtatgggtattctgctgatatttggagccttggatgcactgtcttggagatgcttacccaaagaattccttatcctgatgataactgggtcagtaaatcctacagtactcatttagacttcttacagtctcttcaaattcgatactgattcagttctatcaggtatcagtcttctaccaaattggccgtggtcaacttcctccagttccaggctccatatcaccggtgtcacgcgatttcatccacaaatgcttgcaggtgaatcctgatgatcggccttctgcagatgaactgctgaatcatcccttcgtggctgttccagaaccagactagtatgctgcatgtttgcttaacattgctaggcgaagaacattcagtagctccttgtttccttcctgtaagttcagggtcagaaagtcagaatgcttgtggttggaaattcatagtcctatggctaatttcacgagtacttgtttgtacgacatctgttccttataaaaatatcccactatccaactttgcgactttgaccattagttgggagagcaatcaaccaatcatgtattttatggttgagacttacgacgacttgctactccgcgtctgcatgtctgagtctgaagtctgaaccgacggcgctgacgttcccggtgacgaaaccaaacagccacacactctgaatcttacaagcaaagccaattccgcaattcccacgacttggtactcggagatagcggttggtcgtaacgggagcagttagccagttaccgatgacgtcgtctcgatcgacgctcgggtcgctctcggggtacggggagggtagtcggctccacgccgttataaaaggccctcatccgcaacgcgggtctctttccggcgtcgccttgtcactcgctcgccaccacccctcggcgccacggcgagcagcgcaccgggtccaggtcaaaagcgcacgcacccacatcgcacggccgcgtcgccgtcgtcgcgcgtgagccccccgtgcctagtcaaaccccaccacgagcagaatcccccaatcttctcgcgatccgctcgctctgctgctgcgccgcgggagcgcgggggaggaggaggaggaagagggaggggcactggccatggcggcgcgccagcggccgcaggcgcagctcgcgcggatcaacgccatgaggcactcctacaccgccgcgggggacgatggctccggggacgacgtgtgtggggagctcgacgacggcgggggcgagtacgcgtcgcagaccagcttccgcatccgcggggggcgcggggccgcggaggtcaccgccatcttccgcaagctggggctctccgggcccgaggacttcaccatcccgcccgcggtctacgccgccgccatgtcccacctctccagctccgcccgccgccgcgcgtcgctcgaggtggcttccccgccggagcttctagaagcttctccagccgaagccgcggttccga

SEQ ID NO: 5382 - DNA, 992 bp, Oryza sativa
tttgggccacggatggcgagggcggcgagggggccaatggagagggagttgatgtacgtgcaaggctcggtgcaggacgagttgccacgcttgtcggagaagttgtcgccgccgtcggggccgcccatgatcgcgccggtgagctcgttggggttgggccggtcgggggtgaaccactcgctgaagctcatcccgcagttgacctggtagcccggggggagcaccggggtggaggcgccgcggtggtgcggctgcgtgggcgggttgacgccgaagccgacgacgtaggagcggccgcgcgggttggcgccgaggaggtagtcgatctgctgcttggcgaactggaggaggcgggcgggctgcacggcctgggcgccgcacatcaccggctggttgatccggcggaggatgtcgctgtaggcgacgaagaggaaggccgtgctggtgacgtactgggagttggcgccgtcgcggaggtggatcatgccgcccggggtgatggacacctggtggaacggggtgtccgggagcacggcgcacacgaagttgtcggcctgggacttgaagctctggaggccgccgctggatgtcatgttgagctccgcgaggagcacctgcgcgcccgggaacttgaggtcccagctgaactcggccacgctcgacgagatcgcctcgtgcccgatgaagtccgcgtacacctgcctcttcgtcgccaggtacagccacgtcgccgcccacagcaactcatcctgatcgatgcagtcacaatcacaatatatataacgtgtcaaattttttacgttgataaattttgcatgcatgcatatgcagagacgtacgttgtagccggagtaggagcagtagaaggggcactcgccgtcgtaggttccctggtgcgtcttggcgaactggaacagctgtgaatttccatttgtcatcaggtagtagctaattagatgcaaattaactatataagagaaattaacagatga

SEQ ID NO: 5383 - DNA, 8158 bp, Oryza sativa
attcatgctgaaagatgtggcactagtaagtaagcttaagtacaatttgctctctgtttcacaactctgtgatgaaaatctggaagttcgtttcaaaaaggacaggtctcgagttcttgatgcttctgaatctcctgtttttgacatttctcgagttggtcgagttttctttgctaacttcgactcttctgctcctggtccttctcgttgtctcattgcctcagagaatagggatttgtttttctggcatcgacgtcttggtcatattggctttgaccacttgtctcgcattagtggtatggatttgattcggggtttgcctaagttgaaagttccgaaagatcttgtgtgtgcaccatgtcgtcatgggaaaatgacatcttcttcccacaagcctgttacaatggttatgacagatggaccgggacaactgcttcacatggatacggttggtcctgctcgggtccagtcagttggggggaagtggtatgtcttggttgttgtggatgatttctctcgctactcttgggtctattttcttgaatcaaaggaggaaacatttggcttctttcagtctcttgctcgtagtttggctttggagtttcctggtgctcttcgagccattcgcagtgataatggctctgaattcaaaaattctgcatttgaatctttctgtgattcttctggagtcgaacaccagttttcttcgccatatgtcccacaacagaatggggtggttgagaggaagaaccgcacccttgtggagatggcacgaactatgcttgatgagtttacgactccaagaaaattctggactgaagctatttctgctgcttgttttatctccaatcgtgtgtttttgagaactatcttgcacaagacgccatatgagctcagatttggtcgtcgaccaaaagtttcacatctcagggtcttcggttgcaaatgctttgttcttaaatctggaaatttggacaagtttgaatctcgatcattggatggcattttccttggctatgctactcattctcgggcttatcgagtttatgttctttcaaccaacaaaattgtggagacttgtgaagtcacttttgatgaggctagcccaggagctagaccagaaatttcaggtgttccagatgaaagcatctttgtggatgaggattcagatgatgatgacgatgattctattcctccacctctagacagtacaccaccagtgcaagaaaccggttctccttcgactacatcaccttcaggagatgcaccaactacatcatcttcagcagctgaggagattgatggtggcacatcaggaccgacagctccccgacacatccagaaccgacatccgcctgactcgatgatcggaggcctgggtgaaagggtaactagaaatcggtcttatgaacttgtcaattcagcttttgttgcctcttttgagcccaaaaatgtttgtcatgctttatctgatgagaattgggttaatgccatgcatgaagagttagaaaattttgaaagaaacaaagtttggtctttggtagaacctcccttgggttttaatgtgattggaacaaaatgggttttcaaaaacaaactaggtgaagatggttcaattgttcgaaacaaagccagactggttgcacagggtttcacccaagttgagggcttggactttgaagaaacttttgcaccagttgctagattagaagctattcgaattcttttggcttttgctgcttcaaaaggtttcaagctttttcaaatggatgtgaaaagtgcttttctgaatggagttattgaggaagaggtctatgtcaaacaacctcctggttttgaaaatccaaaatttccaaatcatgtgttcaaacttgaaaaagctctttatggtttaaaacaagctcccagagcctggtatgaaagattgaaaacctttttgcttcaaaatggttttgaaatgggggctgttgataaaactctttttactcttcatagtggtattgattttcttcttgtccagatatatgttgatgacatcatatttggtggctcctctcatgcacttgttgcccagttttctgatgtgatgagcagggaatttgaaatgagcatgatgggagagctgactttcttccttggacttcaaatcaagcaaaccaaggaaggaatctttgtacatcagaccaagtactccaaagagctcctgaagaagttcgacatggccgactgcaagccaatcgccactcccatggcaactacttcatcgcttggtcctgatgaggacggtgaagaagttgaccagcgcgagtacagaagcatgatcggctccctcctctacctgactgcgtcaaggccggacatccacttctccgtgtgcctgtgcgcgaggtttcaggcttctccaagaacatcacatcgccaagcagtcaagcgcatgttccgctacatcaagtctacacttgagtacggtatttggtactcctgctcttctgccctttcagttcgagctttttcagatgctgattttgctgggtgtaagattgatcgcaaaagtacttctggcacttgtcattttcttggcacttctttggtctcttggtcctctcgtaagcagtcttctgttgctcaatcaacagctgaggctgagtacgtagctgctgctagtgcatgtagtcaagttctttggatgatttcaactctgaaagattatggtctgtctttctctggtgttcctctgctttgtgataatacaagtgcaatcaatattgcaaaaaatccagttcaacactccaggaccaagcacattgagatacggtaccactttctccgagacaatgttgagaaaggtaccattgtgctagaatttgttgaatctgaaaaacaattggcagacatttttacaaaaccacttgatcgctctcgttttgagttcttgcggagtgagttaggggtgatccacccctatggcttgatttgagggggagttgtttttcttttgcatgcatttgtaacatattgcatcatgtttactttatgcattgtattatacactcttcaattgagctttgcttgttatctcttggtcatcactatgctatggatgtatcactcttatgctagtttgatctcttgtctagctttcatttgcttaagtagcttgtgtgatcatgttatgctgttcaagcgtgttgaaacctgcttaaattaactattcatttgaactcaatcaatgtgcaatgcttgctctagaagtttgtttaaattgaagtatccttctcatactcatgccatgtttacattcttttcgcaataactgtcagtacatgcttatgaatgctcatgcttatgcgtccatactttgtatcaatcatgctttacaagttttatctctgtttttgtccgggctactgagtgcgtttacgcatgagtagtgccgaagatagcactgagacagcctgtaatgggaactctagctggaaaacttgattgaggtcagacggcagtgtttggcacaaccatcacttgctgactgataagatcaggtggaccgtcgtgattgtgctattgtctttaaagaaattaaaaaaaaaatcataaaaataaaagtcatgagaaaagattaaaagctcatgttctatgctttgttatcatgttgatactctttatgaactgggcattagcacattagcatgggttcattgctttgtttatgtaaatcttgcatgattatgagctggtttgcttccttttaagcttcttctagaaatagctttgcacactaaatcactaattcacttgaaagctttttgcttgctggcgatactaacttgatattcatgacttgtttcatacttcttatgcacatgcttagctaggcttgagcacatgcttgtatctgtgtgatccatgtctaccttttgatgcctttagataactctcaaagctctcaaaacctaaaatttgcaagtttcatctcatttttatcttgcatttttgtctcttttgatcttgatggcatcattgacaaagggggagagaaatttgcacttattgaaaattaaaacttgctttaaatcttggtgaaagggggagtttggcacatagggggagcattcttgcatttgcatttgcatcccttttttcttcttgtcacttggtcttgatttttcgcgatttcaaaatgaccaaagttcgcttttgcaaaatggtttgctttgtgaatcaaaaatcaaattttcaaaattttgcttgagattgtcaatgttcccatcaagggggagattgtgaaaccatgtgtggttatagttcttttgtgatgggaaattgacaagtaccggatgtgcaagaagtgtgtgtgtggactaacgttggtcaggttgcgacatctgtgccaagacaacggttgtttggttcatgtgtgtgcaggtgatcggggtcgatcttggtcaacggcggatcgggactagactcagggaggagttgaggtccaaagcgatcaaggatgccgggtgacaagattggacacaaggttgcacacggtggacgaacaccgtgtgaaaaggtctttgcaacaggcttcacaaggccaagtgtgcaagcatcggattcgcgaagaaatcagaagggactgtgcaagtgcattgctgctacagtacttgctgtaggtagcatacatgcatgtacacgtactgtacttgtgcaaggaggagcttgcactgtactggttgctactagcatggctcggtggaaaagtcaagctagctagctgtgcatgtgcgctgtgattggttggcagggaggccaagccaatccagccgttccacgtggcccaagatggtgaatggctcggctcggcaggcctgcatcgtccaagcagcgacggcccaagacggcggcccatggcgcatgggctcaggaggtgcaggcagcttgcatgcgcaaggacgcgcgcggaaaaaccgtacgcggcaacccccgtttcgcgtgactcgatcggaggcgggtgcaggagcgcgggacccacacgcgattttgcaagcgcgcgcgggagcggctcagcgggacgcgtggcggcttcgggctggttgggcgctggcgagcgcgcgctgaggaaaaggagacggaacgcgcacgacgcggctgggcaacgtggcaagtttggattcgtcaagacggagagcacgcggattcatcagcaagaagaccatgtgagggttcggatcgatgaggtggcaatcatctggagcttttcctttgagtagaaggaacaatggatggaccagatctgttctgagttagggtttcgccctaggggtatttgagaaaatgtcttaggggtcttaggctataaatagagagatggatgcaagggtggaggttgctccttttggtaatcattttgagatgctcggtgagagagtttccgtgtgagtttggagtgtgtttgcccgagaggcttttgtattaggattagtttggagtgtgtttgtccgagagattttaagtttgtgttaatgttcctctgaaggtgtatgtttgctcctagttgagcggttattttgcatcacctataaatgaaatgatttgaaggatttcatttttgccttgtccatttaaattccgcaatttaaattccgcttgcaatttgaactttgcgatgatgagttttgctctctctttctcacctcacttctagtttcgggaattccttttctcttcctcctctagtttcgggaattccttttctcttctttttctctcttcttttctagatccggcttctctaatagccgcgattctagtaaggattttgagaaatccggcttgatgagtattttcgggggcaagatttgaattgctatattcacccccccctctatagctgttcttggtctttcaattggtatcagagcccggttaagttcgttgtaacctaaccgtggcaacgaacgcagctatggaggaaaaatactctgcgaaaccatttgttttcgatggacacaattttgtcatttggaaggcacgaatggaggcctacctccagtcgcaagggcataatgtgtggaataaggttaaatctccttatactgtgcccgatgatgctgacatcacgcctgcaaatatggctcaggttgattttaattatcgtgcaagaaatgcaatcattggtggaatttcttctggtgaatttaatcgtgttcaacaccacaagtccgctcatgacatgtggactgctctgtgcaatttccatgagggaaacaatgatattcaattggttcgtcagaatcaatttcataaagaatatcaaagatttgagatgcacccaggagagtccattgattcttatttcaaacgttttggagaaattatttcgaagttgagatctgttggaaaagaattttctgataatgataatgctcgccatcttttgaattgtcttgattatggtgtttgggaaatgaaagttacttccatcacagagagtgcacctctgagtgaccttaccatggacaagctttactcaaagctaaaaacccatgagatggatgttttccatcggaaaggcctcaaacactcgatggctttggtagctgatccctctggtagtacttcttctaatgactcagcctttgtgtatggtggcttctctcttgccgctttacactcagtcactgaggagcaattagagaagatccctgaagatgatcttgctctttttgctagaaaattctcaagagcttacaaaaatgtgagagatagaaaaagaggaaaaaccaatgaaccatttgtgtgttttgagtgtggagagcctaaccacaaaagagtgaattgtcccaagttgaagaagaagagtgacaagacgaccaagaagcccgagggacaagggcgaaaggggaagaaggatttgatgaagaaggcgatccacaaggtcttggcggctcttgaggaggtgcagcttagcgacatcgactccgacgacgatgatcaagaaaagggggacaaggacttctccgggatgtgctgtctcgccaacaacgaggacttcatcaacctgtgtctcatggcgcttgaggataaggatgactcatcggagcatcctgaggtatgtcttgatgatatcccttccttggatggttctctttgtgatgattcttgctcagataatgactctgttgatgatgaactaagcaaagaaagaatggcacacttgatgattgaaattagtgataagtataggtcttctaagtataaaattgagaaactaaaatctgaaaatgatggaatggcgctagaaattgctaggcttcgatccatgattcctgaggaggatacctgttctacttgtgcttcatatctttctgaaattaatctcctcaaggataagttgaaatcatgtgctttaggagctgggaatccttctagtgctagtgctgcttgctctacttgctatgaaatgaaagttgatatgggtttgcttgagatggaattgaaagaactaaaagaaaaatttgttcatgataggattggtaggtgtgaaaattgtcccattctcactagtgacaatgatgaattaagacaacaagttgccatgcttaggaccaagaatgatttgttagaatcttttgctactaaggaacctattcattcttcatgtgctaattgtgctatcctggaaactgaactaaaagatgctaaaactgtcattgattctatcaaatctattgattcttgttcttcatgcatttctctgaaagttgatcttgagtctgctaagaaagagaactcatacctacaacaatctttagagaggtttgctcaaggaaagaaaaagttgaacatgatcctagaccaatccaaagtgtccataaacaatcaaggtataggctatgattttgctgagtctttgaggataggtacccatgagattttaggtgtcacagatgggatgatagaactagctcaaaaacctataaccttcaagtctgcaggtttcattggaaacactagttctagtacacccaaaacctcagaaccaaagatggtacctatgactagcaagtctaagcctgtagagttacctagacccaaaaatccaaaacaagttgagcacaagcaaaaccagagacaaaccaagcctgtagagaaaaccaagtatgag

SEQ ID NO: 5384 - DNA, 14995 bp, Oryza sativa
tttttattgtttatttaataaattatgtatcaaatatactatttgtaagtatcctataaaatgaagtattttgtattggcatcatatgtttattttattcattttctcttttattaatgtgatgaactaaaaataattaattttttaaacagattattcttgaaatatacatagttctacttacaaaccgaactcgatagtcaagctcgccccaagcctatctaaaagctggaaggtttcgtaggctcggctcgagcttaagcataggcaagcgagctcggcgccacgcctcggctcgttgacagccaatacacctaatactagcttgaaactgatcaagatgcctgtgtatatgaatgcatgtgcagttttgtaccacagtagcagttactctcagtcaaccttgcagtgttgaccaatgaccaccagcctattacacacaagtacacagtgcctttggcctcccacgtagcccgacagagcttgtgatgatcaccatcattacctgttgatttgctcagctcccactccctggcacgtgcctcgtgcgagagagccacagctacagctagggcctccacggcctgcagctagctagctagccactggctcgagcattctctgctttcctttaatatgagtgagaaacacgcgtgaatgacgctccggccccgtgccatcagcagtactcgcgcgctagcttgagactatatgcatgctacatgcaatgcttgcacgcttccgatctgcctaccttttgatctttttttgttctgaacgcttgcacatggtcaaagtgtacatgtacgctcagctggtacgacgtagctcccctattgatatcgttgctcatcacaagcaatgaaccaatcgtggctctccatgtatgtaaaaaaaaacaacgagaaaaaaacactatggcatttggcaggtgaacacgcgcgaggacaggcagagttacgttgcagatgcagacatatggaccggtgcggcggtgcgtcgttgccggctggtacgtacgtttgccttgcccgcgggaatgggcaaccgggcgcagcgcagcgctgcctccgcggattcgcaggggcgcgcggttccgtggcgcgcgcgcgcgcgtccgcgtccgcgtccgggaacgcgagagtgtgcctgcctcgcctgcgcggcgcgcggcgacacagcgggcagcgactggcattgtcggcgtggccggaggggtcggggcgcgcgcgcgcagcagcagcagcagcagcgccggggtgggccgggtcccgaggcacggcaccggccggacacgcccgttcggccgtggcatcacgcgttgcaggggcggtccagtggagagcagcagataccgtactgtgcgagataatagctgtatgtaaggtatgcctgcctgactgactgactgccttcaatccttgtaggtggtgtgacattatgtaatggactattccatttcttctcctggctagctagcttctcctcaaggaagaaaacatgcgtatgtccatcagtccatatgtctacacatgccatggaaccaacgctttctgatattagttgattagtattacaaaaacaatatccatttgaatatgttgttttcagaatttaccggtgttctttcctgcatgatgagcgcctcaaaatgtacgtagtgtagtaatattccccgtatttcgtggccaaaaagagagtgaacaaaaaatctggtgaatctggtgtgtttagttcgtgggtgtcacatcggatgtttgactgatgatggaaggggttttcgaacacaaataaaaaataactcgcctggaaactgcgagatgaatttattaagcctaattaatctatcattagtacatatgagttactgtaacactttatggctaatcatagactaattaagctccaaagatttgtctcgtgatttccatgcaaactgtgcaattagttctttttatctatatttaatgctccatgcaagtgtccaaaaatttgatgtgatgtttttggaagagattagctatataactgtcgataactttttagatgaaaaactttcaaatgtaactccactataattacaacgtagttacattgtaactagactatagttacaatgtaactggcacaaaaacgctcagaatcacgttgttgcttagttggttaacatatgcaccgtgagatcgtgggttcgatccatgccccaagtgtggatgtgatttttttaatctgcttgtgcgcatcttgatgtcgaataaggcctaactcgcaaaagaagtggacatcaatatgttagagaaaaaaaatgatgaatcaccgtccttggacggaaaatttagtccgttggacttggaggcgtccctcgcttacggagtcaacaaaaagttgatctcgagatccgcgtgcaacgtcgggtttgaacggccacgattaagtgacgatcacacgcgaccgaccggccctggcccacgcccacgcccacgcatggcgaattggcgatgcttgatgcttgcaagttggtgaaggattctcccggtcgtacgggctcttttcgcggtgaacgcgcgcgagaaaaagaaaagcaacggtttaactcttgtgcatggcttgtggaccatagaccacagtacacgtggccaacggctgttctactgctccagcatgtactagtgggtactactcctgccagtttcacatgcatgtgagcccctggtttcacccagaattttatcgagcagacggtgcacacttgttgggtgaactgatgatgaccagttgagtgtccattgtccatcaacttggacataaacatacacatgctgcataagagacaaaaaaaaggtgatcagtaaccagcttaccgagaagcgagtggttgcagcttgcaggttctgactctatcaacttgctaaaatgggggatcgattgaacgattccccttgtcatttcctgttccacgcacgcgcgcgctcgatcgttcgggccagctgctgcttgtatggttcaagccacatagccatgcaaagccaaagcaaacctctctgaactctgggtagatgtctccattatttttgctagctaggttaacagtggcgcataatgcagcaacgggacaaggaggtagccggaggagcccaagagagagacagagagggagagagttgagacagggtcatgtgcggcggtcagaagagccttggccgccgggtagactggcgctgtggcagcagcagcagctgcgcggcgcggccggtcaattatggacaaatgatggcgccggtgattaggtgaggggacgacgcgggccacaacgccagtacgtacgtcttcggcttcgatcagtcgcttcccgccgcgcgacgacgccacacggcgccagttaccagttggccgtttgggctttaggaaattaataattttatgattaagtttatttcgggcggtgtactgcttcctcttctcgcggccatcggctgctgaagtgctgatcatgtataagccccggcccgttgagaagttatgatgtacattgaatattctgggacggaaggaaaccgtggtactaaactcctcatcagtgacggaaattaaaccagcactactaaactttcggcactaccatccttaagcgtgtatataggaagacgcaaaacccctacttacttttcttcaagtccaatatacacattttgaaataattgatagaagttatcacggagcgaagatatgatatgaactcatggcgagtttacacggtgagtgcgcaaacttgtgacatgttcgcaatgttagcgcggagagaagtgaactatcgaagttagtggctcgtatatacgagaacttgaaattatcataaattttgacaatttgatcttttccgaaaactaattttacaaatgaaccgcggccaaaacttattttagaaataatcttttttatcagcaccaaatcgtatggcgctgaacgtaatgtcttaaataagttttggccgcgatttatttataaaattagtttttggaaagggtcaaattgtcaaaatttgtgtgaaattatccgaatcgaagttaacagcggttagtcacctacatcgatctagatagtcggtgttgatctacatgtgcatactgactacaactttgtctcgttggttaattagctatccatccgcaatggataagcaaaagagtacgcaaggaggaaagaagtgagaggggttattaatttcgtctgcatccggtccagctagggcaatctaagcatggagatcggccaggtgaaacaagcagccggagtacagcccgtccaccgctgctcaccggtgcccaaagggagacgggcgtttgcgatgaagcggcacatgtacgcaggattggggacccacgcccacgcttgcgacatcgtcgtgcgcaaccggttcggcgtgtggtcacggcgaaaccaaaagtacatcaggaagacgcggtatttcaagttcgtcgcgctcggttcggcgatgtccaaggtgagacggaagctccaggagtggatcaagcagcacggcttgttaacgtgggctcagtactcggcgcggcgggaggagttggaggccgctgaggcaggtctgcagaagcttttccaccgtcgcatgcccgctcggtttaggaagctgaagcggcgagtcgtgaaagagcgcgagtgggagcggcgtctcttgttgaagaagcaggcccacgcggcgcagggtgcacccataacacgcgccctattcgtgtatatgtcttcatgtctagttcaactgttttactatctgagaagacttatgcttggtagtgtcacgcccagaaatttccgaatagaatttcaagtaaaatgtgcattaaaatccccgtccaggaccggccggggtacacaaacgacaaagttgacatacagatccatgtcttacaaacattataaaagtcttacataaatgcagcggaaaataaaaagataactggagctaagccttgacttgcaccgcagcgggaacaccactccacaggcatcctcgacggcacggacgaagcctactcggagaagccaccatctgacgcatacttaaactttggggttttggggaaaatagagcaagattgagtactacccactgtactcagcaagtcataccggaataggggtatgatgcagggaattatcaagggatagctataatggttcatttgcataaagcggtcatttataaccagaagttgaaagtagtaaacagttgtaataattaatcaatattaatcatccactgtccaacgctataccacgttgcaacaggcccaaccatccacctatactattcaattccaaaagactagtctagggtgagtctaatcacggtgaatctggttgaccgcccataaccgcgggcacggctattcgaatagttttactccgatcagaggtgtacaactgtaccaacaagacacagccccacgacatgtttccatgcgccgacatgccaccacgacataccggaaagaggccgtgacaggacccttcgcataaccccctctaaccaagcacaccacacttcaggtttcacccccactcctcgcaaggcagcgggcagtcccctctcgtgcctaggcgaatccggaagccgcataggccgtcgcagggcccatccaaactccatcacgcccacccttgcctggatgcgtcggctagaggaaagctacactacaagcccagccgttgcccacgctggcttgtggtaagtacgaggaattcttccagggtttcccgcgaaccggtccttaattgccatgggcgcgaccatcaaaatcatgcacccacagcccaccatttaatatattttaattaagcaacaccagaacggtggcactaatccaatcattaacataaggacctacagtctatacattaatatgatttcccccattgtgtgctagttgaactaatcatggctaagcactccctagtccaatctctagtcatgttatatcccaagctaacaaaggaacatggtacaaaatagcatggctatgacagtaggtaaacattccacagtaatattataaaacaatgcagtatttgaagaaaaacaatagagcatttgcaatataggatcaacatgttcaagtgacaagcatgacttgccttgctctgctgctggaggaatctcgacgactatctcaaagtacaccggagcgtcgggagagccggaatctaagcgacatacaaagcaaataatacaaacaggctataagactactgaaacagagaacaaaaccatttttaatggattctacacatttttcttgatttactgagacttgaatggacttaaacggagctcggatgaattagttatgatttttagaagattctctgtgtttttactagtaaagaaaagtccttaatgaattattgcgcaataaagcatcccagggctgacgtcataggggggcaggcggcgccgacatgcgggccccacgggtcagcggctcgagagagagagggaggggcgccggcacgtgggccctactggcagtggcacaaggcgggagggggtgcggctggcaggcgggccctaccggtcgcggctccaaaaaggggggggtggcgagacgccggccgggcccgacatcaagccggccggcctgccatggcaagggcggcggagcgcgcgcgtcgccagcgacggcaaccggcggcggaagacggcggcgcgaaggcggcggcccgacccggctcggcgctaggagggagaggaaggggaaaagaggaggaggggcgcctcaccatgagttggccggcgcgggggaagacgacggcgaacggcgacggcgacgaccggggaaatgacggtgaacggcggacgggctccgagacaccctaagagagaaaaagagacaggttagagggagagagggagtccatggcgagcgggaaccgtggccgacggcggcagctatggaaaggctcaccggcgcacggcggacggcggcctccgatggcggaattcgacggaggaggggtggacgaggtggagctcggccacgcgaacccgacggcggcgacggcgtggtgcggcggcgaccctagcggcggctagaggcggctggagcaatgaaaaaaaggcggcggcgggtgggagcacggtgcgggagcgatggggagcttgggagaggccgacggaaaaaaggaaaatgaggaggaggatgtggggatgaattatataggggcggagaggtcgggaacggccgggagtggctcgatttcgccggagttagtgggggaagttggaggtggggagagagagagaggcgggattcgaatttgaatcccgaccatctcgtgacgtgggcgcgagcgggagtgagggcgtggacgcggggaaggcggggcgtgtgggggtggggcgcggggaaggcggagaaggtgggcggcgcgcgcgtggcgtggctgtcgccggctcggggaggcggccggaggttggggaagggactgacaggtgggccccacctgtcagcgcccgagggagatagggggaggcggcctggacttcgggaggagaaggggaagcggaccggcccgatatgggaaggggcgcgggaggaggaggaaatgggccgacagcccatttggggaaaagaaggggaaaaaaggaaaaaggaaaagaatttccagggattaaatattgcttgtgctcaattttaattggttaaaattatttctagagctctgaaaattccactaaaaatcttgttagcgtatttcgacatgtagaactcaagaaaaattccacatgccaaatccgattattatttgcattaattcattagggttttctcttgcttttacaccgatattttctctggtggattataaattcaatttaggcttgggaaagaacttcagggtgtgacaggtagcttgtgaagttgtatttggataaagtgaagacaattaatgtgtgtatttttctatttcttggtatctccaaaaaaaattatatatggaatagtactacatgtaaaatctcatttacaactagaattgttactataagagaaactcttctttaagagaagctaatgttttttttttttccataagggactttctagaagtacagtttgttaaatgtatacaactacaatggtcgacgttccagttcgcatgcacacccagcagcccagaatgaattgaacccgtggtcggcggcggcgcatcccgccggcaagccaaaggggaaagtttcaccggagcaaacgcaagaccgattcgtcacgggctcgcggctagggcatcctctagggttcatgataccatttcaagcatcctcatggcatggcgcggcgcatctaggtggccaacggcgaattagcggcggaaccaggtgaacacgagtgtggggaaatatggcgagcaacaagacacagcggtaagctagctagctagtagcctttggaaggtgtatgagctagggaaaaaggattgggagactaccgagacgaagggcgcgtagtgaagaaatgccagcagagcggaagtaatcttccgacctcggcgcgaaccaattaaggtcggggtaagggaagacgacctcgccccagtcgccaggaacgcaccggcacctcgggcgagccacgcggtggacgagagcggagtggtggaagcgatcggcgagctctagggatggtgaaggagtggaagctaggagggagaaagagagccctggggcggctttcatagttcatagagctatcggtctggaggagaccgagccagcggtgtgtgccgagcttgttgtaaaagttagtcgatatagtggaacgacgactaaccttcccgatcgtttcagtcgttgatcgcccaagacatgccagatgacgacacaggaacacacgatatttgttaacgaggttcagccgaagcctacatccccggggctctgattatgggcgctcctccccaaccaacatagcacctagccgctacgagtccatggccacgccgccatcctctccctgcgtgtctacgctacattgtagtcgtcatggttacatcgtggtgcccccctctctatttaagagagttgccgggttacagagtccaactctaactccacccctaacacctattacaactccaagtccaactgtaaccaaataggactagtatattcgacacctattctaacaaactccaccttggaaaatatacgtcacctagaagtagtagaatcaccatgccgatccacctgtcctccagacttggattatttccttttgcagcttcaccacgagccgcccgacgagcgtacaccagactcaccgtcttcaagagactccactctccctgtaatttcttcctcttgactccacctgcaacagcgctccgccttctcatctatcatcacggtcgtcttgccaagcgaaattggattccttcctagttgtcccatcatagactccccaaagaccatgttcacctccacattccgtctttgatttgattcaatctaatccatggccagataaccaatgtcatcactaaatagacaaatcaaactcaccaggcatgaagaactgaaccctttcttccttgttgtcttatgaaccaagctaacaaatccaacatccacgcttcttgcatctgtagactgaatccatgatattttgagaaaattcaccgtcgcctcgaatcacttgaagaattaccatgatagccttcgctcttactccttcagtgacgcagatttccatatatcccatcatgccgacccgcatattctggatatatcctgtactgccaaacagtatcgttgaccccatcaacgatatttgacccgatgttgcccgggacttctcgcatagcaaaccacccgtttgccactgccgcaccggtccaaccaatctgctacacggccggtctacctccgtcctgcttctggttcggtccggccaacactctagcatactccttgttcctgagccatacctcgccaccttgctgagcaacctcgtcaccgtgagactatctctacagagttcccaaggagccttctcgccaagtcactattttgcgccgatttctgccaattttgtgccatatcgaatcttcccaagccagcttttaccattgcccaagaaagtcccagtcaaactgaattccaaacaaccgagtctgactctgatggacttatgcaatccgattgcacaacttgactctaatggccacagaaaaagatacaactcagccaccgtgtccgcctagacctctgttgcgttttcctcacgtccaacttcctctcagcaaatagcttgccacaccacgctcatacacaaattatgcacctgcttgcatctagcctcccatgcattagggcctttttctttccgcttaggatttattataatccagcttattagaagtaagctgaaagaaacaggaagattatttttacagcttattataatctagatgatgggttattgtaatctaataagctcaccaaagggagctttttctggattattagatggcaaaagacccactgcccctgattaattctaattatttacctgaattgccaccgcgtaccgcttcgtttctttttttcgttgaccgtgtgaccgcttcgtatcctgcgcgggagtcgcgagatcccctttcccctccactttctcttcttccaccgagaagatcggcaggcgagggggctgtgcgacggcatcggcctaggcgagcagagggcgtccggtgcgcggcagcagcgaactcgggggcatgctgcgtgcggcggcgaggtccatagcccattccgacggagatggatcctgcagatggtgaggactccctctcgaaagcatttcgataccgtgatgatgtggtgaataagcgatcccaatcaggaggcaaccatggcgtctctggcctacatggctccggcagcttctctgatggattttggggcgacggcgtcggcgaagatggacatataggcgatcttcatggctcacccggcgtccacggccaccatgtctcgcctgccccccatggcgccggcagttctggcggatcacccgtcttccatggagccggtgccgggcaccgcgacgccactgtgttccaagcggtggcagatgtgtctccccctggcagaggccgtggacggcgtggcgggcatggtggtggacctggacgtggtaagagatcggccacacaaccttccgcacgtggtggccgaggaaacaaggtgccatacaagccaccaaggccatccagcagtgcaactgttgtcggcgacgccgagggagcagctggtgtagacaatgacttcacagaagaaacaatggacagtgcgcctcatggaatggtacgtctacttcatttctctacttcaaaaattaaggtttaatgcatttatctactgcaaggattaggttgaatctaattgaatttaacgtgtatgtgtactacatatgaaaaattaatgtgtatgtgtctatgctaattggtcatgtatttaccatttctaatatagaaatacttgtgaatatataaacactagtggtgtaaaacaacatgtaaatctgaaccttgatgtgtttgatttatcaaatagaaggaggagcttgataaagcagattggtctagcacacacaataggatattttgtgaactatgcgtacaacaaattgaagacggcaataggcctatcgggataatgactactagatggtaccagatcatagccaaaaagtacttccaaaagacagggctaagacacaataagacacaactgaagaaccggtgggatgtgctgaaatccatgtacagcttttggcttggtctccttaacgacacagggcttggatgggatcatgcaaaaggaacagttgctgcacctgttgagtactggaaaaaagtcaccaaggtaataattcatgtctcatgtacatgattttcatgaaaatgttttaagtgcttgcaataattgaagatttgatgttttatttttagggacattctgaatggaagaagctacaacatggaccaccagaatgtttagaattgctggatgaaatgtttggtactattgctgttgatggttcttctgcttgtgcacctggagaaaatgctggaggggatgatgcaagtggtgatgtacaggaccttggcgacacaccagtagattgctcattgggtaaaaaaccagtgaagcgagggtcttccagcaccgccactagtccatacaagaaggttaagaaccccatggttaggataatgaggaatattcaaaccactatggataccaattgtgatattgccaacaaggtgatgcaaggtgaatttaggttcaattccattaaggaggtgatggatttggtggtggattgcggggcagcagaaggaagtgcggagcatttcatggctacaagattatttgtgaaagctgaacatcgtgatatgttcaagactcttaccaccaaggtgggaaggctctcttggttgcagagatggtgcgagaaggaagggcagcagtagaaaattgctaattatttatatgcatgaactagttatctctgtttttactttgtcagacaatatgtattagcaagattgctacttatttattcgcatgaacttatgtactgcctggccatgtaatatggcgccttaattttgattggatgaactactgtttagtgatccatcaacatggtctttctgtgactattgaggtgatatcatttgttgcattgtttgtagatgggcatgtatggaagtgatgatgacgatgaggaggaggatgaaactattattgttgctagcagacaactagatatgatgagaaaatttggaccggtgttgacatcatttggtatgttctacgctgaaaattatttgaacaagtccaagtatagaaaagctaatttagcgggtcatgcttgggttatgagaaaccttgaagttccacaagattgttatgacatgtttagaatgagtaggccactctttgagaggttacataatttgttggtctcatcttatggtctgaagtcaactagtaagatggattcagttgaagctttagaaatgtttttgtggaccattggggctccacaatcatttgttcaagttaagaaccgatttgagaggtcaaaaggaaaaattagtagaaaattcaatgaagtgttgcagagtatctatctcctttcaaaagatcttgtcaaacctagagacccaaacttcacaactattcacccaagactacttgatgatcggtttgagccccatttcaacaattgcataggtgcaatagatgggacacatataccagtagttgtgcccgcatcaaaggtggttcaacatgtgggtagaaataaatatccgacgcaaaatggcttggccatttgtgactttgacatgaggtttgcattaattgttgcggggtggcctggatcggcacatgatatgagggtgttcaatgatgctttgcgcaaatatgccgctatcttccctcatccaccacctggtaacttctcttatccgtttaatagtctcgtcgaactagcatcaattataaaataatgtctcatggtttatgtttatgctaacagggaaattttaccttgttgactcgggctatccaaatcgactaggatatctatctccatataaagggaccaaataccatttaccggaatttcgagagggtccacgtcctagtggcaagaaggaggtgttcaaccacttacattcatcgcttcgtaatgtgattgagcgctcttttggtgttttaaaaatgaaatggagaattctattggacttaccaagttatccaatgctcaagcaaacaaaaataatacatgcttgcatggcgctgcataattttattcgagatagcaaattgagtgatgaagagtttgatctgtgtgataatgatgaaaactacatgccgatgccttcatctcaagggaatgccagtcacatgggagacgaagatggggacgcaaatgccttccgtgatagtattgctgatgctttatttgctaggagataataatttggttttaagtctaatatatatgtggaagaaatattcatgaatgtataattataaatatttgtcaaatttttatttatctacatcaaatttatatctattgtataaagtcaccgaatgatgacaaaggcatccaaaaaaatagttgagggcattctagactttagccatgcaaactcaataatccaggtttccaataatctagagaaagaaacagctcacagcttattttcctctagcttataataatccagcttataataatctgactcaataagttggattataataatcctaagctgaaaaaaacagggccttaatctcagcactgtaacatgcagcttgtgcatatgcctgacgaccaccatgcactagccatcctatattttaatgcatgcagccatgatgattgtatacaaatcgtgccgcatgaaagtgtcttctccgatccatgcgatttgctcgactccgttcaagttgtacgcaaagaacagcatccgtactgttcgtctgtacctccgcacgcaccgcagtcgcagccctcgtgttcaccgtctacgaccccgtcatcatcggccatgcacgtccgccgcgccgcgccacgctcgccggcttcgcccttccatcactagcctccctgccgccgcggatccgcgatcgccgcgtgcgtcgggcgcgccgtccatggcgctacccctccgatctctccgaacgccttcggccacgcccggcctcgtcttccagtcacgctccgccatcgtcggtctgatcgcgagtgaggtcgtcgcctccgcaacgtcctcgttgtcgccatcgatctcatcgccatgactgacgatctcctgtcgatgcacgatcctcacctcgtgtttcctcctccacatgtcttctcgatccaatactgaaaccttctgctcgatgggt

SEQ ID NO: 5385 - DNA, 2653 bp, Oryza sativa
gaaggctgtagatggatatgggtgggggatggatttgcaaaaactgatgaagtagttttaactggacaccttcatgtggcaccttacattcgcgtgattccaattgatttagcagtattcaaggacctgttcttagagcttggcataaaggagcaacttgaccctgtagattatgctagtattttgaccagaatggccacaaggaaagcttcgacttcactacaagctgaggaacttagaacagctgtcttggttgtgcagcatctagctgagtttcggtttcaggaccaccaaacacaaatatatcttcctgattcttcagctaggctctgtctgtcttctgaacttgtatttaatgatgccccttggcttcttgattttgatgaggacatcactgggaatgcaccaagcattgctttcaattcgaagaagtatgttcacaattttgtccatggcaacatttctaatgatgtggcggaaaggctaggtgtccgctctctccgccgtctcttgcttgctgagagttcggactcaatgaatttgagtttgtcaggggttgctgaggcttttggacagcatgaagatttgactacacgacttaagcacatcgttgagatgtatgcagatggaccagggattctgtttgagttggtacagaatgcagaagatgctaaggcttctgaggttgtgtttttactggataagacccattatggtacttcatctattctatcacctgaaatggctgaatggcaggggcctgctctctactgcttcaatgactcaatttttagtccccaggatctttatgccatctcacgaattggtcaagacagcaaacttgagaaaccttttgcaataggcaggtttggtcttggcttcaattgtgtatatcacttcacagacattcctgggtttgtttctggtgagaatattgttatgtttgatccgcatgcctcttatctgccaggaatatctccatctcatccaggtctaaggataaaatttgtaggaaggaggatcttagaacagttccctgatcaattcaccccattcttacactttggttgcaacttgcaacagccatttccaggcacactcttccgcttccctcttaggaacgaggctgctgcttctagaagccaaataaagcgagaacaatatacaccccaagatgtggaaatgcttttctcttccttctctgaagttgtatctgaggctttactttttctccgcaacgtaaagaatataactctgtatgtcaaggagagtgacagccaggagatgaaacttgtacatcgtgtctcgaagcataatagttatgagatggccaaagaacctcatgcgcttaatacgatgcttgcatttataaatggaaatcaaccatcaggaatggataggaatcaatttttcaataagttgaataagactaaagatagtgatttaccttggagttctcaaaaggtctctatctttgagcaaagccctgctgcttgcttggtgcattcatggatcttaacagagagtataggtgggggccatgctagaaagttgtcaactgcctctggtagtaagtcccacttctttgttccctgggcatctgttgctgcttatctgcattctgtgactgtggacaatacaaaagaactgtctggtgaagctgaagtcaaccttgatgatttggttctcaagcaactgtctcttggatcctctaaggacaggaaattttttgagggtcgagccttctgctttcttcctttaccaatcaacactagcatgccagtgcatgtgaatgcttattttgaactatcttcaaatcgaagggatatctggataggaaatgacatggctgggggaggaagagtacgatcagaatggaatcttgcactgcttgaagatgttgctgctcctgcttatggtcacctgcttgcagccattgcacaagagcttggtccctccgatctgtttctctcattttggcctactgctgtaggtgtggagccatggtcttccatggtgaggaagctttatgtatctatcgcagaacttggacttcatgttctgtatacaaaagcacgagggggacattgggtgtcaacaaggcaagctatctttcctgatttcagtttttcaaaggccattgaactggcagaagttctttctgaagctggtttgcctgtggtatctgtatccaaacaaatagttgacagtttcttgaacgcatatccttcagttcatctcttgaatcctcatctgctgaggaatttgttgatccgacggaagcgtggcttcagaaatagagaagaagcaatacttgttctggagtactgcttgagtgacatgggagatccttcctttcctgataaattgcaagggttagctcttcttcctttggcaaatggatcattcacaacatttaccaaccggggggagggtgaaagagtattcttttcttcacaaatggaatttgagcttctgaaggactctataccacatcttgttgttgataactctttacccggatgccattttgaagaagttatatgacatagcttgttctgcacggtcaaacatttacttattcacatgcaattttctccttgagttgttgcctaggatcttgccacctgaatggcagcatgctaagcagtta

SEQ ID NO: 5386 - DNA, 2058 bp, Oryza sativa
aactggagtaacaacccttttgcagaatggaataaaaaagatggctgaagcaggcgctgagcgtgagtgttcttcccctgctgaagattgtgctaaaggtactccaaaggaagagcatggaggattggtaagatttattacttttaatgattctgtacacatgctcatacacgcatgcacgcacgcacatgtgccaatttgggaagtggaagatcattgctacatttatggacagccaactattgtttgcacgaatgatcaaattataatcttattacctacaacttggcaatgaaagtgttctctactggcagcgaataactggcacaagcatttaaagtagtgagtagaggccactttcattgtcagtgttgcaatctatacttttctgccagctgtcaggtgagactataatttgctcattcatgcaaacgatagttggtctgtaaatgtagcaacgattttccacttccccaattagtctctcttgtgtatgtgcgcgtgttgggtgcgtgtgcgcgtgcctgacatggaaacacttgcattccatttatactggttacacagcaatacttgccttaataattttatcgctaagtgttcaactaaaaaaatattaaaaacaaactggtgaatttatcattattttattatcttaaggaactaaatctttcatcataaatactatctgactcccatccttgtgacagatatcgaacaacatctctggcaatacacaatttggaacttccatggcgataccaaatgaaaataaaggtaaaatatgatgaagtatctccctctgccttttcgtctctctgtgtaatcggtacaatttctggactgtaaaatacattttgattgtttgatggcctatccttttgttctcttttgcattagttactggaagttcaatttactgttggtaattgttcatccacaatcagaattaggaaaaaaaaattaaaattccacaaagccgcaaaaaacttaaatagcctgaaaagagattgcacaacattttctctgtaatgctgcatcagctctgaatgctatttgtagttgtgctagattgactgcttttatcagaatgtagtgcctactaactttgtaaattttcttagttagttagcttacttggaatatttatatgttgatggttgtaaatttgcaagtgttgatttaacactatttatatgtttattgctaaccatttaaaatattgccactctttagtggttagttaagagtcaaggtatgtgtgctgttattattattggtaatactgaatttgttgacttgtgagatgtgatagggctggtctgttcctctatatctatctgttttgtcgcaggcatttaagggccatagtgtatgccttctcaatttcttctgtttatgttctggtttatgggcatttacggctatttggatgtcttctcaatttcgtctcacttggatagctgttgctgcaatgctatctggcaatgcatttgccctttcttcagatatcattccctttcttccattatccggtcatttgtttgcctttttttagttcttacaatatgttattacaggtacatctcctggaaagaaaagatataacttaactgaggctgaacctggctcggagctggagggtgtctcttcattgaatcaatattttcctccaggtgataatgtaaaacatgagttaaacttggttgaaaatggtgttgggaataaccatgattgcaacgcagatcatgttcctggacagcccttttccaagtaagacgaaagaaatttcaaccaattgaattatagttgttcttctatggttttacttcccttctttgtttaatgtgacccccttccttattttctttttctgcatgctctctggaagatcttaactgctgttttgctgtgtgcagcttcaatgattcacactattatatccatccactcatcaaggaaaagatgactcagctttgggacaacacgttcaagcaagataagctggcaccatgtcaccctggtaaagttttaagggcttgtcctagctaactactt

SEQ ID NO: 5387 - DNA, 939 bp, Oryza sativa
tgcagctctgtagttactctgtcacattggcaaatggcaaggactaatgctaaatttctagaactatatttacagtaccgctcaagaagatactacaaaaacaaaaacttaatcactttacaaaaaaaaacgtgcgaatcaactgtcaattaattctgacatgaacctaagtcgttttcgcctgcgtgacagaaacagagctaacagctaccaccctgaaactgaagagcaattctgggccgaacactttgcagcctcctccctgtctcctgaatccaagcgcgtccctcccttttccctcctccattacacctcctcaatagtcaatacccccatctccttggattgcattgccttctccgtccgtcgcgttgctccggtgctcgatcggtctccccgcccggccgccagacgacgcgccacatatgaagccccgctcctcgcgcgacggccataatgccgccgccgccgccgcgctcctcctcgcggcgctggtcctctccggcgacgtcctgccggcggtcgtggccggtggcgccccctcgttcaactacaaggacgcgctcaccaagtccatcatgttcctcgaggcgcagcgctccggcaagctgccgcccaccaaccgcatcaagtggcgcggcgactccggcatggaagacggcaagctcgccaacgtatacgtcgtctcgcctcgcgccctagctcgaacatctcgctagctgcatcttctaattttgtgaaatggatcactcgatcaggtggacctgactggcgggtactacgacgccggcgacaacgtgaagtacgggctgccgctggcgttcacggtgacgacgctggcgtggacggcgatggcgttcgagaaagagctgaaggcggcgagggagctggagaacgtgcacgcggccatcaggtggggcaccgactacttcctcaagg

SEQ ID NO: 5388 - DNA, 14249 bp, Oryza sativa
cgccctcgccatccgtggcccaaacctcatcgccacccagtaattaatcaccattattatacactgattaattactgctaaattaactaaagatattgagtatattactatattactcctcctcccctgtattaaatctcgacgatatatacaaattaatttgttgattaatcggaatcgaaattagagctgatgcatgcatggacacgtgagtgatcgatcgggcacacgatcgatcgatgacacgaacgaacaattaataacgcgagaaagggctcgcgcgagttgttggggtaggtctcggctggtcgttaggttggccagcttatttctcgttgcacgcacgcacgcacgtacgtacgcaggcgcgcgcaaccgtgtgtaagtgcgtgtgtgatggatcgatcaaccgagcggcgcgcacgggcgaatacgaacttttccaagtgatgaagtgatcacgtatacacgtagtacagcagccgagcttttcggtgagcgtgtacgacgtgtttttttcattggaccgaacataaaacatgtcaagtacgtacgtggtacgtttggttaatgcataaatgtatttgtggttcttcaaatcccgtgctcaggtatgaattaattaatctagctagctatatggtgtactatcttgtacgaagaagaacatctctgatgctgtatatctttgtgatgtatactacacgcacaataaattatctagtttggtgctatcattttattgtgtccttctcgttttttcaaaattttaatttattcgtaacattgtgtatgatgtgtgaaaactataataattggttgtagcttttattaaagtaaagacccgaattctcattatctaaaaaaaacattgttgatcaatatcttgatatcccctttattatacatcagctttggagagaaggaaaaaaaatacatgtatttatttgacaattggttttctgaattacaaaaggggtccttgtccagttgtcttgaactataaccttccattttttgagttcatttttatcatttctagcacaaataataaattgtactaaatcaaccccatctgcaaccattagatcagtaaccaacaccaccagataatgcctactttaccaacaccactaacaaaaccattaggggaataggtgtacttgtggtaaatgaggcagtgatgcagcgcaaaggcaggtaccaatttatccttacaaaagttaaaatcacaaaggtgggtgaccttgatgaacattagttagcaatgtaccgcaaagaaaacattaggtagcaatgaagacaatcactctcttaataatctatatgttgtttgcacttaagttgtaatgtaagtaactcttggatttaagcatacgttagattctgctgagatagacatatatttattcgaccgagcttagtcaaactatagatgttggaataaaaatgctcgatttattttagaactaactcattggtggatgattgggattggttgtcgatttgtcgtaacgaatttattggattggatgggattggttcaatttcgcttctatgtccaaaattgcatcgtcttctactttaacggtattagcttggcatgttgttatttggcacaactctctattaaagtcgtgtcctttcggctattgggtaccaatctagagtcatgtctcttttcacttgtttaatatataatctctcaaatggagtgcatatcattgtttttctttacgggttatctaaatgtatgagaaattatttaaagctaaaaaaagttcggggcaaatctttacttatatattactactccatctttctttgcacatttgcaaactcaggcagaaaagggaaataaaaaagggaatcaacctgccctccttttgcagcataaatacccaacccatcactccacaaagaaaaaaaaaagccactctctcgcgatttccctagtctttcggtgtgcgtgcgcgtgtgaaggcgagcaagcgagcgaaagcgaaagaagcagcaagcagcaagaggaggaggcggaggcggcctcctttgcatgtgaggagagagaggaggtgaggtgaggggggccatgtcgatcgcactggagagtgggcccgggctaggaggaggaggagggggcggcggcgggccccggttcggccgcgtcgcccgctgcgcctacgccgcctcgccgccgccggcgtcggtgggggcgcgcagctcgtcgtcggtggggagggacagcgacagccccgcggcggcggccaagtgggagtgggacggcgaggaggtggagggcggcgacggcgaggtgcagagctcgtacaaggggcccttcgacaccatggacgcgctccaggaggccctccccttcaggtatggctggcttcccctccccgcccaattcgtcgttacccccacggatcttgatcggtcccgaggtgttcttgcgtttcgtttgggtgatttgggggtaatgcggggtagaaaccgctgttcttgatcccccggtgcgcgtgttcctctagagagatttcgggggtttcttgattcgtttggaccaatgcagtggaaaatactggttcttgatcggttttagttggggaatgtaggcaagattcttggttcttcgtggacggttagtggtcatggagtaatttgtatggagcggtttggttatctatccttgagtcgatgcttatcttggaatttgggggatttattggtcggactgaagtcaaactgttaaaagaaagaaagaaagaaagaaagagctaatttagggttctaggtgattctttgtgccgccttacatccaacaaatttgtgaacatgggtttcgatcgattcgtgaagctgggatatttgaggtcggaagaatacagcgaatgcactggatgccgggatacttttgcgtatggtttcgtcatgcttgcttattgttggttcatgtttgggttatacccataacccattaggggtcgattatatttttgtaagtagtagtccttaatgttcttgccatgcccttaaaatctttatgctgaatgttctgagcacgaaaggttctgattagacaatttctaatgcgtttgtataggcttcagcaagaatgacttgtgattagtactactttgttggtgtttcacttcattcttactccgaggaatcaaaggatcctagcacttgaatatttcatttgaagtccatgccatcttataatttcagaagggcacattagttgtactaacactgaaagaccaatttccatgattcatagttcctttggtatgtgttgatacttgatattgactatataagcgcagtattatgggatgaaatcacacaaaacgggttttatcagaattacaaaaagttctatggtgtattaatggttgggtttctttgttaatgatcaatacaatagatggtgtaaattgcagatatgtgcatctttgacaaaagcaatgaataatctatcttctaggttggtcgtagtaatgactttgagtttgttcgtttgtgttcttgcaacctgactattgtgtacagggggggtaggcatagctctgagatcagttgatgcatattaccttcaggcagtaatatttttgtcatgaagatatcatgaattgttataatttttgcatagggacattttttttttcttttgagcatgcacaactactgtacaatttcgctactgctatttgaattctttcagtactagtgtaagtctagcacaactacttagtagctgagtgggtttgtagttcatactaccaagtacctattggcccttgtcacttgtagtcgcatagaattgtgcattctagccatatgatggaagcagagattgggtattgtgaacttgaagtcttgaacacaattcaatatggctaacatgattaacacaggaacaggatcagtcagacaccacaatctttttcacatgcttttgttagctatcttgtagcatgtgtaattatttgttgatctgcaacattaaaatattccgcagcctgtctctatcgttgatctggcaaacttgtttgtctgttccttgtgaggagcatgtgtactgctgatgttttccaagtctttgctccagcatcttacaatcttctgttttattgagtaattctgttcttatctattgcaggaaaggggtatgcaagttctacaatggcaagtctggatcttttgcaaagcttcaagattccgtgatcccatctccacctgagaaaagtcttccaaagccagaaaacccatcccctaggaagcggaaaggtcttcttccgttcagtttcaagtggggcaagccacagaacaaagaggtattccctgaagatgatgtgatcatcagccctacaaattgcaggagaatgacattgtcaccagctgcaacaagcagttcggggagcaacagcggcagtgatgatgaacactaccgctctccgaagctgcatacccgtcagccactccgaaggcccagcaatgccgccatgggtgtctttgcttctccacctgcacctcgtccaccgcaggtgttatcagctcatatgagatcacactcgatgcttgatctgcaggatgtgacagagtcgaccgccatggtttctcccagggacaagcgaaggaggaactaggaagggtggatcttgatgtgttgtcggtctggtccaaccgctggtgcccattttagactgcggaatccagtggcgaatgccgtcgtggtggtagggcgcgtgcaatgctttaggggggtggggggtgttttgcgaggtcaaatggactcgtattcatagagcttgctgttctccttatacttgatgtactgggatacatacagagaacctgagaaactgatgtcgttacctgagttggtgggctgcatgcgttgattacaggttgacttgtaaatgctgaactctgcttttgtcgattataattcaatcatgtggcctgctctattacattttgtatacctctctgatctgtggtatctcacccttggaactgtatcagtatgcatattatgtcctgagctgttggtgttcttctgttgctagtacaactgtacaagtagcagcaacctcttccgatgaacttatctgtgcagatccatcacttttttttttagaacatgcagatccatcacatagttttggataaatcattctgctcttatgggtactggtgtgcaaagcgcaaggattttgtttttttggcagaagataatctattgcagtacacacgcagattgtgtgaacgccttggcaaatcctgttggtcggtttcgtactttcatcttctgttttcgtgttcggaagagattgcagtggctgtgcagccgcagcagctccatcaaacgcaacaaaatttctacggctttgtactgtagatacagcccagctgcgccacagccgagcaagctgcaaagcagcacaagcgatttggtggcacatgattgctgctctcgttaatctgacgccttcggtaatcggaacctcccactcacagctgaaatttgttgttttctctatgcgtagatcaaaactgatctttcatatttgtgtaaggacatttaagacctacttcactttgtattatttaatttttataagattttagttaactatttggaccacatggactaaatcttaaagcccacaaatcttgataaggcaaaattgtataaagcaccccaattatcactcgttttaaaatctcctcccttaaaaaattcaattcgttgcaaaggcccacccaaccaaaccccttcacatgaatataaagtcagcccgaccccgctgatgtgtagtcgcaacaggggaacagagcttgaccttagctactctctctgtcccaaacagggacggagccagcattttgaatcactggggtcatggcttttacttgtatttatgtcgtgtttgaaactataattattctcgaagctagatatttttagctcacttttgagctagagctatgagtaagttgggattgttccattttgctaaaaataaatatttaaagtctattctataagaacttctgaggtttttaaggtccaaaattttaaaagttatgactacatataaccgggcataacaaccatgtgttttttcagacatacaagtatgttctgaaagttgtttattattccatctgtctcaaaatacaactacctacgtctttttaagagattaatgttagggtgtgaaattattgtgattggttgggaaaaaaaagtaggtgaaaaaaattatatcgaggaattttgtgattggagatgggatggttcatagaaaatagctatattttaaagcaaatttgaatattagaagtaacatattttgagatagagtgagtaacttaaaaaacacatctagtagttgattagcaaaacttcaggcctaatgcattgatatacatagcacatagctaaaataagtagttggttaatagatcaaatatgtctaattgcagcattagtagcggattgacagtagcataacacagctaacaaattatgcttccaaagaaataaacggtacaattgtttcagccttcctgagctccagcagtttatcaggctggccggggtcattaagcttttgttgctggggtcattagctacaaaataatgaacaattcacttgattgatcgaatgtcatcagggtctaatgaccccaatgatagtactgcagctccgcccctgatcccaaaatataagcatttttagctatgaatctggataactgtacatttagatttatagccaaaagttattatattttaggacggatgtagtaattgcctatactgattcgccgctaccctcagccctcgcgttgttcgagaccgtcttctctctttgatctacacctaggactaggttcaaatggatgcacctgaaaccaaacgtgacccattggtctggtcttttacgggtacaagtcacgggctgactcagctatttacacacgtggagggtttgggtgggtgggtttttgcaacaaattggttttactagaactttaggcgcgcttcgggccgccctaccgtttgttattggtaaaaagtatcacaagtcagaatatgtatgtacttatattggtaaatgttgagtacgaaaggacttcattctagcacaggctgtgacataacttgaattccgatgttacatgatgatttgaaatagaccctgaatactataagataaaaaatacctaataatttcagaaaccacaattatttatcatacccaaaagagcaagaaaaggtataataatgtacttaaaaaacggtttaatcattcatcctcttttaaaagaggttaattcagttccattacggggcatgaatcacaagttgtaatgtgaaggactgtgtttgcaatcacttaagaaaataaatattcttcaatcgcacatggggactctcagaatttgtatgcaccaggtttctggttttcgttgcttgcaaaattaagttgctagcaatcctggaagctgagtagacactttactggtgtgcacgcgcgcacgtttaatgtgacatggagattattacaggcagcacactgtggaaatggcagagttaggtataatggtaaatccctttttccagaattatcagctaaaatccactgctagatgctccctcaatcataccagcttacaaaaaacgtctttcggactaatctctgcttgaatatctggtatttggtacataggcctaagaaaaaaatcagagagaattgtccatgttctgatttgtgattctgacttctgcagttactaaacataatccaaacaaaaaagaaaatattttctatgttctgtaatttgagtcttaattcagattagattgacctgaaatctaaagaggtcatgaatattcagattttgcatttgattctctgagattatatcaaacagctagatgacaccttaaaaaacacaatgaagcagaaccatccaaaccctgtcctgaccacctccttaaaatatgtaatggagcagagcgacccacagtggtttcatgaagtgaacatctaagctttggttgttggaactatatacaaacacaaccaaataaaaagatatgcagtacaaatcagaaatactgtagcattcttgataaaaaaaaagggtagactatcatttgcaagggaataatggtatatgaaaaagcaaagctagcgagggaactggaggcaggaaagggaagatacatgccaagcatacataagtgagtgtagaaaggaactggttgtggcttaactcaccaaaattgaccatgggaaacaaactgcaaatggaccctgggcaaggcaacaacacatggttccaatatcaccagatatggaatcgctaaacagtggtggtgccgcacggccgacggagcttcaagctaaccaacacctacaatattggcaaacttgagcaccttctatggcagcaaccaatcctttttatacagataagacaaaatcaattatcatatttgatattcatatttataattagattgcattctttttctcttttttgaaaaaagattccacttatctagtgaccaacacttcaaagtatcacctagagtagaaggcaaactgaagagaaaaacattgattttaacaatctttcaccttcttgtacatagaaacacaactgtgatgtacattaatcaacgttttcattagccgatgaggacggtaattttaacagagctaggatgatgcaaaataaatggctcagcaaaaaagagtaagttgtgttttctaggcaagaagttttttggatttaaatcaacagcaactatgaaattgtaagtcccttaaatataattgcatgaaagcacataaaccatttcttgcatacttaattaaactcctactttgaaacattgatatggtgctctgcaatagttctttcaatcttgcaactaatgtcaagcaactttgttatggccttcttgttccatgattcaggtggccttgtaatgctagtatatgaccttcccatcgagaaaatacttagttaatgaggaagaatatccaaagtaagaccaatttcagaatatcaattagacatctaaatgaggccatatgataaagtgcgtgcagtaaaagaggatttctttttttatcatattaacaaatgatctgtacaggtgctacagcctctaatcctcccatgaatagtttagcttaattagtttattctactgtgcacccatggtaaatttttagaaaggctaaatatcacgtcaacagtgaacattagaacagtcactgacagttgcaataacatggagtatgtgcatgaggatagctaaggataatggatttaggacaaggttctatgaaccatcacatgatgttcatgtgaacaaatgcacgtaagttcctattatgctgcatcgaaaaaggcaagaagcaacagaagaacttggaaatctggaagaagcaaagaaaataaaggcaaaggcaacagaagaagatcacctgttcaaaaatatgaaatgtcatcccaattgccttgtggaggtagcaacaaatagacactcaacatttagtcatgaaatcaatggcatcttgcttcacagcgtcctatcatttattgagagcaatataaaccagaagtatatattgtactaatataaattgaagagtaccataacaaactttatatgcccacgatcatatctatgactgtacataacaatgctattcaaacctgaagaaaaatcagacattcatgataaggctcatagtatcctctagaatcagatcaagtccaaagatagtcattcagatcaatcgataatttttttgattaatttcaattgtaagtggtcagctcaaagtgtcacagcatttacatcattcaatattaagttctggaggtcttcattccaacacagattgtcacaacacctgaattctgacatttgtgtcacttttaggaatagtggttgaattcttcaagatagaaatcactaaagagttagttcagaaattatgaaaacttatcatgcttaacagagaaagacatatcaatgtatataatcaaagatgattttagtgagattcagtttctttaaaaaaagctaatttagttccatcatatgcaaaactaaatttatatgttgcatctcgtgtagctgaaagcatgaataccaagatagaagcatccgcttatgtgaatgaagataaaggaatttatagaacaaccttcgctaagaataattcccaagaaactaaatgatttctagatttggcaatagaacggtcagttgatcatccaaaatactcctcaaagaactaaatgtggcatccaaaactcttctttcactcaaaagaaaaagataatacatctattgaaatataatgtgagaagtaatcagttaaactaccgtagatgtgggtgtcctaaagagtatgtggccacaaaatctgacatcatgttcacaaatttctaaagattgggtataaaatgatacatcttaaactgcaatgcaactgcttagcatagtataagatgagaaagcatagccacaaggttgctagatagccaaatctacttcacatattaggaagaaacatgccccctatagttttgacatacctgagcaccatatatggtagcaaccaaccctttttacatgaataagacaaaaggagtcatcagatttgatatttataataggatgcacttattactctctaaaaaaaggttccacttatctacatgcataacaatacctttgtagagaataaattatatccgatgaagagctatagaaatacaatgcatatttaagctgaaaggagcatagaggacacatacacattaacaacgtacaacacccactaaacctctttgattacatcaagccactgaattatcagttataatctccctcaatcatacaagcttacaaagaatgtttttcagactaatatctgcttgaatatctggtattcggtgcacaatcccaagccaaaaataaaacacagagaaattttcttgttctgatttgtgattcggacttctgcagtcgatctacacatgcggctgttcttcgttcgcgtcattgtgaagcaatcaagcagtagcatcatattgtccacatcgtcgtcgccgatctggagggcatggccgacccgatctccaccagcaccccaacgtcgttggtaggccgcgccgcccgctggtcgtcggcctcacctggtgcgaggtcgccccgacgctgccggtgccatctccatcaagctccgccggcgtcgtcaaggtcgtcgcggcgtcatcggtgcggcacagggtacgagggaacccgtccctaccggctcctcctctgcggccgccgccgcctggggagctcgtgcccgccgcagccgcctacgcctgcaggccgccggttcaccgtcgatgcatcctccgccatccacgctgccgcccggatctggatgtcatcgtcgttgcggtcaatcccatctcgccgagctccggcctcgccgtcgtcaccatctccacccggccggatgacgccggcacctgcctcgccgtctcctgtgccgctgcggggggactcgcctccaccgccgacgtgtgcgggtcgccgctgcccggattcctcgctgcccctcctgggactccacgatgggcgcccgccggtctccgccgcgttgctcccggcggcgccccgacaccgccgccgcaggggggacggattccgccctcaccgagcacgagctccctccaccgcctcccgccgtccgccgcctcccgccatctgccttgctgcgccggcgccctccgtcggcccgatgcctctggctcctctcataatctcccaaatcaagcgtcggggccagaagatcgatccccacgccatcaatctccatcacagcatcctcggagctagcgcagcaccatccaatcccctgcttgacctcacagagagaggaagagaagggagcaaaggtggggggagcgccaggagcccaggagatggaggaaggcgggggagagcgcgagggatgtcatctgcgatgaggagaagcgggtgagggggagggaagacgatgcagcaccggcggcgccgcaaaggcaggggaagagcaatcgagagaagggtggggtacaatggcggctagggtttcggagaagcgaggggatggaggatggggatgttttcttttgcaagaaaaccctcttactttcttgttttagagcgcgccccctatattcggaatttcttctctttcacatataataataccagtatatagaggaccactacgtaagaatataaaatacagagaagtatgaccaggcagttaggaatgattatcaaagaaagtgagggtttttttgcaaaattgccagctctagcacagggtgacgtggatatcaccggaagcgaacacgccagccaaaaaagccccggagcgctgtggtggctctatttcgcggtcccctttaatctctccgatttaatctctccgatggtggaattttaaaacaagagtgataattgagatggtttataaatttttatctccggatagtgatactatgtgtcaatatataaatagttttcagacacgtgaatacaattacgatgacgatgatatccaatcacaggctctacctactaaaaatctgcttaccaaccagtacgaggcgtatatttcatactccctccgtctcataatataagagatttcgagtttttaattgcaacgtttgaccactcgtcttattcaaattttttttacaaatataaaaaatgaaaagttgtgtttaaagtactgtagataataaagtaagtcataaataaaataaataatatttttaaaaaattttgaataagatgagtggtcaaacgttacaagcaaaaaattaaaatctcttatattatgggacggagggagtatatttgcatggtatcagtgacacatagtactagaacaaaaataattgaatccctcgcacagataggcaaaccctgcagtaagttgtatatattcggctgccctggcctccccactacctccccacagatgacagaatagctcatcaaacctaagtttaattaattgccaacattctcatggtcatcaaaccaatgggcaaaccactcgtagtcatactcttgctatcctcctccctcctcgccgttgcagctgctgcagcatcgccgccgtcatcaacagcagcaggccatgcaggcgagccagacgacgacgttgtgtccacctacatcgtgcacgtcatgcccgcacacgcgccacgccgccttcccacgcaccgcgcgtctcgtcgtctcacccgcggctacgcatcgctcgtccgcgggctcctcccgcggcacatcgccgacccggctccgcgactcctctactcctacgcgcacgccgcgacggggttcgcggcgcgcctcacggcacggcaggccgcgcacctcgaggcgcagccttccatcgcggccgttgtccgcgatacggcctatcagctccacaccacatggtcctccgactttctcaacctctcgccgtcttttgggctacaggcggagtccaacggcgccgtagacgcggtgattggtgtcatagacacgggtatatatccgaaagaccgtgcgtcctttgcacctgacccatctctgcccccaacaccgcctcccaccttccgtggtagttgcgtgtcgtcgtttcgtgattccaatgccagcgcttactgcaacaacaagcttgtgggagcaaagacgttctaccggggatacgaggcacaaaatgggccaatagatgagagggtgcagaccaagtcaccgctagaccaggaatcctaattgacgcgtacgcgccggcccacacggcccaagacatggttagttcttttttccgaattttttcatatatgtataagcttttaacccatatttgaatactttcaactctgacttaaaaactttcaactcagattcgaaaactttcaactcgagattcgaaaactttcaaatcagatttaaaaattttcaaaagttataattaaaaaactttcaactcaaaacattttgaaaaaaaaatacgtgtgctaaagattttaaaaaagtaatcagaaaaaaagaaaaaaaagctaaaagaaaaaataaaaaaaaacgaaaaaaaaatcgcgaataaaaaaaaaggccgatgggccttgtgggctgggggaggggggggcag

SEQ ID NO: 5389 - DNA, 2001 bp, Oryza sativa
agaacagaagaaagtagataatgctgtaatgagcagatctcatggcatggaaggtcaccatctacaatcccaagattcaggttctcagttccctggatgcaccacagattactggaaaacttccaggcctactgaaagtggttggaggttggctatcatggtgtatcagcttttgaagggcgctgtaacacgaaccagcaaagatctgttagttctaaattgcaattaggtgagatgatcaaggctgcaaatgatgcctgcaaagtgcaaggtgcatcagatgttcatctgatttctggtcacccccttgctgattttgagacttttatatattctgcaagtccagtcattgctaagacatcttgcatgaggaatggcaactgtttgcaggacccgcaagctggcagctcaccatatcaatatcagatatcggatgtctccttgagaaatgtgtgggaatggtatgaggaacctggatcctatggattggaagtagaaatccatagaagtctcaactctacgagatcagcttgtggtgtctcagagttctgtgcttactttttaccttctctatctgctattcaattgtttgaacagtgcaagaataacttggaccataagtttgacagtgatgatgatttcttattatcccaaccaaatggtgtgtatttaccaaaaccatctttatctgtacaagaccatggggaacccctgtttgaatattttgaatcagagcatccttcttcacgtcctccactttttgagaagtaagccttctattgttgatgttatgtatctacagactgtagtaatcatctacacttgacttaaaaaaaaaagaccgaaacaaacaaagttgtgaagagatgaaataaaataaatcagaaatcattcataaagagcttagccaggaattgttgttgttcttcttgacttttaaaatcataaagagcttagccaggaagcattgttcttcttcttgactttttagatgcttaccagtcattaatgggctgtcacatgttttttcttgatgatacttgatacattttatttttatctccttatgcatataactgctgaaataaaatgaggacgttgcaattttgttttaaaacgtttccttttcctatgcattacaatattttataggatcaaacagcttaccagtggtgaaaatctctctacttgccaaatatttggggatcccaagatgttggaaaatcttaaattgcgcgatcttcatcctgcttcctggtatgttctaatattggatatttctatccactgaattttgaatttatataccatttgttcccttattagtgctgattattttttaactcttgctaatgatattaccggactccatttccaggttttgtgttgcgtggtatcctatttgccgaattcctcaaggaaactgccgtgctgcattcctgacttaccactccctgggcaaagtagttccccaaattcactctccagacaaggctgatgaacctactcatttggtttgtccagttgttggtttctggagttacaatgacaaggtaatatttcatctctacaataatcattttttgtatcggtacggatagtataggtttgtagccacaatttattattattactaatcacattcagcacggtactaaaagttcaatgtaaaacctcatcttcatctaacaaaagctttatgagtaaactttaattcttgtttttttttcttatttgactaatcaagttgtgacctcccataggtggcttgcttatatctctagtgcacttccccttttaagcttaatttaagacagtaagatatggtgttggacaaacgtcatcttcatcccatctgtctgtgaccaagttgattgtgcataggtggacaatccactatggaaaatcattgtattagtaaaggaatataaagttttctgttattataccagatggcggaaacctttgtgtactagaaaaaacttttagttttcttgctgg

SEQ ID NO: 5390 - DNA, 8185 bp, Oryza sativa
gtttttgcaaatataaaaaataaaaaattatgcttaaagtattgtggataataaagtaagtcacaaataaaataaataataatttcaaaaaattttgaataagacgagtggtcaaacgttgcaagcaaaaactcaaaataccttatattatgggacggagggagtattaaattttagatgcccgcgcatttgcgcttcctttatagttatataaaaggagagaaggccatgcaagtgaagtgatgatctcttatgcaccaatcctacaccttaaaaccctaacatcaccatacatcccaatcacaaggaaatcactgggagggacccgaatagctaattctcatttctcacaaccgactgttgtcaacaacactacaatcaccattgtgagagaagttggacgttgcaagtcaatcaccagcgatgacgccttcagctaaagcgggagatctcactggtgcgggacttctacatccacatcgacaaactacaacagtagcaacatatgtgatactaatgacttcttctacatccggttagtaccaccaaattctgtattagattagatttggtgatacttggaactcctaaatttagattagatttcgttttaaatttatgttgaaaatcgctcagttttccaacagaaaaagatacttgaaactcctacagtcaaaatatgaacgtccatactataaactatctgaggcagaacagtgctcccgggcttaggcaattcagaggcagaacagaaaccgggggctttgcagagcacagcagttgtttcaaagggtttagcgacatgacgcagatgcatgcgactgcttcacaccgaaggcttcgcacgcgcccttccacccaacccaaaacatccagaggctccagccacccacagggggcagggccaacgtcggggcagcttcgtaatctcgcagcgcggccagaatttttgggtattttagtttaggtggaggccgcaaagatcagaccaacacgataatagttaaacaagcctgtctagatacaccggcagcgaatgagaaacggcccatgagccgtcgtaagggtggatctgcttgtaacgcatgtcgttcttctcaccaaatttctctcgtgtcggatcgtgctcgccaaagtgcagaggcgtgcccttgcttctcactgtgtgtcttaagactctgaacctgaaggagaaaatgaaaaattaacatgctttgatgatgttctacgtggagcatcgacattggcaatgttgataatgatatactcccttcgtcctataatgtagcaatctaaaatgaaatgagacacatcctaagactacgaatctagacgagaaatatcgatgctccacgtagttctagattgctacattagagcaggtacaatagcagactataaaccagctataaacatatttaaagagataaaggaagagagagaatagtagcgggatacatatctatagccagctgatgcacagactccaagacgtaatatatgtataacaggtgagaccagatattaatagtataggaagcaactattgtatgaattgtctattacattacactggttatagataatttagaactagcagtgagctacaatattaaacctgctcttatgggacggagggagtactgattataacacctaaagtcctgatgcgacgacacatggttcttctttttcctttttctttttctttttcttaggcagcaacttatgtttttctgaagcctgcagatgttacttacacacctgatatactgatactattcagcaatggtggcgatgaaatcatcgtgccatggggacagcaaggcaggcagctagtggccaaacgttcgaaaccacacgccgcggcccttgtcctttgatgcgtgtgcaagggcgactttgccttgcctatcctgctgatgcaccagacagacagcgtctgcctcttggacgacgccaacctcctgtccttccttggccagtctctcgcttgggcctccagcccgcagacaacagatagagaccacgcaatttaacacacacagtcgttttcaccaaaattgtcaacttccgtactctccaatttaagctttggaatagaaacatcagctgagattttgattttagacggatatggctgagaagaatatggaattgcaacattcagccaagaactagcacatatataacttctcaagaatgagcgtgctgcaaagtcaggcgaagttcaactggaagactaccctatatgtacacacaggagaaggaaattgtatcgagcccaacgagatacttagaacgggaaccttccacgtgtgcttgaacgtatgcaagatcacagggcattaagggcaaatgggccaaatcaaaatcagagaaatgttacaagaaataattttacgagtcactaattcggtaatcttgcctcctgcgaaaatgtctgagaatgaaactatctgcatacatggggtacttttgtcgtatgagacctttgatgcacttccagaatgaaaaatcaacttgctcaccatccttcctaactatgaaaagacatcttgagttctcaaattctggatgtaaccctacctgcaaagtagcgctaaaggttagtgtccagttggagtaaacaaataaagaaatcaccatttgtagctcataaccatattcaattcaattttattcaagaaaaaaaacgcaagttatttaatacacgatacaaaagtcaaacaagccaactaaaaaaaactacaacaaaatagtgacatttctattcagaatttttgttaaaaataaacatgctgaagtttgttggtaatcgtgattcatgggactatcaccttgacacatcaattacaaaataaagttaaactacaagctgtatgtctagaagtatattgagagctgtaaatcaaaactttctgtgctcaacactcaacagcaagaagagataaagatgataaaacattatttctttgttcttcagtttcgaaaaaaaaaagaaaaaaaacttgagtgtttcgcctctatgtcttaggagacttccttatatctgagagattacataccgtaaggtagtcaataccgcatccaattttcttctcatattgtgggtgataaggaagcaatcgttccaaaattgccttttcatgttcagggctcagtcgatcaccattttcatacctgcagcagtttcaatatcataccctctcttttactgaattctacaagtgcaatatatatttaacttgcaagaactagtttatgaaagggaatactttcagatgttcaatagacaataaaatataaacaagctgttgcaccttaagtatttcagttctgttgccttacaattatatcttgctgattgtaggcaaagcatggaaccacagtccacatggcatacctaatactataagaaggttgatacggtgaagcaatttctgacttgttatacttcaatagtaagaagccatgataacaaacaacacatgctttttgggaacaatgcaacaacatcgtttcttacattaacacaacatatcaacataattaaacaattcttccacacttaggatgctaaaagtgcatgaatcacggtgaactcattccatccaaaaaatggaaaattatatgacaggcacaaatattgctggcatcattcatgtgttctgtgatgtgtgtgcaactgatcaaagtttcataacacctcgttttatgaatcataaactgttaggaaaaattgcataaggcacgtgacactgatggtaagagaagaaaaatcatattttggctgtctgatatccatagctaattggttgcttgcatgagcatgatacactttaagattattaataaaacaaataagatctgtaaagaaaaggtgccgtactgcttccttgaaggaacatgtgtaatataattgtggcagctacaggcaggtgctaggactgatttatatcagatgatggtctggtgtgatgaaagtagatgaatatgaggaatagccaaatagagatatattgtcatttgagtaaaatacacggctggtccttaaagttgagcgcgggtgtcacttaggtccataatcttgtaaattgcacatctaggtccactatcttgtttaagtgactcattgagatccaaaggacctatgaccgggttgactggcttacgtggctgtcccgcatggcaacatatttgcattccccccctttgcttcctcgtgtctgatccaatcccttcttcgcatgacgcacgccggaacgtgccgacggcgacgtgcgccagcacgcgcacctgcggcacccacccgtctcaacctcgctgcgcctggtgacgcgcctcgtaccccttcggcagccgctcgccggcgttgcgccgcgcccagaggaaccgcacaccgtcgtcgacgggaaggagaagaaggaggggaaggggaaggcccccactcctgccagccgcaggtgcacgcggcaagcggctgcggcaactgctcaagtcgagctcgccctgccgccctgccggcgccgtcgagctcgcaccccgcccgctcgcgccgagcttggcgacacctccccgcacgcacgggcgcggtaggcgaccactcccccgggacgcgggcggcgacaccttccccgtgcgtgccgagctcttcaatgcctctggcgccaatgaccagcgggaagggagaccggtggatctggccgtcagtgaggcgcgagcgccaccggcacgctagctacgaagatggtgacggtgctccgagctcgcccaccatggtcatggcgacggtgctctgcaagctctcctctagttcccttcgccgcccgcaaactgctgccgcattcgcccatcgccgctccgctcgcagcccgccgccgcgcttgcccaccgccgttccgcccgccgcccgttcttcaagaaggatttgagggtggggcggcagggcgcccgctgttgagaaggtgatgctcatctcctgcaccggcaccacggccgacgtgttgtggcaggacggcacattgcggcgcggcgtgccgtccttggagttggtgtcgttcgacatcctcaacaaccacgagttcttcccgggtcagcacgtcgacgttgacaccatggcggtggcaacaacaacgacggcgaggcgcgtcggctttgtcgaggtccacgacggcgcgacgtcctgatcttcgagctcatccaccggtcgcttcgtcccctctaatattgtgtcgttggcaatcatgcgccgcttcgtcgaggtccacgacaacggcgatggaggacgctgatgttggcgaggcgaggccggagaacgtgacaagcgaggcggtgcagccgtggtgcgcgacgaggcgccgcagcagctcggccatcggtatgacgtggccagcgaaggggctggcgatgaggatgacgtgcgatggcgatgggcgaggtgacgacggaggcagccgagggatttggggatttttttggtgcccagggctctactgtagcgcgaaggggatatttgcaaatgagctgtctacgtggaatgcaacgtagacggtcagcttcgatcaaaccgggtttggacctcaatgagtcacttaaacaagatggtggacctagatgtgcaatttacaagattatggacctaagtgacacccgcgctcaactttaaggaccggccgtgtattttactcgtcatttggtacaccaaaatatcaaataatgattttgaactaactcatgcaaaccacaatagagtaaggcagtaaccagtaacatgtggaatgaattacattagaacgaattggcacaaacgaaaaccctaaatataatcagtttactgattagtcatatgaaccctgatacaaggcatatgctttgctgttatgccataattataaaaaattgcacttggtactggtggaaattggtctaattgtgcttggccacttaataattccataatgggatccgcataataagtttagcttgcacaccatatgttcgatgaattgtgtttcgaaggaataatggtctttataatccttgtgccatgtgacaacataataacacatctaaatatgtgaaagcaacaagctttctcaaatgatattaagccacgtcatatgatttatatgagccgttggatgcaacaaaaattcagcccctgccgttggatgcattgtgtaaaagagtctcagtaaaagagagcaaacggtcaagaatattctggataggttaggaagaagggaacgagagggaaagaaatccgctcctgtgccaccagccgtcgcctgcggccgtgccttgccccgccgccacctgcacccagcccgccgtgcgccgcccccgtcagtcccatgcatcgccaccgcctgcaccagcccgccgtgcaccgccgccggcagccctgtgcccctccgccacctgcgcccgtgctgtgcgcttccgccacctgcgcccggcccgccgtgcgccgccgctggccgtgccgtgcgcccgatgttcctgacggcgtgtgctactgcctgctccaaccgtggtactacgccactgctcctctaggtcccatgccggtacagtggcaaggcactggcgaggctgcatactgaatttaggtcttttttctgctgccgtttgagcaatctaacactgcaaggcagtctacatacaacatgcagactttgatttactctttaccagccaataagcaaataaataagtcttagtccatagcaggttagaatttagctgatgacttaagaattcccttccatatgctcaattcctgcatacaatttccaaaaggtgaacaaagaggctgatgatatcctctctaccagatattgtttattcattcaaatagatttgttcactcattttaactttgagttctgggttataaatttcagctggaagtcctcatatgaagtttgggttggagggggagtagtacagtatcatggtcattgatctttttggttcaattctagatgacttaatcaaccactgcaacagaaagttctctcttaaaacagtagttatgcttactgatcaaatggtggctttttctaactgaatattttattctagctgttaatttcaatttgtaacattttcgacttgcttgaaggaacataaagcactggtgattccctccactgtgccctttttgaatcctactgctacgaaggcaacatcttttcttcaattctgttattgccctagaatgagcattttgtttttattgaaaccaacggcaagaggtcaatcttgaatataatattttaacctttagttggaaatacaggtttgtctagacttaactattcttgttctcaggttatacaaatttgcatagattaaaattttaaagcatacaatttcatgatcattataattacgacgcatatctaaatatatacacatggattttataccggaatacaaagtcgtgcaacgcacgactaaatgggtagtgctagtgtgaattacaaatttcatctagaattaaagcgagaagaaaagatagttgcttacttgccggagtgcagaatcatccggacgaagccgacgagcggcacggtgtcctcgaggatgaggtcctcccaatccacccactccctctccgtccccttcctcctcccctcctccggcgtctcatcctcccccgaaccaccacccggcgaggactccgcctcgctcttcctctccgttgaaatgtgttctcttatccccccgttcttatactgcttatcgtgcccttacgccgtttatctgttaacgccctttatcccgtatttggctcctttcttctcccaccctataccccgccatctcttaccgcccctaccgctcccactcccttcttcttcttctgatgtccccggcgcttaatccacttttaaggaaaatagtattacgccgccacgccccctcctacgtttactagctcataggggcttcgcagtttatccggcttcactgcccctaacggctcactttcgctcccggcccctatcctgggcacagcgccgatcttcgtcctttgtgcggatcacaggctgcattcgccctatactcggggttttgctctcgtcccctgcttcaccccgttatcgcctcctcctccgtcttatacccgatcagcttgtaggctcccctccttacaccgggacatttcgccgcg

SEQ ID NO: 5391 - DNA, 939 bp, Oryza sativa
ttccgcctgcacggctggcctttatgccgccgttgttgggcgtctacgtcttcaccgaccggcttgccttcgccgctgccgactggtgtttccgcctgcacggctggcctttatgccgccgttgttgggcgtctacgtcttcaccgaccggcttgccttcgccgctgccgactggtgtttccgcctgcacggctggcctttatgccgccgttgttgggcgtctacgtcttcaccgaccggccgcctcgtccgccgccgactgatgcttccgcctgcacgactggcctattatgccgccgttgttgggcgtctacgtcttcaccgaccggccgcctcgtccgccgccgactggtgcttccgcctgcacggctggcctattatgctgccgttgttgggcgtctacgtcttcaccaaccggccgccgcatccgccactgccgactggtgtttccgcctgcatggctggcctttatgccgccgttgttgggcgtctacgtcttcaccgaccggcttgccttcgccgctgctgactggtgtttccgcctgcacggctggcctttatgccaccgttgttgggcgtcttggcctattatgccgccgctgttgggcgtctacgtcttcaccgaccggccgcctcgtccgccgccgactggtgcttccgcctgcacggctggcctattatgccgtcgttgttgggcgtctacgtcttcaccgaccggcttgccttcgccgctgccgactggtgtttccgcctgcacggctggcctttatgccgccgttgttgggcgtctacgtcttcaccgaccggccgcctcgtccgccgccgactggtgcttccgcctgcacggctgacttattatgccgccgttgttgggtgtctacgtcttcaccgaccggcttgccttcgccgccgccgactggtgtttccgcctgcacggct

SEQ ID NO: 5392 - DNA, 1910 bp, Oryza sativa
  unsure (1)..(1910): unsure at all n locations
ttatttgtattttattgaattctgaagtcttatggtactcccttgtgttactaattctgacatgttcaacaggctgcagtccacataggttgctatagaaatattgagaatatttctggcccctggaagtgtgaactttgcgaagatatttcaccagaagacacttgtgttggtgatcaatcagattgcaatggcacaaacctgtccttagtgcagtgtgatctgtgccatggcacatcaggtgcatttagaaagactgcagatggacagtggattcatgctttctgtgctgaggtatttaaatgagtattatatttggttttcatgtgactcatcttgtgatatctaatatttctaatgctttcttagtggttgttggagactgagtatgtgaggggacaagatagtccagtcaaaggaatggtagtcttctatacccaacattacatttatccctttttcaattttaggaactcataggatcgtctcaactgcgtttattgtttgcacaattagaagctgaggttgtttgtcagtgttggcatatcatcttatattgcatcatcttgatgcttggctatttgatgcatttatcaggaaagtcttgtaaaggacaaagatacttgctgtgtctgccttcatactgttggcgcatgtctaaaggtacatcataatctttgctctttcttctagttcaatgcatgatgaaaccaaccatttggaatcttgataagtttgtctttttctaccattcagtgcaataatggggactgccaaaccacttttcatccttattgtgctagacatgctggtttctacatgaacacaaaaggatctggtggtattttgcaacacaaggcatattgtagcaaacacagcatagagcaaaaggaggtgagtgtattagtttaacatagaaactgttctggaatgatgagcctcttctttcctacctaagatcaggattctctactaatgctgtagataatctttcattatgataggaaatgaaattagtcaattgccttctcattttagcattgtgacacttaaacaaaagaaaggggggtggatgagggttcatataatcctatatccggtttgaaggctttggttgcatattctcattttccttccgatataatcggaaagggagcatgtgatgcatgagtagatggaaatcctgtgttggtacaattattttctgtaatcttattttgttattcgaaattgatgcaggctgatatgcaacagtatggacttgaggagttcaacaacatgaaaagaatgagggttcgtatatatgatgcatttcacttttcctattttgatctgtgatacaatatttttgttcagttactatctaaggtttctaacttccagtgcatcaaatcctgtgttccctcacttcctctttcttctagaggccctgttaatttttttttgtatttctataagtaatatttgtttttgtatttcttttttgtacttcaaacaatccttgaggaaatgtctgaaggatgtccattctcattgaacattgattaaatgatccctcaatccctgatgaaatatttacattacaattttgcaggttgagttggaaaaattgcgactcttgtgcgagaggataattaagagagaaaaggtgaaggtatgtgtggcccctacttatactttttgctttgtttcttaaaattgaactatatgaggaagctactttaagccctgtttggagaaactacctttgaccttgtgttttttcctctttgtgaatcaccttttgtttccttcatattaataggtgaaaatcttgcttgagttactcatttagtactccttccgtttcataatgtaagactttctancattgttcatattcatatagatgttaatgaatctaaacacac

SEQ ID NO: 5393 - DNA, 8887 bp, Oryza sativa
  unsure (1)..(8887): unsure at all n locations
tcggcagcggcgaaggcaagccggtcggtgaagacgtagacgcccaacaacggcggcataaaggccagccgtgcaggcggaaacaccagtgggcagcggacgaggcggccggtcggtgaagacgtagacgcccaacaacggcagcataaaggccagccgtgcaggcggaaacaccagtcggcagcggacgaggcggccggtcggtgaagacgtagacgcccaacaacggcagcataaaggccagccgtgcaggcggaaacaccagtcggcggcggtcgaggcggccggtcggtgaagacgtagacgcccaacaacggcggcataaaggccagccgtgcaggcggaaacaccagtcggcagtggacgaggcggccggtcggtgaagacgtagacgcccaacaacggcagcataataggccagccgtgcaggcggaaacaccagtcggcggcggtcgaggcgagccggtggtgacgttctgactgatccattcctggagcgtaagagataagcttaaagccatgaatcccttttatgcatatctggatctggatcctttgtaatattccccttggtgatggcagaagtggccaatgtgggaacaaagtcgtccatcaataacaatgaagacaccagtcggcggcgacgaaggcggtcgacggtgaaagcgaagatgcccactaatggcggcataataggtcagccgtgtaagcggaaacaccagtcgacggcaacgaaggtgagccaacggtgaggacgtagacgtccaacaacggcggcataataggtcagccgtgtaggcggaggcaccactcggcggcgacggaggcaggccggcggtgaagtcgtagacgcccaacagcggcggcataataggccagccgtgtaggcggaggcaccactcggcggcgacggaggcaggccggcggtgaagtcgtagacgcccaacagcggcggcataataggccagccgtgtaggcggaggcaccactcggcggcgacggaggcaggccggcggtgaagtcgtagacgcccaacagcgtcggcataataggccagccgtgtaggcggaggcaccaatcggcggcgacggaggcaggccggcggtgaagtcgtagacgcccaacagcggcggcataataggcatgccgtgtaggcggaggcaccaatcggcggcgacggaggcaggccggcggtgaagatgacgatgcccatcaacggtggtgtgaccaaccgaccgtataggcggggacaccagtcggcggcgacggaggcaggccggcggtgaagtcgtagacgcccaacagcggcggcataataggctagccgtgtaggcagaaacaccagtcggcggcggcgaaggccagccggtcggcgaagacgtggacgcccatgaacggtggtatgaccaaccaaccgtataggcgaggacaccactcggcggcgacggaggcaggccggtggtgaagtcgtagacgcccaacagcggcggcataataggccagccgtgtaggcggaggcaccactcggcggcgacggaggcaggccggcggtgaagtcgtagacgcccaacagcggcggcataataggccagccgtgtaggcggaggcaccactcggcggcgacggaggcaggccggcggtgaagtcgtagacgcccaacagcgacggcataataggccagccgtgtaggcggaggcaccactcggcggcgacggaggcaggccggcggtgaagtcgtagacgcccaacagcggcggcataatagaccagccgtgtaggcggaggcaccactcggcggcgacggaggcaggccggcggtgaagtcgtagacgcccaacagcggcggcataataggccagccgtgtaggcggaggcaccactcggcggcgacggaggcaggccggcggtgaagtcgtagacgcccaacagcggcggcataataggccagccgtgtaggcggaggcaccaatcggcggcgacggaggctggccggcggtgaagatgacgatgcccatcaacggtggtgtgaccaaccgaccgtataggcggggacaccagtcggcggcgacggaggcaggccggnnnnnnnnnnnnnnnnnnnnnnngcaacggcagcggcgcacaccaaccgtggaggcgatgaaaccaatcggcagcgacgaaggcggccggcggtacatgtataaaataatagatcaaataataattagtgatctgtgaattaattctaatttatataagaaaatttagaacgataaacctggtttgtgatccaactttgattcgaggcctgtcaatggatgaaccgtagcatgcagccgtgtcatgcagccgtgtagacatgtaatcgtcggtagcacatgcacggattagtttggagaccactttgtgcatgtaatagctgatttgtgtatggattaatttccttgaccacagatttgaccaggtatatttaatttgtatcctggactttgtgtcttgccgtacgtatccgagtagtattgacttggtgatgtacaggctcaaccaacggtgatcttcgcatgattttggcggcggctgcttgctgattgcttcaaatcatgccctggtgacgaaaccgacggaccaacagatatggcagcattgtagcgacggatttgatctcactgacggaggtaaaattgacggtaacaagctggttgtagatcgattcgatcggtgattaatctcctggttgattgaccagatccagatagaatttttggcgacgaagaccctgcccttttgttgagaggatcacggccaaagacaagagtagcaccgatgatgccagcacaaagttccatcgcacttctcgacggaaaactcgacgcagcccctacctggcgcgccaactgtcgaaacatgaattcggcaataataaaaggggtagcgcacgagacctaaaagtggatggatgcggagacaaaggatttagacaggttcaggccctctcaatgagaggtaataccctactcctgtttggggatttgaatccgccgagtgtgtattaatctgacgatcaggttgtctcatgccccctagagggcttcctgcccaccttatgatggggggcaggattacaagatagaaaccttaaccaacacggtatcggtctactttacaatcttatcaaaccaggactttaggctgttccgtaatatataaggaaacgtaatacccgagtcatgatctattacatattccatagatataagttatcccctatgactagtcggataaccatgccgtatgggtatggggtacccataatatccacacgtggcgagacaccatttccgggcgcccgagcgaggcgtcaacgatggccaactgccggcgagcgcgaggcggcggtcggacgaatctcgtgttcctttcgctccgtggtggcgcgtcctaccgcggtactcgctacctcccaaaatataatgattttaaactataataaggtctctaaaatataaaatattagtttgactaccaatatctgtaaaactagtattgtaaaactagtattttaaggtaaaaaaattacatattataatagtttgtttaatgataaatctaataccatcaattttacatgattgatcttttttaaatttttttactattaataattaaagtttaaattttttgactttttttgcggtggttaaattttttgacttgctactctgctacaaaataattagtatattttaagacggaggtgtacttgatacgtaccacgacaccggggcagttggtcccccaatcacggccgtttgcttacccgataaggaaaaagagttgggaggagacacaactcgcccatgcactgcacagagagcggctggttggtcaccacggtagcgtacacgaacacggtcgatcgggagacgacagacgagacgccatgcatgttcgcggccgctcgccggccggtgttagcggtggccggtgaccgggtgtctgaaatcctatccgatctccttgggaaccggagccccatgcgcgaacatgagcatcacaacgtctgaacatgacgggaacgtggctggggtccgtcccttcccttcgcagcccgaaatgcgcaacgtgctgcagatcagtggttgattactccatgcttgtttatgtgcaccaccggggaccagtgagtagatcacgtgttaatcggccgcacacactgacgggatagtgccgtactagaatcatcggcactggtgtacgaagcgctactgtagtagttgccgcttttcaccgatggataccagggaaatccaacgtgcaatctgccgcgaggtttaccgggcggcgggcggcgaggtcggcaaattttgcccgagacgcgggcagtcggcagtgtggccaactccgcgtgaatttcttttgcccactcgggggaggtttgcttccgcgatttcgcctccgatcctgcagttgcttggcttgagcggccacttctccgctccgcttgctgctgtggcctgtggcatgtccgcgctgtatgtgcagcgtcagcgcggctcgcgcaacacgcgtctgttgcgtactatctccccaccttgttggttgatggccacatctcacgccttccagtctcgccggtgtcctggtgtgccctgctgacccaatgaacgcacagtagcatcgttttgctcatcgaagagccgaagatatgtccaggcagctacagattgtctatttgtctactttttcttttgaaagagaattactaaatgtcaattaaaaaaaatctatctttgcctgtgagcattgctagtggccggtgtctactagctagccaagagccaaaaatgggtgatccaatagctgtaggacactgcgccgaccggagcccatctcccacagattccagtcgattcctcttatcgtctcctattatttttttcccacgagaattcagatggtatcgacaatatcctagagtaggctccgtcctcgtgcaccaattattcatgcacgcaataataatttgaatagtgcaactatgattaattggaaggattagcttgttgccctacgcaacgcacaaccccaaacccaactgacggggttaatatctatcaccagcacgactaatgacatgtcaattaaactttgattatccgagtcatcatcgaatggctttcttatctcgcaactcgcacattgctttttcagtgacccaaagggagctctcacaaagtcccaaaaggaaagcatttgactctgagttagtgcgagccacgttttgccatttttctgattgcaagatgctttcccttcctgactgacccaggagagcttcaccgattgctaagcaacaaccctgtagcttcgtcttatggattttctttttctgtaatcacatgggggtatggacttgtagctggtgaagtagataagctgcttaccagataagatacttcacgagaaaacagtattatattaaaacagatactttcacgagaacatgaaggcaattgtgactgactggctatatatactccaggatgaacccattatactatccctccatctcaaacaatagagcgtatttttgttttgttaggacagggaatactctattatgatataattctcacaaaattaatatgctttgcacgactgatcattgttttacatggcattgatccacaggtaaagtatgtatgaagaaaagaagctatgtatcaacagctcattcatgtttctgtgcccactgagatcaccacctcaccgtcagtcccatgatcccatcctgaaacttggacaggcttaacaacagtcagtcagcagaaggcagtgacgtgaagccgtcaactgggcaagagaaaaatcaccatctagatcatggcgtccaagcaaggtagaccgcagacatctctcttcaaaactgatgccccgcacattcctggcggctacacactgaggagaacatcaccctcgtcgaccatgttcatatgcaaagagctcctagatctggtgcaactttagaatcgtgatcccggatggctggtgtttcatcttgttctttcttcttttgcttcttccccttctggcctttcccttggccacctttggtcctgatagtaaagcacattaagcagatagtattagtacataacacttccagcattgtgttaaacatgcaatgcaactaacctccctagtgaaaaaggaaatagtaatcaggtcggtgactttaaggcatatgggataagtgcatattttgcagcaatactgttaaggtttcataggccagatacaacagcagcaatgcactatgcaaatacgctggaaatattgatttcaccccccaaaaattccatttgaaagaatgcttacaatgcgaacagcaggacataagttcagttgtagaatagaatatggtaaaagacaaacaaaaggacagaaacattataaaggggattagctatatttaagacaccacattttccaccaaaaaacaaaaaaaaattaaaaccaaatctcaatacttacaccatattttttgcagcacacactatataagagaattaggatgaaaacaattaattacctacttgaaagaggagatagtagagcgaaacatacttacataggagtataaaagaatggtagcaatccgaatgggaaaaaaatgactgaaatcaagtcaaaaatgtggcgccatatttttagcaaaaccattataaagccatactttggaggttctctcgatggtgcagttgtttttggaggttctctcgatgctacagttgtggctaaattacaagaaggcttgtgcttcctagcagatccacaagagcattccttggtttttgactttccctgtgcaaaagaataaagggataattcctatttattccttccaacatagtattttaacaaggcaattcaatgtttggaaactattaagagtcgtccacatgatagttacctttttagaatgtgaactgttgtgtttctgagctgtttcgcctttgctagaacagtccttttcttctttcttgtgttcatccagttgactctcatcctgcttcatgctaagctcatcctctatggtctgtacatactctgctgatccaggtaatatacacaataaaggaaatgagttcagtgcatggccaatgtaaaacaaatattacttgaacaggtatgagaaattggatattaattgaaacagttaatgccctcagtttacaaaatgaactacttgtgcttctaaaatagtggtctccaacaataaccagccaaacaaaaatgttacctcctacagggtggttagatagcacactaactcttagtacagatatacctcctacagggtatgatattgacctttggcaattgcagaggaactgaacatggaaaacacccagcacagcaactggtatgggctgtttggtgggagcttaaaattctgagaaacagctagttggtaaccggcatctagttcattttctggattctatagctaagaatctggattgtttgagagagctgaaaattctgggagaagctgcagtagctagaagctctccaacaaggccgtagtcttacttgagctttctataacaccgttcatgcttcttggtactgttatcatattttgatgatcttaaaaataaccagtaaatggtaaatatcatattagtgaggcataaacccaaaatgccatgagcacaacacccagtataggttttacctactagatttatgctactgaattgaggggtgtgcatgaaacgcttgctcaggtgaggcagctcatgtttggcaagaatatgaataggattaaacaatgaaaactcaatctatggaatcccagaagtactccaaatttcaccataaatttcattaattgtcataagctgaagtcctcaagaaagataaggatgagattcattcatagggacagccactttagacttcagaataatcaaatgtttaccatcacatgcatagtccagataaggatctccatccgcatcatcagaacccagtattagttgctcagctaacatgtactctatagcagcatcaatgtcaccatccatgtctttcaaaacctatgtgatgtggcattgaccattaatatataatgactgattggctgctacggtcagcctaggctcgcagttgcaatacaagaaagtcgatttgttgtataattcatacctgttcaactgcagcgatattagaacatccagttccagccatcaccaatttaaccgatatatgatcatactttgatctgtctgaagatttcttcaggtcctttgcttttgtttgagcattattgcttgtgctagctacattggcatctgcctgtaatttcataacggataaaattaagattagtaacagagcaagttgagctacaacaggatctcactgtccttccagggacacaaaacaaccaacagtttacaatttggacagtgagaaaccttgataataactggcattgcaggaccttgacatggatcttccctcagtctgacactattgtagtgctcaccctgatgatacgatctatattggaatcaaaacaaaggaacatgagaatgtatgtccttttactgccagtattagcatattagtttaaaacagcagaacacacattaacttacaaatgaatcatactggtagcttcacgatcagaaaagtttcttatgtaccatcgtggtgagttaagctgcaaatcattcagtaatggtacaggcatcaatcaaatgttacagtacgttctcttctatagaagaaaggctataatatgaaaatgagtacgaaaaataacagagaaccatcaggggatatataagcagcacattgatctatatcacccatgtgtttcaaaatacagact

SEQ ID NO: 5394 - DNA, 13765 bp, Oryza sativa
ctcacctaaccacatttattgcggttgggctgagcgtgtcacgccgtatgtaacgcagtgcagtgcactcgtttatccggtctatgaccagtcacagaccggtcagatcgcgggttaggtggcgacaggcgatctgacgcacacctcgccccatcccgtcaggacgagggcttctaggcgctcgtccccagctggagctagcgtgttacctcccagagatggcacgttagtcctggtcagatatatgccaggcttcatcctaaccattacaggcaagatgttgtgtgaagaagggcgagcatgtaggttgctaagctgacacgtggtggacaagaatgaccgacgtgactggtctgataccggtcatgtcgtcagcagacaaccacgattccacgtcgcgcctgcttccggcggaagtggaggtaggtatgggccgtcccatcaaaaggtcattcggacggcaaccatacaagtctccgtctgtttatgaaaaggtggggtaagtccccacaaaaaagagagaaatggtgcatgtggtatccccttaagatataaaaggaggaccttgcccactgagatgagggagtagactggacttttccagattagaaacccagaacaagggagaggctggctgatactttgtagctccttcatacacagatctcccaaaacacaggagtagggtattacgcttctcagcggcccgaacctgtatacatcgcccgtgtcttgtgtgtttcctgtctcgcgagccttccacatacagagagcttagaatctctccctgagtccccggccgaaccggcaaaggggggcctgcgcggtctcccggtgaggagccccacgctccgtcaccaggtgtcgggtttttccaagtcttttgtaaaacccaagttttaccgatcgttggatattttaaatttgaggggaggacttcgacatgcgtgtccaaaggcccgtacatcgaagtacagcagtcgacaaatgaggtttaagtgttcaattattcaaggagggtaattgcagcaattaggattagggccggtaggctatctcgcaagccgcggccaaatttcttgtgttaatcctatccatgcattatttgcggaaaagaaatacttagatttaaattataggtgcaagatgatcaaaggtgacttgccttgctcgagatcttgagcttgatcctcgaaatccgcgcactccgggtcttcgggcttcgaagctacacgcgaacgagacgactcaacaaacggcggaattaaagccctattattgacctctaagcgtgccattagatagatctcgagatttgaggatttttggaagttgaacggagtcaaacggatgtacggttgagaagatattgaatttctaagattattggatttttggtctaaagaaaaaaggatttaattaaacccctttttggaaaagaaaagagggagggagggagattgaactttcctcgggcggctagggcgcggcttgagagaaatgggcaactcggccgcgctaaatgggccggccggcccgagagagcatggcccattagggcgcgcgggaggaaaggggagagagagccggtggtccgggctcacctcgcgtggtcccgagtgggacccgcttgtcggcggctcggctcaccaagagcgaggtgcatgcggcgcgacactagggttggggggtgggtgcggtgcacgcgtgtggctcgcggtggacgcggcgcgcgggtggcccacgcgcagcctcttggctctccgtgggccgcgcgcacgcgagcagggacggaaggattggctgaccggggtcagcttgacccggtccggccgagctagctctgacgtggcgccttcgtggctgccacgcgggctggcgggaggaagacaaaggcgctggctgctaatggacggcgggcggcggcggtttctccgggacaccgtgcgacgacgagggcgacggggtgtacaccggaatgacaaggggaaaagagagggagcgagccaacggctcggattcacctgagggggttcgacggcggcggattgtggcggcggcaaccggtggcgagaaagggggatatcggcgacggcgtgacgggagatcgattcggattggacggaacatcgccgaggaagtccggcgacgggcggctactaccgagcgcggcggtgacggcggcgagcctactgcgagcggcggcaacggtcagggcggcgcaggctagctacggggagactacacaagctactgctcgagtctgaggggaggaggaagagcgaggagggagaacgggaaggtgttctaccgagacgagacgggcgctgtgacgagaggccgacggcacgagagtgatctctccggcctcgggccggggaagaggaagaagacgagcgcccggagtccccttcacgcgtccttcgcacacaccggctctcccggtgctttggcgacaaacggcggaggtgcaagcagggcggagcgacgatggcgcggcaggcgcgggctcaggcgcggtaggtgctgatggcggcggcgactagccggtcggccaccacggcgcgcgcgcgggaagcaacgggtggcacggcgatttgagcggcgtcggcgggagcggcatcgagagggagcgagagcagagagaggggggaaagaaagagagagagcgagctctctcttgctcagggctcgagcggcgcacgtgcctcgcacgtgcgggcaaggatggaggggagaggagagatgggctgagaggaaatggccggggagaagagatcggcccacgaactcgagggaggcaaaatagactttttcgagaagatttgattcgggacagattgaggttagggtttggattcgacgatggattggggatttgagatctggaatggcacggacactggacaacaaacaaagaaacaattttcgcatttaggatttttaagagatagttttcccactaggcgccacgacgggacggacgctacaggtgcaaagttgtaaactcagattctctgctgagaagaatcttgacacttcaatagtactaccatacctagttaagctttgttgcctgatgggtgttactttattcgttgctgcttagtatccccctattgtttgacatttctacggttcttgcttttctgtagagtctgtactaataccactccatttgttgggcttgttctgttcttttgtgagacaaacctgtactagcactactattatatctgctgagctactgaatcactgatgtactttgcaaacatctcttagatcaagggagcttaggtagacataattaagctgtatcatgagacctaacagtctaacaaagcaacgaaaacctttagtagaaatagcaactagtgctggggagaataattctactttggggaagcccagcacgcatggaaccctggaagtggatagtatgatactccagcatgcagtttcccttttcttgccttccgtgttggtccaggaatcgcccaatttggcgttttatattgaaccatttggtctctcttttccattacgaggagagggatcaagttgtgcccaatgggcagcgaagaatgatcatgtaaagactcttctctggtttctaacttcctatggcttcttggttaactctcctcttgctgtaagcatgcagtgagcctgacgcttcaaaagatgcttaaatcttgggcacactagtagtaggctattggtgatttggaatgtacaagattcttgttatggggtgatctacaactataatggtgtgagtacttgtgcctacgtttgacccttcctagtttgtggtcgcaggaatgcaagttgaagaacctgaaaaatgcatgcagtacggaacaatcgaaatgctggctgctttatttccaggaattgagacttgtggagtcggaaagcaggtgttcatgattttacgtacaatttttaagtagtttctgttctcttatgctggtaacttggttggggtccgattgtattttgcagtggcagtcgtacatgtactcaattgttatgttcaacccatcatgcataatactagtagtatatgcaactattcaaacccccatttaaatacagggaacattttctgatttttgtaggaaccgaaccttttcaaaatagtttttaaaattctttctaggagaattaacatttcctgtgttttgataatggcagcagcctacctaaactttagtcctgttttcatcacagtcagccaccatgcaatgatagacataaaactataccttaaatcagtcaactataccttaaacttaggaagagaagttgccaagcctgtgggagcctcagtgcgtgtccagagaataatttctttcactttctttaactaattttgctactactcctgccatagatagcaaccccggacgtgcacccaaccaacctacacttaccagccgcattggatgccgttgctccccacacacaccgaaccaacggtgagcatgtgacctcagggtgggccataccctgacgctgccaactggaagattttggccaaaaaccgtgtttcctccattgttaattaccctgaggtgacatggcaaccataagtttttgctatgggtacatggaccaatctgcgtcttattgttttggttttattctgggaaaggtcaggctggttttttaagggctggaatgacaacgataatgatatccataggagtatgataagtaggcgtgagataagatatgacgttttaagtttccatcaactatatattatcttgtagatttgtcgagatgatagtgaacggaaggtttttctttttttctagtgctgttatcatttgttgtcataaccatgttcacatgttatgtcagtaaagtgtattataaatactatagtttaggagaaaagtaaacttaactataaaaagatattttttatagtcactcctacagtcatgcatatcaagttgcgccattattcgtttgtctgatactttcttcggaacaaaacaatcatttgttacagcacaacaccaaaccaccctcggtcatgataatgctagctctttatcgacagcacctctagaacagcaatatgtatttgatcgatagatcgagattctatgtacgaattggtccccctccttaattaaaaccaaccaaaaaaatcagctcatacaagattaacctatgggaaatttgctattggtaaaaccaaattatatttctcctttttctcagttttctctcctatatggtccccaccttgcagttatataatcggtgctccagatgtaggcatacaaaattgcaataaagaatggttttgtaggcgtcgcttggaacaaggaggaggattaaagaacatcccccagttggaatgatgcagtcgaggggggcagcagcggaagcgacggcggggaggagccgaggaggctgcaggcgcagcgagcagcagcagcttcttcgctcggcggaggcaccgagggaggaggcgcgtggtagccatgcttctcccctcatcgtcttcttattcctacgcctccaaaggtcataatccaaacctttctcttctcccttcctagacgatgtagcagtagctatacccctgatcttgtgcaagtgctgagaccactgggtaatcttggtttcttggagcatatgtttgtttgctgatcttgtgcaagtgctgagaccactgggtaatcttggtttcttggagcatatgtttgtttgagtgcgtgttcttgatctccaatctcctgggtagtttgtcatgcttgacttttcgtagtcaaagaacgattcttttataggattgtaatggagcatattcttgatgccgaggcttattacgcttagtgtttgtggatttgactggatgcatgtcgttttggcacaaagattgattgagtatggagattgttgactagtcgtgtgtggcttgtaaggctactattggatgtctttggggctctagggaggatctctcaagtctcagtgtcagactcgatggcagcagttgttgtcatgcatgttcttgggaatttagatcatatatcatcatcatataagcttgtgtttatcacttgatgtgggaacatttctagtgctgcctttctctcgaccatatttgaggacgagtgatgtgttgatgactgatgaagtgatgatatactcggactatagaaattcagtccacctattctgtgtgttcctatagataatttcctgctggttaatactctttatatttgttgtatctttaggttgtgttgtatggatttatttggtatattttgcttcggttgtattttcccagtgctattcatatacagtacatgacagtcttgcttttttttttctgaaggaagtttttggtttgttgatctttgtctacaaaacatagctaaatatgggacaaaggaactgtatttttccgacttttaagaattaaaatgacagatcaatgaaatcttgtgtgttttagctctgccaattagctaaacttgggtcatatctgaggcttactcgaggaaaacaccaagatagacattatgaacttggcagttggcacattgaacaaacagttcattttgtggcacgtgcatttattatctagcatattagatgagtttattagtttcaattaagacatcaattagaaagattggaggaatattatttctttggcaagcatcttcttcaatgttagcataagtacaacctctagttacaaagaaacaatgctgccctcaaacatttttgtgttagaccattcattttaactattctttttttgaaaccgatcattttaactattctctccgtcccaaaatttagcgactagtcctaggttgctatattttgggatggagggagtagaattttcttgacctttttgagagtccaaagcactcactaaactcagaatgtaccacattcaagccctggtgaagcacatgtgcaaatttccacactgaaacatgcacaaatatgtatccatgtgtgcttcttaaattggacaacatcaacacttgtagtacctagcagtcgggccatttcagaaagtagaaaattttattttgttttgtttgcctaaacgtagtaaataagaagcttgttgataaacgcaagattcatgtcctgtcctggctgattcactaaacagatagtagtatcttcaagaagcaactaaatatgtattcctgaaaaactaggtagaagggacaagatattgacataaatttgtggaggtaaatttaaaacattgcttgctacgcatgagtgatacctgcttataagcataagcaataatttgaattgaaaacttaattttcgagttgattttggtatattttcatcatactagtttattttacagcatttgcctttatatcactaagaacacatatataaaagttttacccataaattattttttaatcactaataaaccgtttcacttataataagtataagcgaaacgacgaggctgctaaattctacacaagtactgaatctaaactttctgaggatgttattctcttttgttgtttatctggtttggataatgccaggatacttcctgtgtttcctcatgattccttttgtaatttatcaacctacactacattttcctgctgtcaccaggtgactccttcaggagaactgttgatggtcctatgaggtcaacgttgacttttgataataatcattctgtagtgccaagtcaaaacattgattacggccagccaatggtaagatatgctaatggagccaacattagatctggcaaagtcagctcatcctattctttataagtaaccgtgcatctgattattttctgtatatttcacaggcttgcatttcatacccatacaacgattctggttcaggagtttgggcatcctacagttcacgctcggtggtatgttcttctaacaagttctctctcaattctctcaaggtcttcaaacttttgcagaggaagctaacaaactagtagtaacattttttttatcaacatatgtaattataagggtataattcatgcatccaggtcctgcttaggagatcccattatttatctatgatcagtccagcctgatttgatttagtctagaggcttaaaatatgtcacttttcccatttgtcgtaaagaaactgcctggttttgcataaaaatggattgagtcatcaacgtaacctcaacagggtagtatgtctgaagctctttatatagcacaaaaagattacctttgagcattattttaggttttgccaacctcacctgtaaatggtgtaggttgatgcattaaattaaactagtgagaagacataactaatgtctatttgagtaatgcagtcacatgcagttcataattcttaagaactagtactagatatacgtgagtttattcactagatcaatattattcagggagaacatgtagtagttatgcaaaccatgtgcacacacatctcttggggcatccagcttatttttatctatattttcatgggtcttgcctaatcagttgtacttaaaacagttccatcctcaaattgtgggaggaggcacatcgccaagagttcccttgccctccctggagatagcagatgatgggcccatatatgtcaatcccaaacaatatcatggaattcttcgcagaagacaactgcgtgctaagttagaggcccagaataagctcgtcaaaacccgaaaggttcttgccactgccaactgatccattgatgtttttaccttccattgccatctccttgtgcatcttgcattaaccttttaatattgttaaccactctgcttggcttaatattgtaaacaatctccatgtgcagccttaccttcacgaatctcggcatcgccatgcaatgaagagggctaggggcactggtgggcgattcctgaataccaagcagctccagctgcagcaacagtctcacactacctccaccaagaccaccacagacagccaaaattcttcaggttcagtccatctacggctaggtggtggcgcaatcggagatcaaactccatttccgttcaaagcaatggattcacaagctaacatcaagagagctgcagcttctgcttccaccttcactgtaacttctgcggcacagaaagacgacgccttcttcgaccgccatggccaccatctcagtagcttctccggccattttggccaggcaagcgcacaaggtggcgtcggcagcatgcataacgggtcacagcagagggttcctgctatgagatgagatgaagagcagcttgcaaatcatcatcatatatggtgtggtctggtccctccttaggcaattcatccttggcttaagtttcatggcttgtttaggacttcagagacgcttcatagtgctgtgcttttgcagcccataagtctgggcttaattgtgatgtgtaatatccatgtattggtgtgatgaagttgtccctgtttgaataaactctttgtctgttggttatacaatgtgttgcaaaactttacagtagtgttgtgcaatgtgcattaggacaaggtctgaaatgcccctcatttttgtgaatcacaaagggtaggatggaaaccggaaaattgtgtcaaaattaacatattggaaatctaggacatgtatatgttgtactaggtggtgttccaactaatttcagcttactatactgtatgatggagggagtagttatttgggacaaatttaaattctaagggcttactcggatcacaggattgtaaaaatataggaatagggaaatcatagtaatatgataggaatgtatgtgtaaaatagatgattgaaaaacacgggaattttatagatatgattggtaaacatgtgttatgtgttcggatagacattggaaaaacataggaaaataaaaaaataaggtaggagtgaatgcaaattttcttttgtttctctattgattccacaggaaaggaattttttcctccgatttttctttgggtcaattcgtgtgaaccgaacaacaggaaacaaaatatttcctacctacagtatttctttgaaaatcctataaaaatccctcgatccgaagaggctccaaaaaaagagctataatttgagacaggaaagtacgtttggtgtattccacaagaccacaactggcttgctgcctgcatgcgcatgaagaaaatatcgctgtctaattgcaagttattcggtgtcaatcctagaaataaaggcgattaaattccatgaatgaaaaatcacacgagttaaacccattccaaaaatcaataagcacagcacacacgctataaaagaaaaccaacattatgtaaaatcgtcaaaaaaaaattccggtaaaaaaaaacattatgtaaaatgaaacattcctctttttcttgattcatcattctcggtaaaatcagagatgaagaacagccacgtattagcgctgctcctcgcctctgtccttctggtgtcaatgtcatcctcaggtaacaatgtaacataggaacactcctctctatctcgctgcagtttgcattttgcaatgaatgttaggaaacgataggcgaacaaacgataaaaaacaatagatcaatcacaaaagacacgagatttaacgtggaaaaccctcccaaaacaggagagaaaaaaccacgggcaatccacgtgataacccacgtgagatcgtgggcattggctccgttcagatcaagactcatgatggcatgacacgcacgctaaaagatgtgagacacataccagggatagcgagaaatctcatctctctcagcacacttgatgcagaaggatacaaatactctggttcaggtggagttgtaaaggtatcgaaaggttctcttgtttacatgattggtgatatgaattctgcaaacttatatgtccttagaggaagtacattacatggttctgttaccgctgctgctgttactaaagatgaacctagtaagactaacctgtggcacatgcgtcttggacatatgagtgaacttggtatggcagaattgatgaagaggaacttgctggatggctgcactcagggtaacatgaagttctgtgagcactgtgtttttggtaagcataagagggtaaaattcaatacctcagttcatcgcaccaaaggtatacttgattatgtacatgctgatttgtgggggccttctcgtaagccctctcttggtggtgctcgttatatgcttaccattattgatgattactctagaaaagtgtggccttatttcctgaaacataaagatgatacatttgctgcttttaaggagtggaaagttatgatagaaaggcaaactgaaagggaggtaaaagtacttcgcactgacaatggtggtgaattttgttcggatgcttttgatgattactgcaggaaggaaggcatcgttaggcatcacatcatcccgtacactccacagcagaatggtgtagctgagcgcatgaacagaaccatcatctccaagtctcgttgcatgctgtccaacgctcgcatgaacaagcgtttttgggcagaggctgctaacactgcctgctacttgatcaacaggtcgccttctatcccacttaataagaaaactcccattgaggtatggtctggtatgcctgcgtttttggatgcactgcttatgctcatgttgataatggaaaattagagcctagagctattaagtgtctatttcttggttatggttcaggagtaaaaggatataagttatggaatcctgaaactaacaagaccttcatgagcaggagtgttgttttcaatgaatctgttatgtttaatgatagcttgcccacagatgtcataccaggtggttcagatgaggagcagcaatatgttagcgtgcaggtggagcacgtggatgatcatgaaactgaaattgttggtaatgatgttaataatactgttcagcactcacctcctgttttgcagcacaagatgaacctattgcccatcgcagaacaaagaggagttgtggagctccagtccgttttattgaggaatgtgatatggtttattatgcttttacttgtgctgaacaagtggagaatactcttgagccagccacatacactgaagctgttgtttctggagaccgtgagaagtggatctcagctatgcaggaggagatgcagtctcttgagaagaatggcacatgggagcttgtgcacttgccaaaacagaagaagcctgttcgttgtaaatggatcttcaagagaaaggagggtttatctcctagcgagcctccgaggtttaaggcaaggttagtagcaaaatgtttcagtcaaattgctggtgttgattataatgatgtgttctctccagttgtaaagcatagttcaattcgcacattcttcagtattgttgctatgtatgatcttgagcttgagcagttagatgtgaagacaacatttttacatggagagcttgaggaggagatatacatggaccagccagaagggttcatagtacctggtaaggaggattatgtttgcaagttgaaaagatctttgtatggtttgaaacagtctcctcgtcaatggtataaaaggtttgattcatttatgttgtcacatggctttaagaggtctgaatttgacagctgtgtgtatattaaatttgttaatggatcacctatatacttgctgttatatattgatgatatgctgattgctgccaagagcaaggaacaaatcactacattgaagaaacagttgagtagtgagtttgatatgaaggatcttggtgctgctaagaaaattctaggtatggaaatcactagagacagaaattctggtttgttatttcttagtcagcaaagctacattaagaaggttcttcagcgttttaacatgcatgatgcaaagcctgttagcactcctattacacctcattttaaattatcagctttacaatgtgctagtactgatgaggatgtagaatacatgtctagagttccatattctagtgctgttggttctttgatgtatgccatggtttgctcccggccagatttatctcatgctatgagtttggttagtagatacatggctaatcctggtaaagaacactggaaagctgttcagtggattttcaggtacctcagaggcacagctgatgcttgcttgaagtttggcaggactgataaggggcttgttggatatgtggattctgattttgctgtagatttggataagagaaggtcactcacaggttatgtgtttaccattggtagttgtgctgtgagttggaaggcaacattgcagcctgttgttgcccagtctaccactgaagcagaatacatggctattgctgaagcatgtaaagaatcagttggctgaagggattgtttgctgagctttgtggagttgattcttgcattaacttgttttgtgacagtcaaagtgctatatgcctcaccaaagatcagatgtttcatgagaggacaaagcacattgatatcaagtaccattatgttcgcgatgtagtcgtgcaaggtaagctaaaggtatgcaagataagtactcatgataatcctgctgatataatgacaaagcctgttcctgttgctaagtttgagttttgctcaagcttagttggtatagtggtttagcccgagaggctatttggcgccgaaagtgttttttttgtctttgttgtgttcagggtgaaggattgattcatgctacaagaaggaatttgtctcaaggtggagtttgttga

SEQ ID NO: 5395 - DNA, 4423 bp, Oryza sativa
tcattaatttacaaagctttttagatatgattttcgcgagtttcaaacacttagctcgttttcacatgatatttcccctatacaatgacaaataatgatttggctaatttactacataaacattttgaacctgaaaaactttgagagactctcatctgacgcatttgaaaaatcttcaagagcggcctgaaatgcagggtaaaaattaaagataaatagtacatgaaaaggaatgtgttgatttagcagtgaattacgtacaaaccttcgagtcatttttctgagtaatgattttaagccagcaaagtactggcaatcgagataggttccaacagaattctgatgaaagtatgcagcccaatgattcaaagagagagatccactggagtataaaggtaattgagccgtggaatcaatcgttgcaagtaagaatatacatgcaagtagcctgcaaacctgaaccaagagagttggatttcaacacaagaaccatcaacagtaaaacatatacttgaagacggaaggaaactatagcctgaactcagcaggcactcagagatgataaaattaagaatatgcaatgagcatttaaaacattatactgcatggaaacatgactaaaggaaatcacagacctcctgaaaaagtgagggattctctctggacagcacaaaagctttcagcaaccaaggaacaacatcagacatttgtacactgcagaagcggcagcatatgtccctgaagacagatgaaatgaaaacaacttacacaagtttcacgaagcgctacaattgcaatgtggatatgtgactgatactatagcaagacaatgaaataaccttgactgttctgaaaggaagcccttgagcaaaaacaaactcatactatataatatttctgccctctctgaaataagaaaatcaccagtgctctgatccatgattagtccaaataaattatgctcataagttctataacaatcctgaggaagggatctaaagtacaacaatgatatgcactgccaatagatattatgaattttatgagctccatgcaatcctccatgagcacccaaggcttttgctgtaaaatacaacactcagaagtgagaaaaaaaaactatatgaatatattatataggaatttagtaatgaataaaattcaatcagacttcttaaacaaaaggactatatctgtcaccatcacatgattcaatgcatttcacagtagcaaaagatcatttgatgttcacccgtaacaatctcttcgaatgtataaataaacttaactttatatgaatatcatttggagctaaaagaggatttcccatctcatatgtgtaaaccaacagcatttcacagaaataactgcactcctgctgttcaacagagaactgctcaaaagccaggtatacaaaattgaaaaactggactggtccatgggtcttccataataaaggtatcctcttgaatgttatagcatgttactaaaaaataatagtaaataaatgattaaacatgaaatatatcgaaaataaactagcaaaaacctgaaaacatacacgtaatttatgcgcaaattgtgaagcccttagttgcgcacatgttattacgtcaagtgtgcaatttatttgtttaacacacataataaggagcataaatagagaaaagtacctatttttaacaggatagacacatggttgtgatgccaaacacaatcccatctgaattgcaaaatattctggatggacccagagttgagtgtattcacaaaaaggcaattccaacatccaaatatactgcatgtgtaatctatgctctggtcaacgccatcaaggatacagtttgcttttccacggaccaaagtatctgtggacagattatcgctgcaagataggccattcttacagtgtagctcagttgaagccttttcacctttcatatgagcagttcgcttactagagcgcgtcctagtttttacatgagcttccacattctgttctttagctaaacgtgatgaatttctggttgtccttttaactttaacatccaatggtggacaacattcagaatccttatgtttcagaaattttaatgccgtaaactcattcgagtgatcaccggaagcctgactaaaatttgcacatacagtacatgaaggtaacactccatcatttgcagctaatggttctttcccatatttgctgcagataatgcaagtagttttaagcttatcatatgagtcaacaggagattccaatttggtgccgttcagtttatccagggcagactgatacatgcctagagcattagacaaattgcctgctgactgtttctgaaagtctttctcatatagactccaaaatagatctccagcttgcacatcaagtgatatatccagagttaacttgcagagcttgcacgaaatgaatgtagcattttgtgcaagaagatccctggcatatttaagctcgccctctgcggtgtcccattgctgtctcttgcggtatatttgacctaaaaaatcaggcaacatgaggcagaaggacaaatgacgcaaaaaccaccaaaagcaatatgtacaactgttgtatacttcctccgtttcatattataagactttctagcattgcccacattcatatataatgaatctagacatatatatgtgtcaagattcattattcattaacatttatatgaatgtgggcaatgttagaaagtcttataacctgaaacggaggtagtactatctttggagaagtcccaagaggtccttttcataacttatgaagtgccaaaactaaattacaagtaatagtgcctctttgatcttcgtaacactgatgtaaaagtatatatatacgcacagacctaaaattgataaggaagtatataaacacacatacctaaagctgatgcgaaaaggacaccaaaaaccggcaatccttgaaattgtgatatatcctttcctgttcgtaacaaaacttctgcttcggcaccattaccaatcaattcatgcagcaaagcaacctgaatagttaatgcattacagtgtgagcatcatgcacaaagtttctttttattttaggaagcatcattcccgaagttaagaatgctggccaaatgccaacaatttgtgtgttgcactgtaaaaattatgtctacagccatttgcataccacagtaggcacccatcagcaggttggatgtcacattgacatgacagataggcccacatttatttgactacagtggtgtaccagttccattttttcaatcattaaagagtattgcaatggcctttacgccatgtcattattgtacctgcaaaatgctatcaagatagcactggagtacagtccaaggagtaaggaaagaatctcttgttccagttgatctggtagaatctggccaaatttcagttattgttgatccccatgcttcaagtgaaacagagttttgccctccagaacattgagcttccccacttgtaaacttgccaaaattgaatttgaatttctttcttaggagcttcttgcgtaaatgcaaggcctcttttccgtatgaaaaggcctacaaaaacagaactactaaatgtttatatcacaagaaatctaaaatatcaaccaagacaacaatttagcaatgattcctacaaataaagatcttgcaccaagacatgatatttcaaactggagcaccggtgcaactacctggaaaagttctcctcttgatagaagtctttctgataaatcaaagtacagatagccagctagaaaggttgattgatcatttacagtagcctgtagattcacagtacacaatggttaatagaaaactaaaacagccataattacaatgcaattgtgctgcaaataacaaaacttacatcagaaaccaaagatgatgcgacactatcaacctcatgaacactaccaccgaaaccaaattcccttcgaaaggaaggttcacatgtcgtagaaataaaggaatcaataggccacaatctctggagaaacatacaaagagaaggatggtctcctttaaaacagtttctccaaaattctgtactatggcaatcaacatcaagatgatgctctgcaattgaaataaattgttggtccattgggagatgacaacacgcatgatggaggcgcccattggtaaatagcatggaaaataacttttcagggggtaagttttcttgcttccatataattatcataagcttgcacagatcaaattgaagctcaaagcagccctgatatgtcacagtaaaagaacataactatgttgctaaaaggatagcaattgcatctcatccaaactaggtcgaaaaatctataatgaccttgcttaccttcattgccaacaaatcaaccaaagaacaaagaagtggtacaagattttctgatggctgc

SEQ ID NO: 5396 - DNA, 7101 bp, Oryza sativa
gccccctccagcaccacagaggcgccccctccttcgccaccgccaccggcggctacaacccgacggccgcgcccaccacgccgccgtgcagctacggcgacatgtcgtcgtgctcggccgtcagctcgccggagaccgccaactactacggcgccgaccacgacatggtggcgcgcgaggacgacgtggactacgccgcgctcgccgacatcgacgccttcttccagtcgcccaagtgcatggactactccatgatggacccatgcagcacgttcttctcgccggcgccggagtccctcgccgccgagtgggaggacgaaggtgagatcagcctctggagcttctcctccctcaactgatcgatcgaaccggagatcgatggagaccaaatccatggaggtgatcgatcgatcgaagcctccacactctccagtgatcaccattaagcgcaaattcaattactgactgatatatcagtacgtgaccaagaattggccacggtacaataataatcatataatcattcaattcataactattatctacatatatatatgtagtatatacttaatcaatgtactagtgctactgcttcttgattattttaggctaattctgaattgcgtgggagctctgatgaagctacatgttttaaggcagctttccatggagcaaaactcccctcaattccatgtcataccatgtgtaaaagtggtgttcctgcaattgcaagtaatgaagtataatcaattactatgatgttaattatactcctctcaacttatgtccaaagcataatggtcctttttactagtgcagttatggcatgattggtatctagtcgacgcagaatttccgggatccttacgactgaaattaaattaacttctgtgcgtgtgtctgtggggcccttgtcagtcgtatgcgtctgtcgtatttcagtacccagctttgatccatcgccgtcctctgctgaaaatgctacacttgtcccgcttctctaattgtcaaatccaaaacgttttatttactaatcgagctgatgcggtcaatatttatttttatactgtcacgtatcaactgcagtatgcatctgtatatgtttgcaagaaaagggtatgggcgttgtgagctgtggtcaaaagcaacagagaatttcctttccctatcatgtaaaacagctggatttcgtagcggatcatggcgcgccgcttagattaatcgcagtgtccgtcggagaagaaagcgaccggccaaatctcaaaaaaaaaaagagagggtaaaaacgagaggaggcacgtatcggtctcgtcacgctcgagcccgaatccgcatttcgcggggtaatgcgagttcggatctgaggaaacgagcccgacccgttaaaggcgcgtcgtccagccgcccgaatgcccgatccacctcgtccatagcagcctcgcatccgaacccgagaggccgagacagcctcgcctttgccctactcgtctccttccttccttccgccgccgccgccgccgccgcgagggccatggggtacaccaaggagcagctcctcgcgcgactccaggttggtgccgccgccgccgcccactgggcgccactgctctctacctcccaactcctcgactgttcgctttgcgtcgtttcctggtagtggggatcggctggattggtggtcgtggatgcgccggtgctacggattgtagcgtcggcgagatgcttcccgttccgttctagcttgatttggttttggttagcatagttataaatggaagcgcgatagggcgtttttgctgccgaatttagttgggttgtgctgcggatagtttttttttttttttttaaccccggatgtgcgcatgaatcgaaggccggaattgcccagttatattgtgcgattatcgagaattgtcacatcctatgtgtggcaaactagaattgcttgccttctggcatcacagtggaccgcgactcaatttagtggtattgtcttgtgcaggagctcaacattgaattctcgtgctacgatcacccggttgtgttgacggtggaggaacaggtttgcaaaccgtgaagttcacacttcgttctacaatacttttgatggatttactgtaagtgctaattgaacttccgcaatgttaggccaaacatgttgggcatttaggaggtgctttgagtaaaaatttgctactgaaggtatgtgtcttaccaagtgatggacagttaatttcttggaacctattttcatgtattgatatttttaaattctgagtttcaggacaaaaagcataggctgtacgttgtttctgcccttgctggcaccaaagttgacatgaaaagtaggtgcatttcttgaaaactatatcctctttgttacttatttgaatgtatgccaactaattttctgttttccttaaacccattagttttatcacagcgtcttggtttgggaaaaggtggtctgcggatggctcctgaggaaaatttgcttgaagtgcttcaggtcagccattattcatgtttatctaaaactgcatactgtttgaaagcaacgaagagcgaaatatagtgcatctttcagtttcatatattacgtgaaaatttcacaaaagttaaaaaaaaaattctgcctgtgatgaatattgttggttgtgaaaaaacaaatatcccttcatgtattgtcttgccctttttctgtttcatctttaatgagtacttgaattttggtgcttcctggctctaccagcattttagctggatagcttattgttatagtttcaccctatataattttcttcacatgttaatgtattttgtccttgattatgtccaggtacccttaggctgtgttactccatttgcactacttaatgagtctgcaaggtatgggtgcttgctttcacatgttaattaaatatgattggaatgggaattcggtccattgttgtggaatttgtatttctaatagcttgaagcctttaaacttgaaaaaaaaaaactttgtgagctctgttcactttaccttaaacggtgaagagctatttactagtgtgatgtgctcattttatatccgagcgtcgttgttttcattccacttgatggtttccacttttaggatagaaattagaaatgcaaatgctatggttgtgactgatggaaccacatgcctcttgttttataatgcttagcttttaatgtgtcctattatattatacttatatatcagtttttttcatggttatgctattgcctttttaactgattcatataactgtgtatttgcaagcagtgctgtctcactactactggaccaaggtttcaagtcaaaacagagctgctacttccatccactgacaaatgatgtgacaatcggtatggttgatactatcatcacttccgtaaccaacactgtttcatcacaccatgtgtaatgtcattagttagtcattactgtgatactagaatgcacaccattccgttagttagttatcatggcacagtttcatgtaggttgcacaaggccttggtctggctactgttatattatttttataaggagggagacctccgttcaactttctttacctttttcaaaagaagaatagattagtaaaatggctttcttttcctgatttactccatttcagctctcagctcaagcaatctggacaagtttctcatgtccattgggaggcaaccagcttatgtagacttagaggtaatctttggatcaccggaatatgtgcatatgatttcattcggtccttccgtcccaaattataaggccctcaatatcatactttgatcattaatttcttccataatgttattaacaactacaaaattagtatcatatgaaagtactttcatacacaagtctaaatgttatgaatgcgtaacactaaacatagatattattagcttaattattagttaaaagttaccaatattgatttttcctagaaataagggtgccttatatttttgggatggagggagtatgtgctgggaagggattgtgaaattattggttttgtgcaggcttcaccagttgtaggcaaggataatcctcctgatctagcagattttgtaccatcaggtgtcccaaattctgcagaaccaattgagaaggtcacacctacaaatgttcctcgtcaaaatgatgtgcccaaagagaaaacatgtcttcctggtaagctgttatctactgatatatatattgtcccttgttatttcttctgtatatgcaatctatagtccttacatttgggcagtacatgagcgtagtagtagtgctactataaggaggtactactgtattataacaactattgttaattaaacaagcaggaatagatgacagtgtgaggatgaaacatgtgaacttgttcatgttgtcttttactcattaacctccatttcttttacatttttcttgtgtttttttttattacactttcaagttacaataaccagacatggcatactttgttcttgtatcagaagtgaaggctaagcctaaagttcagaacaagggtgcagaaaagacgcagagcaagatacctacaaacggagctaatgttgagaaatttgtaaatgatgtatttgacatcatgtccccgttgttcctttctgaggtaataagattgtgcatgatgaccctcatgaataatgtccactctttttgttgataaatttcttttgcaggtatcaaagaaactgaatgttaagcaggaagaactttcttctatatttgatggctttaaagaacaagccactattgatttggagagtgtaacggttagttctcttctgctatatgttagcactgattgctcatttgtgttcatgataggcaaccgtggtaaataccctagcttccactaatatgtgtcgaacaagcatctgtggtaaaaattaaccaaacaaaaaaaaaaagccatgggcctaagtaaatgttgcaagtcacaatttctttgtgaaggccttcataagaaactttcgttgtggtaaaatcaggcatcaaactgcccacgtttggagtttggtgtggtgatgtacttcagtttgaacttcaataaatttctacctcgttaagttgtgaagcatgtaacggacgcggctgtgtttcactgcagacgagtctgaagaatgcagcatacaccgctggatttgaggctggcttcgagactatgctcaattcaggtttaaaaggacaggcttctcggaagtaaattgtttcttttaatacaatggacataagtcgattcagtgaattttgtatgacatttagtgtaaaatcgatcaaattataaattatgctttcctttgacctgttgtctacttcatgtttgctcaatttttcaagaaggttgagagatcaaccttgtcagttgaggtaaaattagatctcttataagctctctaaatgaaaaacaccgttgaacggacaagcgttggaaaacaccggttaaatttattctccgtgtttgataaactttaaaacgttgcattgagcattacataatttcattgtctgctcaaataggaacattctgcactgccatgtctatcatttacatggtcaacttttacagcagatgttcttcagccatccatcattgtcaccaactttcggaaatttccatggtcgttacacattctacctgccattgccaacaaaacattagttaatcagagcaactttactaatcaggtagtaacaaaaagagaagaatggtagctatcaggttacttaactgatcaaacaggtatttctctttgattgctatttggcgatgatcttcaaatttagaaaagaaacagagagcgccaccaagcgtagaatgctgaaatgagaattgaagaacagcaaaaacttcaaaacaatagcataaaatcaatcaaatcagcaagtgaagccaattcccggaagcccttttcccccttttgttcttccatagtagattcattgtacataatcatgtatgatctcatgggaagagtggcagatgagatcaagagtggctgttgccttttgagtgtttggtcggaggttcaagacttcaagtaaggaaggagaagaagaaaacgcaagtagcgacgagaacaaaagactggagggccgtcatgtcattaccgccggcgtcgcccgcctctggccttcctcgccgtccgtactcccacccgtcgtcggggtcttcgagcccccgcggcggccacatccacgagaagggcccccacctcacgatcgtctgctccctgtcccggccatcgccgccgccgccgccgccaccgttgttggcgctgccgcggcgagctcggctgttggcgttggacccggcggcggcggaggacagcagctggtaccggcagacggggcaggagttgtggaggcggagccacggcacgatgcagtcggagtggtacacgtgcttgcacggcatctgccgcgcggcctccccgagctcgaagtcctccttgcagacggggcactgcgagccgtcggacaggtgcgctccggtgatctgcaccgtcgggagcgagtcgatggccgacgacggcgcgggcgccggccccggccggtcgttctgggttagctcctcgatgaggttgttcaggttgggcccattgaaatagttcccagggtcgatggccggtggagtagacggccgccgcgccaccggcggtggggacggcatgcgtcggcgaggcggcgccggcgctggagagggcgcgggcgcgggcccgggctggcggaacgcgcgtcctggcaccgcgggcgcaggctggcggaacgcgcggcccggcgccgccacggggggcgcctcgccaccgtatatgagccagcggcgcgggtggccgtcgtagtgcgggtggtaaggctgcgggaagaagtgtggcgggggcggcgcggggcgcggcggcgggtcgatctcgtggaggaacctgccgaagcagcgcggcagaagacgtcggtggacgggtaggagatgatgcggatggcgcggccgcactggagcaccagtacatgcggcacgtccggtggtgccgcacgccgccctgcgccggcatcgtcgacgacatggcgtggat

SEQ ID NO: 5397 - DNA, 5842 bp, Oryza sativa
atgacttacattgtgaaacggagggagtatgaaggttacaataggtaaatcccacatatgtgggtccatctgtatggactactttggctatatacattgttgttgcccagcccacatataaccggccaattctgctttataataggcacagataatcgctgatggtaaacagatgaaaacttttgtctcctcaatcagaaaggttgtgtagatggttagccttatcagtcccgatcaaacgattgtacatgcacaatcacttgctcgatgctttcaaactggcgtcttcccttcaggattgcctttgcacaattaagggcacgtcgctcacacgaagctctcttgctggcatcctcaatcgactcaaaatcctcaacatgagcaattccaacaattctcctacatatgtatggtccaatttagtaaacagaagtcgcgtgaggatcatgcacaaggcatcggaacacagataaaaaatttgaaaatggcgtttaaatgtgattttaagttctttacacttagcttctcacaacataatatcctgaattgcctcaattcaaccatttatgacggttttcagtcatactttatgcttgtcaaaggtggtcttctggaacatctcttttaggacaccacatactgacatacatttatgaaaaagaagtgctgcatcaaaattgacatcggaaacctctacttttggcctaaattagcgtgcctttgagttccttacagttaaaaagggcaggtctagtatatcttcatagtctagacgtaaataagattcaacaaattaacttagtagtatagactatataattgtactgtttaatattagagtatatggtagttagagtcatattaggatatgattgatttatgtggattttttccatatctgtaatccttccttatctcatgtatctatatactggcccctgaggctctaataccatgttaaatataatacttccttatctctaccctatttatttcctatatatgcgggctcctaaggctcaatagaatgtgtccaatattcgcagtaatctcctcttcctatactattcaacatttatttacctgatcatttttgctgaaccaaatccaagactgtcatgaaataggcttgtcatgtacttcttctgtgcaaggcacaaaagctctgagctgttgtatatagggggcaggtatgcttccccattcccatctttgtgtttattccataattcgacaaacttcttgtggaacaaattccatgaatcttcaattgtcttcaagatccatttcttgtaagcctgaaaaatatgtacagtcatataacttattttatgccccgtgatacatcatgaaaataccttctaaaatctagatgctgccattgcactttgccatataacttgtcatttctgcagttcccattactcagggacattcaagtgatgagtaaggcaagttattcaacttattgtctgccgagcaccctcctccctctgttacatacggcatatctcaacaatatcaattgctaattattctataggatacaagtacacaggaagacatgtggttgccattatcttagcaaacgcaaaacaacttaaccacccaaaaagaaaaactatctttttgtcacataaaaaaaaaagaggacatttgtggaccaggtaaaagtacacactttcatttactattattagccaataaatccatacataccttacgatcatttgcttgatcagcgtgtccatcttgtgaaaaatatgccaaaatcaagttccccaggaaggccccaatgtcgtaacccattgggccatagaaagcaaattctggatcaatcacttgagtagaatctggtgtcaccatgatggaaccagtgtggagatctccatgaagaagagcctgtgctctctcaataaacctgcatatgcaaatcatgtccatcatctccaatatgaaaagaaaagaaaagcgctggtttaatctggaaagatagttacattgatttcaattcagcaatctccaatttaagctcagcatcctctcgaaccgctgcagcatcattatctaggaagggtgatgtgcaacgattgtatttggcgagcatgtatgggtctgagaacacgacttgctctgtgagcctacacatctccacattatcgcagtactgagcaactgcagttcacagaacacaaacattccatcaatttggttatcatttttctcccttttcatagtcacagaacacaacattctatcaatttggttctcatttttctcccttttcacaggcaaaccaaacctgtataataaatcaaccaacctcctttcttgtgatcagtggtggagttgtagagaagggaggtgaagaagagcgtcttggccatgtaatccgccatgtgctcggcgagcagcgggtactcgacgccagcgatgaggcccttgcggaggatgatgtgcggcggctcgatgtagcgcatcccgatcagcgacatggcccggtcgaagtggtagacctcggggacatggtccgggcagaggccgcggtgcttctgcagcgcggaggcctcgaagtaggcgcgctccctcgtcatcggccacgaatcccccacgcagcggatgtacggcagcgcctggattgcagcgtcgtcagcggaggaacggagagagaagatgcgtacatgtgtggcggcggcggcgcgtggaggagatagggacctgcttgatgacgacggagccggcgtcggagaggacgatgtagacgaagttgaggttgccgtcgccgacctccttgatggtgagggcgtcgaggctgccgccgaggcgcgcggcgagggcgggcgtggccttgatgtaggccaccagggacgcctcgtcgagcgggcggaagccctgctgctgctgctgctgctgctgctccgccgccgcggccatggccggtgcgtgtgtggccgtggcgtcgagttgaccgatgcgagcgccggcggcgaagtggccgcgacccgcgagaggagtggggaatcgagtgcgcgtgtgtgggaggctgcgctgcgcggaggtgtgtgggttttgtaacagctgctgctttcgcggaagggggcggttctctgaacctggacttgttattggtacaaggcggattcttcagttgagtcgtgtcatcagtgtgagctaatcttgaggagttcatgctatctttgagttttcaatccaggccgtgtttagattcaaaattttttaaattttttttaactttttcatcacatcaaatatttagacacatatatagaggattaaatatgatgaaaaaaaacaattgcacagtttgtatgtaaatcgcgagacgaatcttttgagcctaattacaccatgatttgacaatgggatgctacagtaaatatttgctaataacggattaattaggcttaataaatttgtctcgcagtttacaggcggaatctgtaatttgttttgttattagtctacgtttaatacttcaaatatgtgtctgtatccttaaaaaaattggcacacaaactaaacacatcctagtatactgctaattttgaactgaatgtggcttctggtcattggatttggtgaattttcctctctgttccaaaatataccatcatttatgttatctctatattaccactccatctgtttcatattgtaaaaattttctacaattgaccattgttaatgaatctagacataacatccatataaatatgggtaatgctagaaaattttataatatgaaacggagaaagtattaaagttgagtcatcctccgttcatctccttctcccaccgctcgtgcagtctatttgtccgctccttctcaaatcatgtacacaacctccgtatgatacggtactttatcctcaattaccttcctagccctttcttactcgtctcaattgtatgttcgatctgttataatgcatgaatatatgttgctaataaatctgaataagtgtttgttcacttatagcagtattttaggacggatgaaataaataaaattgttttctcgaaaaaataaaaaaaaactaatgaatctttcactcatgcttcaggctaccaatggtggtgtgccttcggttgaagttggaattttctagcaaatcaaccataatcgaaatgttctcatatagatatatagaaacatgccatgcctacataatttttctgaaaaaaacagctctaagataaggaccatatattcatttgatagaatgaaacggttactatgttcgtttgtgtgtttattagaaaaagaaatttattgtgatattttagaggattacaattcacaattattgtgtcccttcaatgaactctgcgagttgataaggtagcatccgaacgattaatcagttggtacgcatgttccacgctgttcttttcaacaaacagggagaatatatcgactgtgtttggccccatacttcggcttgatgtcgccgtcaatgctagcatcatgtatcttcaaaatgacatcatatccaaataaaagcagcatgaaagtgccagtcctccatattaaacggcatgaaactagctcacaagacaaaaatcattatagtattctcatgaccaagcgaaccatagtgagaaagttgacaaactctattatattcaccggatgaactagaatgttcaaagtatagataggtcttttggagaacttctagcatgtacagtttcttccaaaatctccaattccctaaataatcatattatgagattttatagctatagaatccagaaaaaaatgtgtaaagtacacgggcggtccttaaacttatagcggtgtgtcatctaggtcattaaactctcaaaatgcatatccaagtcacagaacttgtcatagtgtgtcatctaggtcccagatcaccacaaatccttcaggatcctacgtggtgcggatgtggcatgtcacacgaacatgatgtggcataattttgactgacaaataggacccatttaaaaattttatttctttcttttttttcttctcttgcattttcctttcttctcctttgtctgtgacccgagcaaaagagaggggaaaaaaacaagaataagaagaaaacagaaaagaaaaagaaaagaagaaaaaaaaggacatgtcacgtccatgtggcaggtcacatcagcgccacgtaggatccaagaggggatgtgtcgatttgggacctagatgatacactttgataagttctagggcctggatatgcattttgagagtttgggggatctagatgacataccgctacaagtttaagtaccgctcgtacactttactcgaaaaaaaaatctacgaggaagctaaggaaaacctactttgtagattaaattctgagaaatggaaatctagttgtgagagcataaaaaagcagggaaaaccagttttttagcttttattaagattcttttgaatctagataaaaagttaaattgtttggggaagcttttgccattcaaccgactgattcttacaaacttagccaagtggtgaaaaaaaaacatcaatcttgcagagcgtccacacttgagcatgcataatgtatagtagaactagtccataaagaatacaatatttcattcagccacctaacaacattgtagaactagtccatatcaagcaaatagcaaaagtcacccataaacatatgagttgcctatatagaataaaatatattatttatctctgctttctctctccttctaatactactaactacctatatatattacatccttcgtttcacaatgtaagtcattctagcatttcccacattcatattgatgtccatgaatctagatagat

SEQ ID NO: 5398 - DNA, 26615 bp, Oryza sativa
  unsure (1)..(26615): unsure at all n locations
gggcaaaaaaaccatgaagatgttagagcatgctgcatacatattagctagattgtgtgtaaactgagattagaccattacctgaaagctcttgcaaaactaccccattgtgaacaaatattcgcagaatatgccgattgagcattggcggtcaactgaaaggtgtacaagtttcataaatatcgagaaggtaaaatgtaaaatgctaaacatagcttaagattgaatctgcaatccttcgtatagtctatgtgtacagatctagagtaatcttgaaacaagaaggggaattattaatctaggtgacactgggagtgtaaaacaaaatagtactcttcaaacagcaagagaaaataaaactacttatatgcatgagcaagacaaaagaggcagacctatatgtttcagtttcagggttaacttaacccaggtcccagagtggttctggtttatcactgaaagatattacaggccatccttttttggggccatccctttttggggagaagacccaccaaacacaatgtgtaaacacaatatgttgacagagataagaaaccgcatgttgaacaaactaaattgacaggatagaagatgatatagaaatactaacacagagctccacgtaggttcggatagaagatgaaatagaaatactaacacagagctccacgtaggttcggttcaattcatactacggaaacaaacagaacgctatctggccaagtggccataagctttagacaaacaaagctccagttcttccattagtgtattggcatgattgcatgaagctccaactgaatcgtagtacttacaaaagtgtcttatgtaagtatgcaagaagtgcagcaatcacacccggacactcaggacgttacaatcttgtgcctcctagcttaaggaacatgaagagaggcgatccccttcttgacgaatgaccaagaaaatcaactaccttaccccaccctcccatcgtcctctactcaccatgctaaattatacacgatctaacatttcaaaaagagaatggcacacggatccaatccataccaccggcagtaaggaaaaaaaatcataatttgaatttgcacctagataacatatccctcatctaatctaaaacaacatagcgaaaaggtcnaaccagtatgacatatcagataggtagctgcaagccagcaagaagatagcaagacgtcaacagctagtagaggaatccaccgtgaaaaaaagtaaccacagccacatgagaacccaaccaaggacactaatcagccacccatggctcgatccggcagatccaagcaaaagaaaccgcaggcgaggaccaaatcgcgctatcacagatcgccgcatcaaatcaaacgcgcgagggaggcagattagggaacgggaggcggagagggggcgtaccgttccgaggggcgaggcgaggtctcgccggcgggcggctcggagaagcagcgacgccgccatggccggacggggaggggaggggaggggagggaggcgaggaggggtttagggttttggttttggcgtgtggaggcgtgaacttattggggattgggggaactttggggagaggcgtggcttgcggaggagggtggggattggttgttgggctgctgcctgctgggatggatgtatggctgggcggtggggcgccacgtcgtcgcggcttgcgggtggtgcggatgcgggtggccgtgtgtgtgtgtggaaccttctcgaatcgcatgggatagcgtggcctgcgcacgaatgggccggcctggtagggggtggatcggttgggataagtccatctattgttccttgtctgtacgtcgagtctttacttgtaatccttaaaccacaatatcgaaaatctttacccttcattttaacaaaacttttcaaatcatgttttatggcagtatatggatggtttggctgttgtgacatcctagtcaacaaagcagcagcacaagctcaacggttgagactaggaggaggcaaacgctgatgggggaatcggacaccagcctgccgatctagcgcggagagcacctctatctcctcggaggggggtgctactgcgcgcgttcgtgccagcaatttagctgccccccccccccccccgccgcccgccccgtttattttttcctgttcgcattttttttcccgattttgacgttctcttttttttcgccgtttctttccgatttttttttcaatcacctctttacaaatgtagaattgaaagtttttaattttaagttgaaagattttaaatcttgacctgaaagttttcaaatctgggttgaaagttttaattatcggttgaaaattttcaaatctaggttgaaagtttttcaaatttgagatgaaaagttaaaagttttcgaattaaagttgaaagtcttaatttagaatatagtcttaaattatatttggaaagtcaaataaaacaaccgaacgctaatacagaggggaaaaaatctaaactaatcacgatactaatcacgtttcctaatacaacctaattacctaaactagcgctaatcatgacgttaattattttttaattctgattttaaccctatgcgtaacgacgcgtggtctccccaggcgaaaaaaagcaaaaaaaaaaaaaaaggaaacgatggactgtcgtgtgagggtttgggccgcgtgcaagggatgggcaagaaacacgcgcaacataagcttacgcgtgtgtacgcgcgaattaggaaaaccgctcctcggatctcttctctaggcagggatcctatcgagctcgcaatggcggcggccagcctcgctagtctccatgtctgccttgtacctctgcgcccagagcatggctaacgatgagagcaacaaaacgaggcatacgatccaggagcgcagcacggatttttttgcaatcgttatttcttgcctctgtcatatcacggaaacctttcgatttggaacggggagagatggctgagtggactaaagcggcggattgctaatccgttgtacaatttttttgtaccgagggttcgaatccctctctttccgccccaccgcctccttagacatgaatgcggagaggaagaggacaaggggtgaaggcttggaaggccaagaaggtgcagtagagggacgcatctccttgcaagtgccatcgaggcaggcctcccacagcacaacgtggcaggcgagtaggtcctccttgagccacttcaagatatgctaagcggcgtcgaaaacgccaaggtacacggcgcccttggtcgcgcggtccctccctgcattgcccccccccccccctccattttcactgaacccaaacaccaggagcgttcctatggtggagttgttcaggccggagcgacaccgcttgcatgataataacgattgaaacttgaggtctagcccagagagggcctagagggcatgttctccccatcgttggcatgctctgttgacctcgcgtgcgtggttgaggaaaaagagcgtggttgaggaaaaagagtagagaaagaagtaggagctgatacgtgggctcaacatatttttttcttctcacttacatgtgagctccgtatgttatttcttaaaaaaattctttttatcaactagaatgccacatcagcggaatcagttgtctgtactgccctggacctgtcttggacggttctggcaatacaaggggtgaagatttataatatcgatttttgggatgccaattaaactcaacgtgaagatgagggacagctggacttattccgctttggttttttgctggccttatgctttggcccagctcagcccgagaaggcacctagaacgctagacgtctggttgttcccctataagccgctggatcaagatggacgatccagattgaggcttgaaagcaggcaattctcgatatgcacactaggctctctaatgtttcattactatacttgcacaatggactgctgattttgccttttctttttggccggacaatgtggcctactaaagcaaaagtcatgtacacaggtggatttgacttcatagttgcatctctatccgacactgccgtgtcgatgaaactaagagtttctgaacatcaaacatggcgcactataatgtggacaagcagcagctacccttcacctctagcaaaagacaaaaacatcaaacatccatttactttggtactaagctccagcctccaaggcctccagcagtccagcctccaagccctcaccttggtctgagagtgttcttgggggcactaatccatggcgtccctgcgacggcgaacctccatggtgcagcaacatgctccggcgatgcgtattcgatgcctacacgggggccaaccaaaatgttctccggttctggcccgtctagtacctccaacccacctaagacatgtaatgtcaggcgaaaacatgttgatacgatctggcagttttgaacgatgttggagatcactgaatcataccaggtgtgtacagaggatggttggaccagtcagtggaaagccccagagcttgaccaacctgaataacacattcagagacagttataattcagttgtgtgggaacagtgatgatgcagaatacaaaacttggtattgaaaggcataaacctttcctggtccagtgagtagaagtggcttatcagtctgctggcctcgacgctgctgaatagttgccagccctacagtattttgcaagacaatgagaaaagatgccatcaagctcaaactagatgttacacaatagaatttacaggaggaacagacatttggcagtaactagtaacctgactgggtttttcttacatgaccaaatgcagatgatttatataagctctatggtctaagcatatagttgcttttgtaaaattggaactccagtagtccaaacaaagaaacagattttactttctgaagttaggagggacagacggaagaaaaacaattgccgaaacatgtgaggaaagattatcgcatatcctcttcctcttgctcacacagcaacgtcctcgtaaacttcccttgtgttctttaagtaaaacatattctctaatgcatacttcatatcacattaagtctgaagtgaaacatacatttcagaagtgaaaattattgcgattacagtatatatcttccgatctaaactaaacaagcaccaaacgaaactgcagccgaggtttataaactgtaagtcacccaaataacttggtcatgttcacttgttgttacttcaggaaaaaagctgatcagatcatacatgatgctccataatgctcaaaatacttgagagaaatcagaaatgcatactgctcaaaatacttgagagaaatcggaaatgcataccactaacgggagcacatgaccgaatcagaacagcagctccaactccctccttgtcagcgacgacattgagcatcatgtgcagtccatagcacaggtaaacatacgcatgccctcctgatccaaactacaccggatgaaggaaaacttcagcccacattgaagttcaagagactccccccaaatttgctaagcttatcgaagaatttaaggcaagagaagcatcggccttaccacaggagcagtcctcgccgtgatgccgaaccggccgtggcacgcggagtcatttggcctgtaagcctccacctggaggaacacgcaggaacaaatccacagtaatcgcacttggccgcagtgattactgattagtaggagtggtaaggtgaaagaacaagcacctcggtgatgcggaggacgacttcgtcgcggcgcagcagcttgccgaggaggcgtggggcgaggtcaagcgcgtccacctcgaagaaatcgcgcggcaatgcgggcccaaacggcgactgcaacgacaccgccgtacacgccgggtgcggtggtttccccgcggcgatggtctctccggcggcgacgcggcgggtacggggctgccgcttcttcctgtggggggatcgcttgaagcgtgggggcgtgggcgccccggaggtggtggtggtggtcatcggagatggccggctccctccggcgaccggcggcggcggtggcgtgggggtgtgtgcgtggggatggacggtgcagatggaaggaagggatttcatcgatggattggcaatacactacgagtactactgaactcaccggcccacgcgattagtatttacaaaaaaaaaaaaaagtcaacgattagactatggctgtgttcggattcatattacgcacggaaaacggaacgattcattagcacgtgattaattaaatattatcaaaaatagattaatttgattttttaaacaactttcgtatagaaacttttttaaaaaaacgtattgtttagcagtttgaaaagcgtgcgcgcggaaaacgccgaacacacccatatgtgtttttttaaaaaaacaaatggttgacagtttggaaataaatattacacttcaccattttattgtactctatctgtcctaaaatataagaatctataattggataggatatttcctaatactaggaatttagacaggccttatctggtcctatgtttttatattttgggactgatcaggtattgtatttgagttcatatttattagaggcatccatatcggttgcatatgtaaggtttacatttttaaagggtacgtcaagagaaaagcattcgagattagtctctaacaaaagttagaatggtcacccttttttttccattgctgatctctaccgattaggcatgaataatgtatcacggtgacaagtgaccatggtaatctatgtgggagaatctacatcataaaatatggtgaaaccttggaatctcagagagatacgtagggatgtcactagggttattgcactgtcatgcacacctctataagcatctatctttcttcctcattcgtttaggttagaaaaaaaatatgttagtagaaaaacgtattgacttatgttagccatttatgtctgatacccatgagttgtcacgtgtgatgtggctatttcgcagttagcaagaaaaacattgaagaatatagatgttggataatgtttgactatcaaaggggataccattgcctttacaataaactagcaataccagtgctaaatgagacatctatatgttgttgacccaataaaatttctactagagttagattacttgatgaaatttgaaactactttaccactcgtaacaaataattaaatatttctttgaactttgatggtctaacaaataatcccttgctaatactacctccgtaaaaaaaaaagtgcagttatggtttcccgtgtccaacgtttggccgtccgtattacttgaaaaaaatatggtcaatatttttattgttattagatgttaaaacatgaataatattttatatgtgactattttttaaaaaaaaactaaataaaatagacggtcacaactgtaattatattgggtcggagttagtatttgccaccatcttcattggctccgagatcgccatccaataatttggtggagacaattgaacaactcgtacggatgctccatcgatttctgtgtaccctgtatagcgagtgatagtgcctccatccatccacaggtgaccgtccgttcctagcctcggcccgtagagtgtcgacttggtggacagcacaaactcggtgtcaataatggtcttgggtgatggcccttgacctccatctccatggcgagtggtcgtcgtcgtaggaggactcagcaggttcaggttctcgttggacacaatcacatgcctcggccgcatccacaacggcattgatattgtgcagagcccgatgtttagctccaccattgctcttgccgcgctagcttctgcgtcatatgttggccctatggttccttcgcttgatgggggtgatggatatagagcgacctaattgattcgagcgatagttagcatagttagtgtctgttcataagcaattcattatttagataaaaaatatcattctcataatttacttgtttaatgtggtaggtgttaacactcttctctacaaaacatagcgaaactaatcttttatattttagaacggagtttttcttcttaaaaatatatatgggagtttaattcttttttatttacagaacttttggagagattcatatatatatatatatatatatatatatatatatatatatatatatatatatatatatacacataaataaattaatacatacctcgataatttcgggtttgatgaaacatattggaagagcgaggtggagaggcggaaccgcaaagtagagcccgtgttttgcctcttcctgcctatggaccgcgatcgcgacgctgtcttcgtccctgaagacaatcaccgtgttgtctagtatcacgcacaaggtgatcgcctcgatggcgccgaacgccaccatgtccgcctgcaggtcatcgagtttctggaaaataaaatcgagaccttgggccagaacgcatcgacgatggaggctgtgcatatccccaccctcggagatcagctggctcgtgatgggtaccaagagatctcgcgccagtgttgccctctcgacgatgtcaccgtgcagatcgcgtaggtttcccaaagagaccatgattgttactatttggcttggaattttcgaggctggagctgaattatacgtatgaattttgggcgaatacgaatatctctcgctagcctagacgcaataatacggcggctgaagtacgattgagatttgagagaggctctgatgaatatataagattttgtggccgaatacgaatacctctcggcctgtcgctggcctagtcgatggtagcagtcgggctgggcccgctcaggaagaggaaaacgagtcagaatcagacacggggttgggggctccatttagcccacgtgaaattgtttggcccatgctggcgaacataattgggcctcgggctcgggctgctcgcacgtgcagcgcgcgtgcgctgcggagtgcttcgtcgtgccatctcgcatcgcaccccagaccagaccatggcggcggcggcgctctgctccgcctccccggccatctccacggcggcagctctcggcgacggcgtggccacgctccgcctcgcggtcctactgcgccttcgcctctccaccgcgggctgtgggctgtggctgcggtggggaccccatcctggcaggcgcgtcggcggcttccacgactacggaggaagagggatcaggtgttagagatgatgatcccgacggcttcctccgctccgagaaggtcaggcttaaaaatcggctttaggtgaaaggagcccgtgaatttgcacagtagagatgtttgtacactctcccacactgatgtatgtacattttttgctggactagtgctgtgtgtttgcctatttactctgatacggtgcataagtgcatccgtctacaataagataatactatccttttagatgattacgtgccctataagtgtccagttacccccctcgatggcaggaagggaagataaaaacacaacagagtttgaatgtgctgagcatttcaaatataatgaaatgacaggttgctagaagcttagaagtgaaaatatatatcactgtatgtctgtatcaggcatatggtttctgctagtaatcttctagcattgaaaaatcaaatctgtttagtgctcaatggtagctcttggacgagatgatcttagctgttcaagcacaatgaaatctacaatgttaattgctaaatgaactagtagtagacaccgtatattatgaatgacggcattgagagattaaaactatttactgctactgttgtccttagacaaaacactttatgaactgcaatataacctcaagtactatggttgaatatgataaagttggtcttaaattgtgctagtaataaattacacatacattcgagtctctattgtttttcaagtttagctctggttacctgtttcaggtaaacgttgagcataaaagattcgattttgtttctgttccaggatcgaaagtgcggtatctgaagagtcacatgatgaccgcacagagaatgaacatattatacatgaccatgaacaccgtcatcaccatcatcatcatgagttcatgaccatgaacacaaacatggtaagtataaatgttgagacatgatcataatcactgtcatgatcctcaccaattatcattttgagaactcctgctaaactgaaaagtagtcgacgacaactactgaagacaggctaaccttagtagcaatatatccatgcctgaactgtgtaggcattcttatctgtttatatgaatcattagttcattactgcttgaagcttgatgctacttttctattaccatgtgaatagtccaaaaataatgattgttcattttctgatacacatcatatggtaacacccttttccttatggtaatattatactaccttagtagcaatataactggctttctgttccacaatcacataatgtactacattaacacctaaaatctcacatcaaggagcatgatggcatgtacgaggtttgcgcacactgcacactcacacacaatcttagatccatatggtcccttcgtccagtacctattcttttaggagttagctcatggaaacatttcataattaccgggaggctgggagttgagccatctgcattgtattatttcactcaatttcagaaagcataatatgatgactatcttaagtcatggcaatgctttccatatcttaagtgaaaatatattaatatcattcggaagtttttgaactgtttataccattgtctgcttttgtaaaattttaaatatgctagccccccatgatatgaagaacaggtaaactcattgtttttcttttccttatagatcatcatgcacacgagcatacccatgatcctggtgtttcttctgtaagcattgtttgcaaaggggagatggatcttgaaaaggttgattctaaatttatctgtcatgctctatttagtcattattgctacatgaaattttacatctaaatactatcacccatttaattgccccacacatgatggggttgtggatattgaaataagtggataacaattttacatgctctcacataagctggcatgtggttgggaaacctactgctagaatgtctttcaggtttatgttaaacttagcctgtagttttacatagttcactattgattcttccatcgtagtctcttactgggacatttacacaatgaaccaattactctatatgtgttcttatgtaagaaatgtctgtgttccttgggcagggatactctatatgtgttcttatgtaagaaatgtctgtgttccttgggcagggagtgcacatcattttccggggaagaataatgtgggaaccaaatgagccatgcatcaacaagattgtattcatagtcaataatctcaaatggggaagaactggagaaacggcttcaaagattgcctactctactgaaggaataagcgagaaacgggactccaacaggtggtgtatacttcaatccaaccaatcaaccacatgaaagtgcagcagcctaaagcaactaatataaggaggaggtgatcagtctaatgttttcatgtacacagcctgaaagcaagaagaatgcatgaatgggctggctatccgctgaggtcaaggagatggtccgtagaggctccggagccgggccaacttatctacaatgacagctgcaatgaagtcatgagtgtaggcggcgtatggcacccgtctgcagtcggtgaaccccaagctgtaccagtcctcagccggcctccgtcccagccttgctgccccatgccaagacttgaacacggccactgcgaccccccttcagacgggcgtggactagatcatccatcgcaccaaaggtggtggacagccgagcctccagatctgcgcggtccgtgtacattgggatacctgagaggatcaaggacctgtccgggaagctgctgctccagacggtagcagggttcgcgagagcacacagcgcgatgagcttgtgcacgatccgtctggcctcgaccaccctgttcacatggtatcctggtcctggagacatcaactcgtcggatagccagttcttggcttggcagtaggccacgggacccgcccagtccctcgtgctgaagctgagctgctgcggcggctgctgcggcggcggcgtcaggaaccgggaaacgtgcagccatgtcatcatcagacagtgaggagaaagcccccatctcatctcatcatcatcatcatcatcaccccatctcatcccaggagcgtgcagccatgtctcgggaggctcctgcagcagaagctcgacatcctccggactcccgagcacgaccaccacgacacccatggccctgtggatcacgacggcctccacctggtgcctcagctccacccggtgctccagccagtcggcgatctgggccgcgtcacactgccaccgctctgtgcccagccctctcagcagaatcacccggctcctgtactcttcctgctgcgccgccgccgcctgcgtgatcacgtacggcggaagcaggagacggagcaaggacgacgtgccaccctcgtccgggagcagcagcgaggaggagtccagcatccggaggcccgtcctgacgagcaaccgcggcgccctcctggcaaccaactccgtggcgtccgcgtcgtcgtacacgagcacgccggcgtccccgcccctccacgccaccacggcgcacgcgtactcggccccggcgaggtggtctctcgccgcgcggcaaagaccgtaggctcctccaccaccaccatcggacgtgccagcgacgcggacgacgaagacgcacctcaggtggagatccgcgtcctcgtcgtccagcaggtaccgaggcggcacgagcgaccggaggagcccaggctcgggctcagcagtggtcctccgcctctccgcctcatcgtccagtgcgtccaagatgtatccgcgcgggtcgccgcgtccgctcgcctgaacaaatccacattcacattgtcacggagtactagctagtagtagtagtagtagtaattagttcacaaaatgtaactagcctggcaacatcatctcggctaattgagttgtttactgattcatttcttgtgtaataaaaagcgcagaatcatgccttgaatcctattaaaaagaaagattcaaacaacgcaaagcattgtcctatcgagttttggtgattttgctcttagcggacaggatgcattgggtaaccgatttcgtccaaaccttcaataaaaggctacaattctaggagagagctcatctgctcatgtatcattctccaaatacacgtgaaccagaagcactgagcagaaaacattatcgcacagacagcaggaaacaaactcgcatagacagagcgggatgcagagattcagagaaaacaaactcgcacagacacagcagaaaacaaacacaaactcaccgccggaatgcaggcgacgtagaagcccgggcgaggcgtcaggttcatcgcgctcgcgctgtctgcggcatccgcgaacaccaccagcccgacgcggtagcccgtcgagctgtctcgaactaagaccgcggcttccacagccaggacggagaagctctctcgcaggtcccgggggcttgtgctgggcgccacgccgtccacgagaaccgatctctccaggaagtctgggtcatcaagaaccccgggagcaacatagtaaagatcagagataaggcgattcatctgcctaaatgctgtgttgctcgcctgcaccaaacaagggacagcatccgatccatgtcaaatcaagcacaagactgaatggaagaagaagaagaacacgacaggtgtaggggggggggacgggaagccatgaattcggggcaaaatcaagaatccagcggcaagagaagcaaaatggcgccgaattcagagaagactcggcgttcacgcgaaagaaacgagaaaatgcgaatcatcaagaaatctgagaccatgaattcaagaaacgggaaaagaaaaatcaggaagcggaggcgagggacagaatcgaacagcaaaagaagcgacgaattcaagaaacgggaaaataaaaatcaagaagcggaggcgaggagaccgaatcgagcagcaacagaatggaccatgattcccttctagaaacgggaaatgaaaaatcaagaagtggaggcaaggaaacagaatcgagcagcaacagaagggaccatgattcccttcaagaaacgggtaaagaaaaaaaaatcaagaagcggaggcgaggcgacagaatcgagcagcaagatcaactacaagacaagtagcaaatggtggttgccgaattcagagaagacgccgccgaacacgcgaaacaagaaaggggaacgaacagaacaaatcagagaccacgaaatcgtcgaagaacacgagcaaacagcaaacaacccttccttacctctcttgccagccatagcctggcgaggctggggtggcgaaccgggatgataccagcgggaggaagaggagcggccatttccgccgatcggtgcgggtcagaggagaggatgaccgggggatggagggagctctgctctgctcgtttggtttcttggagggagaaaacgcaggcaggtgcagggagaagaccgcgctcaacgctggtttgggaggagacgtgattttgtttcagctcacctccgcgaaggcggtggatggaattggaattgggctttggaagatttggcccatttttgtgtggcccgttattctaaggggacgatcagttattaggccgaaagaacgaggaattttaagcagaataagttcaccagccgtctctcaactttacatcgaagttgtttcacatcccttagagcaagtataattgtgagttatcgtaggaccgagatatcgactagaggggagtgaatagacgatttaaaaactaaatgacacctaatcaaaactaacctaagttgctagactcggtgagggttaagtctaactaagcaactaagttatgtttgcaaacctagggtgatagtggctcaattaattctctaggaaagtaaatcacactcctatatcaatgttttgcaatcctagggtgatatgatatcaagaatgtctctaggaatgtaaattgcacaaatataaatgcgacaatcaaatgagacaaggagacaagagatttttcaccgaggttcggaaactcgccggtttcctactccccgttgaggcgagcccaactccaccgctcaaccacgaagccaccgcacgcccccttcgtcaaggggtgggcaaggcgggagccggcccatggagaggactacccaagcctcgatcactcggggtagttcttccttcactctgaaggtggtgaactccaaaccactcacaaccggcgccgggcctcctccacaatcttctcggagaggtcaccgggcaacttctccacaagccgtctaggaggcggcaacctccaagagtaacaagcaatgacccggcatggaaatgatcaatcaagtgccgcactagctctacaaatggaagtaatgcacttgactcttggctagaacaatctcaatcactacaatggatgaacactaagctcaaaggtgtgtgagagaggtgcaatgggtgtatgcaattgaattgggtgccaagagagcccccttactgctggaggagagtatttatactcccaccaaccaaaactagccgttgggggcgaaatcccccaactctgtgtactgccgttctgaccggaggtatgtggccggtcagaccgtgctactctgcaacggctagaaaactagccgttgtagccctgtcagagggccccatcggcctggccggtcagagcgacatggggtggccggtcagaccggcctcggctcggtcagacagccctcagctcggtctgaccgaatacggctccgtcggctctgtatcggccaccccgagcaccaccataccggcctccagggggccggtctgaccgcacaagtgccgtcggttagaccgaccttgtgcgctggtcagaccgcccgcttggggccggtcagactgccacaaggtggccggtctgaccgcccctggtcaggacgaaaaccagtgaatgcaaggtgttgtgtgtgttgtgtgaaatgtgagcacaagtctaaatgcataatgacctaatgtggcaattaaaatcttctctttgctaggtcattactcctcttaatagtacgacgaaactaaaaataaactagcaaatttgatcgccctacacctcgatcaattcaaaactaaagcacttgttttaccgtcttctttccctttgctttgcgccctcaattttaatccatcgataatcatctatgcgcacatctgacgtggatctaacttaaaatatatagctcaaaaacaacggttagtccacaattagtgcttgttattaattaccaaaattaacaacgggggcctagatacttcagctataaaccttctataagcttatgtagaggagagatataacaaaaaattaagggtgttggctgtcatgcaagagctagcttaacataagctccaaggtaaatacaattaatgtataagtgagagatagagagaggagaagaaaattatagccaaccttatagctaatctattatatgtgttggctttaagattggctaatagtaagaagtgagctctattattatccttgctcttatctctaataaaaaatcttcacctctaaactataaaaaaccgtgcaatttgggtccgttagcagtatggatatccggtttcgctgaggtggcatcctagtcaggaaaaaaaaagacccacatgtaagtgagaaggaaaagaaaatgtgaggtttgcataagaaagttacttaaaaaaaatcacattactccatctattatattattaagacagctcgaaaagaagccaccacgttcgctgtggaagctagaaattcccacattaatcgaagaaaaagaaaataagagtccaagtagaaatacaaactaaaaaataactgaaattcggaattaaaaataagcaatactgaaataggagtccatataagaacccaatacgagattaattaaaacctttggcaattctagattttaactgtttatagtagaaaagataagtctatagatctgtactgtgtacgttacatactaggagtctttgtccttttctatttctttggcggtgtacacagtacacgtataatctaattcaattacaaacctatacggagaagagttgtgctgccaaataaacaaagcttgcactgctgcacctatatattctgtagatttcaagcagcaacgattgggctagagcggcagaacccaatgatagcgggagccgaccatagtaaaaagacatgatatttacatagacattacaacaaacagatcaatacttgcaaccggcaatgcatcaaacaccaaaagtttctttgatgtttatgaaagtacaaatgatatcgacatattgtaattagtgtatatttttcacaggagatgagttagtgcaagccgctataaactgacagtcagattaaacgtttagattatagtggattcacaatttaacgttcataatttaacggttgagatataacacctatatataaatataggaattagagttgtagtgctaatacaggagtacaaagcgcgctgctcgatggaataatcgagatccaattccaaaactgttatctaaacctatttgattcctgtggaaaaaaaaagcaaaacaggaactaggtaggcagaaagccgtgtatatacgtgtgcacatgtaagtattattttttcagtataatcacttcaaaactatttagaacatactttgatatatttgttgccagtaaaaatgaagcgactgcctctttatctattcgatcctttttaatcaccaaatatacaaccagcaattcagatgatttataagtaactaaatttgaaataataataataataataataaagactatgaaaagaaaaaaaccatctacaacacaacatgtgattaattaaaattttaaaaaaaattatgaaattagaaaaataaaaacaaaagtttaagaaagaatacgatttatgaataacaaaagttcaaaataaaaaaaagaaatattaaaagaacaacccgtaacacaacaatggtaaataacaataaagagggagggataacgggtgagccgtaaataaataaatagggtgtagcggttgatgggacattttaaaacaataaaaatataaatgacgattagattcaattttaaaaatctcaatgacgattaagagaaacaacagcgggcaagccgtcaaggagcacagtcgtgacgtttgactggacttctaaaaagaaaaaaaaacaacgataatcataatatcatatttgactttttaaattccaatgacaattaagaggagacatcgggtggattgtagaacagtacaatgacgacatttgatgtaacttctaaaaatataaatatgtcaatcgacaagacaatgaactaaaaaactataagatctaaatatgaaagtttcaaagaggatgaataaaagttgtgacaggtcgggcgatcaaataaatgagtggtaaaaaagtaaggggtgacgacttattgacttttaaaaactaacccgatgataataagattcaatcttttaagatcggctagatggctatttaacaaatttaaataaaaccatgcttaaaaatatataattctggatgggtgctagccgtgcaacaaataaaggggtgacaaaggagtaagggtagcaacatgtgtgacttttaaaaattataaaattataaacccggggatgataatgttcgatctttgaaagtcctaaaacaacgagatagatatttaataaattttaagtagaatcatgtgaaaaattagataattttgttggtgctagccacgcaattgcgcggaccacccagctagtttgttttaaaaaagctaatttttaattaatcatacgctaatgagttgctccgttttttatgcgcgaggatgagttcccaacaccaaacaactcgaactctacgttagtgaccatcatattgatttgtggaagtgctagaagaacaggggtcatgactaaatacactgctcaaaatactacacaggcacaatagtttgagaatcaaccatcctaaccaggaaaattggagtatttaacaacaagaagtttcagaaaagattagcaaactgttagcagaatataactgatgacctgtcaagggcgttgatccctagggtagctggcccctggctacggagttcgtagccacggtccgtcttctccggcgaggtttgcccctccgccgcaggcttgagagttacgagagaagggaagaattgggacaataaccaaattgcttaatttctggaatgtgccgattacagagatatatggcctaaggcccaactaaccaaagagctaattgctcctaaatgcaagggctaataacaggaaactaattatcctttccatcctagccactgaccgtggcctgatctgccgcagccgcgcgttctgcctctgcgcgcgccgcgcgttccgcagctcggcgaacgtctcgcgctctgcggcgtcgcacatacgtgcgcccccacatgacatctccccctccgtcgagaggcagctcgtcctcgagctgtagagcagggtagcgggcgaagaatggctccctgtcctcccaggtagcagacgccgctgaagtgcccttccactggaccagaacttggcgcaccccacgggccaagcgggctttgatgactcgctcgggctcacaggccaccgcgccgtggtgcacgttcggcagcggcgggggagcgtctggaggcgcgccgtgccacttcttgagcagcccgatgtggaacacgtcgtgaaggcgggcgccggccggcaatgccaagcgagcagccacctcgttgatcatctccgcgatgcggtagggcccgaaataccgcagcttcagcttgccggagactgccagcgacagggacgctggggcgcgctggcggagacgcagaaggacccagtccccaacctgaaacgacactgcacgatgggacttgtcgtagtacttcttctggatggcctgagcttgttccaggcggtagcgaatgtcctccaggaactctgagcgctcctccatgcttttggccacagctgccacgcgggtgtcccccggttcatacgaccggatggagggagggtcgcggccatagaccacccggaacggggtatgccgcagcgaggtctggtaggcggtgttgaagacaaattccgcccacgggagccagcgcagccactgccgggggcgatcaccagtaaggcaccgcaggtacatgatgatgacacggttggatgcctccgactggccgtcggactgagggtggaaggccgtcgtcatgtggagcttcgtacccaccagacgcatcagctcgctccagaacgcggacgtgaagaccgggtcgcgatccgacaccatggattgtggaacgccatggagacggacgatctcggcgaagaagacttgagcgacggattccgccgagtatgggtgcgccaaagggatgaagtggcagtacttgctgaatctgtccaccacagtcagtatgacggacttgccgcgaacacggggcagcgcttcgacaaagtccagtgcgacgtcagtccacactccttgtggcaccggcagtggaaggagaagaccggcaggctggaggtgctcggccttgtagcgctgacagacctcgcaggtccgcacaaaatcctgcacaacgctcttcatgttaggaaagtggaaatcccggcggagtcggtggagagtgcgctggacgccttcatgtccctcctcatggacagcgcgcaggacctcctggagcaggggcgacgctgggggcaggtacaggcggccagcgaacaggaccatgccgtcggccatggaccacggccctgcgcgtgtgccggagcggatctccgcctgtagcgccaccagcgccgggtcgacgtcctgtgcttggcgaagccgctcgatgaagtcgaaccgtggcgcagacagcaccaagacagaagcgtcctcggtggtgtcgcgacgagacagcgcgtccgccacagtatttgctgcgcccggcttgtactccaccgtgaagtcgaagcccagcagtttgcccacccaatggtgctggggaatggtggacagccgctgatccagaagatatttcaggctgtagtggtcggtcttgacggtgaagtgccggccccaaagatacggcctccaatgccggacggccagcaccaagccgatgagctcgcgctcgtacgcagcgagggcgcggtgacgtggcgccacaggacggctgaagaaggcgagcggatggccgtcttgaatgaggaccgcgccaaagccgtgggaggaggcgtcgcactccacggtgaaggccttggtgaagtccggcatggcgaggatcggcgccgaggagaccgcggctttgagggcgtcgaacgccgccgtggctgcctcggtccaggcgaatccttccttcttgagcagggcggtgaggggcgcagcgatggtgccgtagttgtggacgaatttgcggtagtaccccgccaagccgaggaagccgcgcaccgcacgcgccgagcgtggctgaggccactcccgaatggcctggaccttcgccgggtccatggcaacaccagcagccgagataacgtggccaaggtatgccacggagtcgacgccaaaggcacacttgctgcgcttgatgaagagtttgtgctccctgagcaccgtcagcacagcccggaggtgacggagatgatcagcccatgtgtcactgtagatcaaaatatcatcaaaaaacacaaggacaaagcggcgcaagaaggagcggagcacatcgttcatgagggcttggaatgtcgccggggcgttgcaaagcccgaacggcatgaccaagaactcatacagcccgtcgtgggtgcggaacgccgtcttgtggatatcttcgggccgcatgcgcacttggtgatagccggaccgcaggtcgagcttggagaagaagcgcgcgccatggagctcgtccagaagctcgtcgacgacggggatcggaaaagcgtccttgacggtaagcgcatttagcgctctgtagtcgacgcagaagcgccacgaaccgtccgccttcttgacgaggaggaccggcgacgagaacgccgagtcgctgcggcggacgatgccttgggagatcatggcggcgcattgccgctcgagctcatctttatgagccgccgggtaacggtagggccggacagccaccggcgacgtgccctgcttgaggacgatggcgtggtcacggccgcgctgtggaggcaggcctgtgggctcggtgaagacgtcggcgaaggagtcgaggagcccccccaatagggagtcgtctgcgctggccgcgcggactgccggcccgtcctggtttggcgcgccctgccagcagatggtacggccctccaggtcgaacgtcagggcgcgtgtggtgacatcccaggacatccggcccagcttggccatccactgggtgccgaggacgatgtcatatccggcgagaggcatgacgtacaagtcgacgtggaacggcatgccctcgatggtgatgggcgcgtggcggaggacgcctgggcaggccaccttttcgccgttggcgaccgtggccgtcatccgtggccgcggctggacggacagcccggtgcgagcggccgccgactcgccgatgaagttgtgggtcgaccctgtatcaaccaaggcgacgagcgtggtcgcgcccagctgaacccggagcaggatcgggtgtcccacggcgacgccggccacggcatggagagaaaacaccggtgcctccgcgtcgacctcgtcctccggcgcttcctcgtcctcgtcctccacgctgtccacaaagaacagacgtttgcaaaccttgttgtggccgcgactgtacttttcgtcgcagttgaagcacaagccgaggcggcgacgttcctcctgttcggcctggttcaggcgcctgaccggccggttatcagcagcggtggcggcgggcggcgcgggcttggcagccccagctggagccggcaaggcgagttgcggccgaggcgcaggtgccggcaggacaccccgaccaggagctttggcgggaacggcggtgtactgctcgatcagctcgaactggcgggcgaggctcatggcagccgccagcgactggggattctgcatctggacttggaggctgagcggaggaagaaggcctccggtgaacagctgcactcgctgttcttcgtcgaggcgaccggcgcgggggagcagggcctggaaccggtcctggtagtcctccactgtgcccgtgcggcgacaggaggacagctcgaacaggggagcggaccgcagaggtggcccgtagcggagattgaggagctccttgaagcgagtccacgtcggcgtgccgcgctcgtcttcttggacctgcatgtaccaaagttgggcgccctcgaggaggttgtgggaggccatccaaaccttctcctcttgcatgattcgctgttgcaggaagaaggattcgcagcggttgatgaagattagcgggtcgctcttgccgtcgtagtgcgggaagtcgggtcgccagtgcttgggcggccggtctggcggctgatcgccaaagccggggcgggcgccggacgtagatgaactggtggtggtggcgagcgcagcgatcgccttggcgttggccgcgatggaggcggcgttggccttgatcgactcgtgcatcagcgccatgtccttggagagggcctcgatggaggccttgaggtcgtcacccatgtggtgggccgagcaggacgcgactgagggtgaggacgcaggggaggcggcggcagcaggtgggaaattgggcggagcgacagcagggccggcggctggagtggtggtggagtcgtagatgggatcggtggtggctggggcagaggtggagtcggcaacggaagacgaagatcgacgtgaccgcgataccaggttgtcaagggcgttgatccctagggtagctggcccctggctacggagttcgtagccacggtccgtcttctccggcgaggtttgcccctccgccgcaggcttgagagttacgagagaagggaagaattgggacaataaccaaattgcttaatttctggaatgtgccgattacagagatatatggcctaaggcccaactaaccaaagagctaattgctcctaaatgcaagggctaataacaggaaactaattatcctttccatcctagccactgaccgtggcctgatctgccgcagccgcgcgttccgcagctcggcgaacgtctcgcgctctgcggcgtcgcacatacgtgcgcccccacatgacatgaccaccagcataacattactgctaatatattatgcacatatgcttccttcaaaaatattatgcacaacacaaaagtagttgcagacttgcagtaaatgcaaagttcactagctcaattgaagcatatttctccccgggaaaacaaccaaactgcaagggccatctaacaaacacagggaggatacaccatcatcgaattcaaatgtacatatctcgtggcagaataagcccacttaagagcctcattggtcagcctaataagccaaagcaaaagctaaaatttaaaatttcgaacttaattttagagttaattttaagatatttttaatgtaactttgattttaagttgctacgaacaaatacataaaaactttacctataaattaatttgtattccctagtaaactgttttggtttattagaaaatatgggtaaccgatgaggctctaagtttcgaaatttcacccgaaatttccgttgacccttaacaattacaagaagacagacatgtaatactgccacacagatcttcgtaagatcgtaagagacataactttgcagcggaaataatacggggggatttgaatccttgcggcggatcagcacatggattccgccccaaacttcatcgtgtccgcccagaacttggcctcctgcgcgcgggtaaaaccccactaatcacctggatccagcgtgttagggtttcgagggcacggaacaaatcgcgccaagagagagaagaagaacaagcggcgggtagatctccttcttcacgacgctgccgctcgccattgtcacctgctgctgcgaagctctctttctctctctcctctcttcagcctcacttcctctttcttctttcttttgggcttgactcgttttcctcttcctgggccggctcggcccggtctgactgctaccatgggcttggccagcgagtggccaagacatattcgtattcggtcacaaaatcttatatactcagcaccctctctcaaatcaatcacagccgagccgccggattattgcggccaaaaatcatacgtgcaattcagctccagtctcaagaattccaaagatatatcatcaagtcgatcaccagccatggtccctctagaaaacctacgcgacatgtgcggcgacatcatcgagaaggcgaccctggcgcgagatctcatggtacccatcgcaagccaactgatctccgaggacagggacaggtacaacgacctccatcgacattgtgtcctagcccaggatttcacgaacttcctccagaagctcaacaaggtgagcgcgctcgaccaggtgtgcacggacatggtgacgttcggtgccattgaagctatagccttgtgcgagaggccgagcaacgccttgattgtctttagggatgaagacagtgtagctatcacggtccataggcaggaagaggtcgaaaatgggctctatttcgcggtcccgcctctccaccttgccctcccatcctgtttcatcgaatccaaaattatcaaggtacgtattagtttgatcgatgtatgtatgcatgtatgtatgtttcaatctaatctctccaaaagttttaaaaaataaactagtaaagaattcagactctaataacttttaaaaatatatgttctaaaatataagagattatctgttgtcctatgtcaaactatcctaagtttagtttaattaagttttgtaaagtagagtaataacatcaaacaaataaattataagaaatatatttcataatgatgcttatttggtatcataacacgtaaacattcttatttcttcttttttttctataacgaggtaagaaaatctaaggacgcatggcactaatggcactgtgcaattttatctctattttatgtagagaaaaagaagttagctagcagggacaagtaattcgatctctagtactaacaatgattttttatctaaaccatgcataaattgtttatgaacaaaaaattgttatgctaactatcactagaatcaattaggtcgctctgtatccatcagatccgtcaagtgaaggaaccacgaggccagcatatgatgcagaagctagcgca

SEQ ID NO: 5399 - DNA, 4405 bp, Oryza sativa
tattggtgggaagagagggggtagaagggtacttgcctcatatagtgaatcaattttatcaaaagactggccattagcatggagttctgctcctattcttaccaatcaagcaattatccctcctgaatattcttggggagcatttcgactaaggagtcctcctgccttcacaacagttctgaagcacttgcaggtcaatgtcataacatgcttatatgtttctatcttatgaaaatgttctcttattttcttttctgaaacaaagcagagtgttgggagaggcaatggtgaggacacactggcacactggccaacttcatcaggaataatgacggtggaagatgcctttctacggatcttgcaatacttggataaaatatggggaacaatatcttcttcaggtagtgcaaatgcaccaaaattatgttacctccctgtatatgccctacatttgttgccactgggtaacaatagcttatgttattatcattttctctttccttggttttagttactagcagcgattttttttttcactggaaaacacttgatttacttacgcttcattgcatggccatatttgagtacaatcatgcaaagcatccctgtaggatttaggataagggttgaactgactagattcatatgaagggtcaaatatgtactccctccgtcccagagacatcattttttgcctttatttgtcccacaaaggcttcatcattgagacaatcaatgcattggagtttgagaaagtgggggacaaatgcattgaaatttgaaaagtggaggacattctagtatttgattttgtattgggacggaggtagtactggctaattgtgccaggccggcccaagataggccaaccagtagctggttaattgtgaggagtaccaactttttcttgtgagtttgcatgttttgctcctagtaagaattttgaaatcttgaaccgattcacaatgcactcacttgaagtgaagttcattaaaaaaaattttcatactgttattcgtctcgggatgttaaaagggaaaagggggtaaattgtaagcttgttcaatttaatattttgaacaacagttgtctggcagatcaaagcatttcacattgatcttactttcctgaggttttattttgaaaacccatggagacaacatcatcgtattgaaattgacctgaaatgggcatgcaatcttccaatagaacatccaaatttgatatttgggaacagctttgtagactcttcattttgatatttaagatgaggtatttagagtggcttgcactatgtatacaagctcagtcttgattctttttttttttggcaagaattattatgttgttacttcttcctgaagaaataaagatatatcatgaacaggtattatcttgtcagtgtggtcatgtatattgacgattcctataagtaattatagtaattactatgtcatgccctgtgcatatgcttttttatttgctgtataaataattaaagatagccacacagcggaaaactgtaattagtttttgttgctttggaaagagatatatcaatactctagttaagttgtatttctttctttttcagagaaaaatgagttgcagaccctggcttttataccagttgcaaacgggactcgcttagtcacagtgaaatcactttttgctcgtctgacaatcaacatgtcgccttttgcttttgaacttccaagtctttatcttccatttgtcaccatcctcagagaaattgggatgcaggaaacccttacaaacacttatgcaagggaacttcttttggatatacaaaaagcatgtggttaccaacgcctgaatccaaatgaactccgcgctgtgatggaaattttagacttcatgtgttctggtgtcaaccaagccacagatggatcagaagacatatttgattcagtaataccggacgatggttgcaggctggtatcagctgtatcgtgtgtatatattgacccatatggttctcatttactgagtaacatagatacatccaggataagatttgctcacccagatcttccccagaatatttgcaacacgttgggcataaagaagctttctgatgtcattgtagaggtactactattataggatctttctttttttatggctgtaagtttaattaattttgtatttttcaaataaacataagttttttcccttgtcaggaactggatggaaaagaagaactaaagatggtgaatagcatttgctctgttactctggacaaaataaaagagaagctgcttagtaaatcgttgcaagatgcgttaaggattgttatgattggtgtatccaatcattttccttcatttgaagcactcaatctggcgcagatagaaagtgtactaaaggatatatcacagaacctgcagtttgttcagcgtctccatactcgctttctattactccccatgctccaagacgttacaagaagcagccagcgtcctccatttcctgaatggtcaagcaatggaaagcacagaagtgtttgctttgtgaacaaatccacgggtcaaattctagttgcagagcccccaaactttttgacaatacacgatgctattgctattgttgttagttacagattaggggcacccgtgatcttgccgattgcttcagtatttgcatgcccagatggcacagagaaagaggtgcttaaaatactccgtctgggcactgacattggagtttcaaaacgtgaaggaaggtacaatggttccctgggagcagagttgttgtcccaagatgctcgccaggttcaattccttcctttaagaccattctatagtggagaaattgtggcatggaagacggggaaagagggtgaaaagctcagatatggcagggtccctgaagatgtaaggccatcagctggccaagctctttacaggtttccagtagagacttctgctggtgaaacttgcatgctactttccagtcaggtttactcatttaaaagcgtttcaatggctgatctctctcctgcaccattgcaactggatagtggtagagctgcaggtggacagcagggcttctcacccatcaacacaggaactgaagctgcagatgatgtggttagttttatttttgtgcaaattctagttttgctagctgtatgtgttgtcgtaatttttgtcgtacttcgatttacaggctactggccttgaatatgggaaggtatcttcaaccgagctggtacaggcagtccacgatatgctttcagctgcaggggtaaggatggatgctacaaaggaaacgcttctacagactactctttccttgcaagaccagcttaaagaatctcaagtggctctactcgtggagcaggtttgtccacttcgatatcttcttgggttgttttatattcatttttattgtcaacatcaagaatatgttttgatcagttctgtataccataagagagtagttgtgacccgtaatctgtagcggcacctaaagaaaattgatgtggggaggcatttgttgttgaacgtcatactattggatgctgctgcacacgctgtgttcaccatgctttctttgagatggagatgagggtgggttaagaatttttctaggatcttcaggcattcctttttatgttcattatttgcacagagaatgtatactatcaggttataaacaagctaccaattttagggagccccaaacttcataatttgcattgcctatcatattatattgtatcgtatcatataattactttcttagctctttctgcttatgttgtatgttgtgggtattgaaatttgttttaattgtcactacaggagaaagcggaggcagcagttagagaagctgatgttgccaagtcagcatggtcatgtcgtgtctgcctgaatgcggaggtcaacatgactataataccatgcggtcatgttctttgtaatcgatgctcaagttcggtttcacgatgcccattttgtcggacgcaagtatctaggatgatgaaaatattcaggccttaatttctctttctacaactttcgctttctattagtatgtataatattagacacgttagttttttagctgtaaaactatagggctgtaaatcgagggtgtaaatatacattatagtccatgtacagctacggtgcattttactgtgccgattctttggaaaatcgaagtattcggttccagtttgaggcgaaatctatctttttaaaactgggatgtctcaagacatcttaggtcccgctcttttttctaacaagagttggattaagattaagattttcgtggcacgttttttaaactactaaacggtgtatttcgtgtgaaaactttctatatgaaagttgttctaaaatatcatactacctccgttttttaatagatg

SEQ ID NO: 5400 - DNA, 45258 bp, Oryza sativa
  unsure (1)..(45258): unsure at all n locations
gaagagaggcaaggttgttttgcaaatcttttgtttgaagtccattttgaaaccactaagtgatttatttctttctaagtttgggccgaaaagtgacttgcgtctcgattcgactttaagagatgtttttcaacaactcaatttgtaatgtaccgacctcccgggtcagatcattacttctcggctcacagagccatttcacttgattaagcggctcctagagccttattcatgttctcgaactcccagagtccagctgcccaacaacacaacgatccgcttccactcgggaagccaagtctatgatgcccgcagacatcctgaatcacacagattcgtttcttgaccactcaggtcatccatctgccacataggctgattctagtaacgattcccaatccacaacaatttttcacaaagcacaggcaaacaaatctacgctacaggaaacacctcgcatccgcccatgaccgtgggcacggctgttcgaacagtttaataacctctgcagagggggtacactttacccacacggcattactaacccggatcacccagcccgttcagaacggccacgtatggagaccttgaggctttcatgacaaggcaattcgaaagccgacacaggtttaccatatgccaacgagaggggtcccagaccaacacccggttaggtcccagaccatactatgccaggaagcccgagggttctccccgataccaccccgttgaatccacatgtctcttggcatcatggctcccctgattagctaccggggtcggcttgacccggtcttggccgagctgcccctttctctcgggccgcgccctagccgcccgagggaagtctgtttcccctccctctttcttttcttttcaaaagggtttaattaaatcctttttcctttagaacaaaaatccaataatcttagaaattcaatatcttctcaaccgtatgtccgtttgactccgttcaacttccaaaactcctcaaatctcgatatctatttaatggcacgtttagaggtcaataatagggctttatttttgccgtttgttgagctgtcccgtttcgcgtgtagtttcggagcccgaagacccgtagtgcgaggatttcgaggatcaagctcaagatttcgagcaaggcaagtcacctttgatcatcttgcacctataatttaaatctaagtatttcttttccgcaaatattgcatgaataagtttaacacaagtatttcggccgcggcttgcgagatagcttgccggccacaatcctaattgctgcaattaccctccttgaattattgaacacttagatctcctttgtcgactgttgtgcttcgatgcatgggccttcgggctcgagcatcggaacacttcccttgaaatttaaaatatccaacgatgggtaaaacttggggttttataaaagacttggaaaaacccgacacctgggtaggtgcttgcgaactaaataaatttccaaaatcgtagatcggggaatgtaccgggagtacggtttcccgctcttgcacttaaggaccgttttctttggaatttcatccaaacataaggcaaatgtgaccacataggtggaatgggacgcccctggctgagtaattagctaatcaggggagccatgatgccaagagacatgtggattcaacggggtggtgccggggagaaccctcgggcttcctggcacagtatggtctgggacctaacctgatgtcggtataggacccctctcgttggcatatggtgaacctgtgtcggctttcgaaatgccttgtcatgaaagtctcaaggtctccagacgttgccgttctacacgggctgggtgatccgggttagtaatatcgtgtgggtaaagtgtatcccctctgcagaggttattaaactgttcgaacagccgtgcccactgtcatgggcagatgtgaggtgattcctagcgtagttttgtttgactactgctggtgaaattactgttgtggaatgggttcgatgtttgaaaaatctgcggctgatgggatcagccaggcccgggtggccgtttgaaagctgttggacgggtgccaaccttgaatcaattcaaaaactgatacattgcacatactccgaccggacgagacacactgtctcatccgtgtcgtttgagaagcactcacttagttgtttcaaaaaggagtttaaataaaaccaattgcaaaaacaacagcctttcttttgaagcctgcattaaacacttaattcccatggcttgctgagtactcctgtactcacccttgctctatgtaaataatcccccccaagttgctgaagaggatgatgtggatcctgctgatgaggagttcttccaggagcaagtcggctacgatgagttttagggtttcggcctagttcccaagtcgcgcctgtgatgaatggtccaagtcttggcttccgctttcccttttgtaatgcagttgtgacctcgggatctgtccacagcccaacttgactgtactcctactctataataaagagacctctgttgctatgatattctgtcttcctgtgataccagcactgtttcctgagactggtatcgattaacaggttaatttggagcgtcacaggctagttccgttcggggctagttcggggcgtgacaaatcaactggcacgctagtacacccaaaggcgagctttggacctgcactggagttaagcaaatctcccaggcctcgtgttttctgtcactacatagtaagcaactattgtataaattaaccattagattggctatagataaattggagctagtagtgggctatactattaagctttctcagatattataagccaactataaatacatattgaggagataaaagaagagagagagtagcagcgggctacagatctgtaaccagctgcagtacggaatctaaaacacaacatgtgtataatagggaccatatattaatagtgtagtatatgtgatatgtttatagataactatcgtataaattgattattaaagtgatcgtaaatgatttaaagcaattagttaattagttagctacaccactagtacattaaacttgctctaatactagtagtagtgcaactaggactgtagtaggagtatgtaatcatgatgttgtacttgctatcctgattaggagttgtgactgacgcattcataggacgagacagtatgattaaacggaacaatgactgttcacttctaatgacacattaattcgaccaaaagggtgtgcatgctctcacctggagtggtagtagtacagcgaagagggatcctgattttttatacggtgggtatcgcccaactggtgaccaacagtacatatttctggtgtactctacacaaagaaattgcacagttttttttctgagtatatatatatatatatatatatatatagagagagagagagagagagatgagtgtgaggtgggtgtggggtgggtggctgcaggctatctgcgtggggtgtcagagtctgcctgtctccctctcactgctgctgccatctgcaacctgcaccgttgcagtcaataataataataaacaataacattcaagtggggcctctcgctactgcgcatggtggcaccgtggcagcatccacccgcagggctcctctgacaccgaccagcattgcccattaactatagaaacccatagtgccttctactgctacatgcaccaactaccattcgacgcccgaaagattttactactaccctagaaatactgttcttgcggtaatattcagaagaaagcccccaaaaaataataatataacttatctgaaaactaaattgtgctcaaaattatttgaaatgtataaaaataaaccacaaacatcagcgctaagcctggtaatgtcaaagtccaaaaacaccatatattttgacaccaccatgttgtcgttgcgtcctaaacgagttgttcaccgagactaggccagaagtttaagatatcaacgaggctgtggtggcgctactttttatcctccgtcaccattttgtgctaggtgagttgtccgcaatattagctaggaatttcgaagcttgacgagaccacaccaacactgtatttgatagagctcgatgagggatagcaatggcaagctctaggtgtatcgtccttgcaaggttcctttgcactaaccacttatcaggtggatgagtagttctatgctaagatcatggtttattttttatatcaatgtctgatgtggttcatcgttgaaactaaatttttccacaaagatcgaaccgtcaaaaatttggatagaagaacaagctatacgccatgcaaagggccttattgtttggcttttttcatagtaagccaaaacggcttattagagaataaaaataatttgtagataaaagttttatatatgtgttctcggtgatttaaaagccaatgccgtaaaagaaactacgttaaaaatatctcaaaatcaatgtcaaaattaagtttaaaaattcaaattttgtttttttttctttagttgaataggctatccgatgggagccaaagtttcccggtgacagtctagactatagagacgacgaccaaagcgcttacgactacagtaaatacggcatcaagcggcggtggccagttgctcgcgtcgtcgccggggagaggggagacgcgaggaacctgtggagtttttgcgggtgagattcctacggctgcgcgcgcccacgaggggggcgcacagcagattctgcagcgcactctctgctctgcctctgcatcttgactgaatgacctatcttctgtacccgggacataaattatcggagttaaatatccggaaactattcaaacaggccatcgttcgcacgcctacgtttttcttttaagaaaaaaaaaatatgtcctctgcttcgctcacacgcacgtactactacgtgggctgcttggttgcaagcatccttttatgacaaatctgtactgtgcggtagggttattttccattcttcctactcctacggtttgttcttgacattttttttcacaaagaaaaggacggaaggagtataaagcatgtcgcttgtccaagcaaaagaacagtagccagtggcaaacaaagccctgtttaattcaccccaaacttcccccaactcctaactttctatcacatcacatcacatttaaaactttcctacacacacgtaaactcccaactttttttccaaactaccaactttccccaaacttctccccaatttcagaaactaaatacaaccatagtaccactggacaaacgagtcctgagaatgaaagtgattgactaaaaactattatggccgagtttagtttcaaagttttcttcaaacttccaactttttcatcacatcaaaacttttctacacacaaactttcaacttttccgtcacattgttacaatttcaactaaggctgtgtttagttcacaccaaaattagaagtttggttgaaatatgaacaatgtgatggaaaagttggaagttcgtgtgtaggaaagttttgatatgatggaaaagtcaaaagtttgaacaattattttcgaactaaacacggagtaaacttccaattttatcatgaactaaacacaccctatgtgtaaatgtctcactgttaatgagaagtgaaagatctataaatttctatccggcctagaaacagttgaagtaataacatcactaccttaactaaagatgttgggtttttttttaaaaaaaaacacattataaacgtacacccacctgtaaacatatacactcactttgcatattcggttatattccgacaatataaatggcaaaacttgaaaggtgccatgcatagggaaaaaaactgtcatgctaaacaggaaaatacatacttggtgtcaactacttcgtgggttattatattttgacgaacgcattagtgttaattcacactataatatatttgttgaaatacttttcactaaaaacaccctaatcgctgaagcggtaaaaaaagattagatcttatttggactatagggctcgtataatatgtttgatatgtcattttaaagtttaattaattagataattaccttctagtttacaaatgtctagaacttcaataacatatctggttcatatgatgtcacaataaaatgccagtccgagtgattttctttctaaccgtcgtctaagccgtacatacgtaaaatactccatttgtttctaaatatttgacaccgttgactttttagcacatatttgaccgtttgtctttttcaaaaacttttgtgaaatatgtaaaactatatgtatacatataagtatatttaacaataaatcaaatgatagaaaaagaattaataattacttaaattttttaaataatactaatggttaaacgtatttaaaaaaatcgatggcgtcaaatatttagaaacggagggagtatatataagttagactcatgataatccaactctatacgttaatattgcaattttaaaaggtaaaatatactttttatgcaggactaattgactgtattgaaagatagttgatgcatttacgtagtagtacagtaacgttttatagaattcacattcgtttaattaaaacccaccgtttattaattagaaaatgtattaataaatggccgaaacctgatatttttggcaggcaggagcgcatttcgcagtattaccctcgggttttcttctggatccggaaacagcctccggctcgcaagtcttaaatgcgcacggacgtcgcttcccaccctcaccccacccttccccgcccattacaaaaccccagccaccgagagctctcccgctccactcgccgcacaccaccaccctcacccctccccccatccgcgtgatctcccgagcagctagagcgcgcgcccgcggcgcctgtactgcgagaccgcttcgctcgcttccggtcggtgaagaggcggtcggtcgcagctgaagtagttgttgcagagatgatgatgatgagcggtcgcccgagcggcggcgccggcggaggtcggtacccgttcacggcgtcgcagtggcaggagctggagcaccaggcgctcatctacaagtacatggcgtccgggactcccatcccctccgacctcatcctccccctccgccgcagcttcctcctcgactccgccctcgccacctccccttccctcgccttccctccccaaccttcacgtacgttacacacatcctcctccacgtacgtacgtacgcgttgttgccgatgctaacaaagtccatattgtgattggtgttttcttgggaatgcagtggggtggggttgctttggcatggggtttgggcggaaggcggaggacccggagccagggcgatgccggcgtacggacggcaagaagtggcggtgctccaaggaggcggtacccggacttcccaaggtactgcgagnnaagccaccatgcaccgnntggcaanngaaccgtctcaanngaaagnncctgtggaaatgtccttggccacgccgccgccgccgtcctcctccgccacctccgccgcgtcgaacacctccgacggggtngcccccaccaccaccaccacctcctccccggcgccctcctacagccgcccggcgccgcacgacgcggcgccgtaccaggcgctctacggcgggccctacgccgcggccaccgcgcgcacccccgccgccgcggcgtaccacgcgcaggtgagcccgttccacctccagctcgacaccacccacccgcacccgccgccgtcctactactccatggaccacaaggagtacgcgtacgggcacgccaccaaggaggtgcacggcgagcacgccttcttctccgatggcaccgagagggagcaccaccacgccgccgccgggcacggccagtggcagttcaagcagctcggcatggagcccaagcagagcaccacgcctctcttcccgggcgccggctacggccacaccgcggcgtcgccgtacgccattgatctttcaaaagaggacgacgatgagaaagagaggcggcaacagcagcagcagcagcagcagcagcactgcttcctcctgggcgccgacctccgtctggagaagccggcgggccacgaccacgcggcggcggcgcagaaacctctccgccacttcttcgacgagtggccgcatgagaagaacagcaagggctcctggatggggctcgaaggcgagacgcagctgtccatgtccatccccatggccgccaacgacctcccgatcaccaccacctcccgctaccacaatggtgcgtagagtactaaccttcgtctccactgatcagaaccgtttcttgattcttatggcgagccgtgctgacgatgatccaacttgcttcctgtttggtcttgtgcaatctgcagatgattaatctcttgaagaagccaagaagtgatcaacacgcggaagaaatcaacagcttctttcacggcgtgcgagctgcatgctgatgctccaggatcgatcgatcgatcattgcatctccaaactaatcacgcttcgatctttcaggacttcatcaatgacaggccgaaacctcctacgagttctctgatgatattcttatttttttcccacttcttttcgttgagctttttgtaatgttgcttcgagtgttactcctacattttctccgaaatggcctcagaatgatgcggtcgggctgattaattaggttagactcttcctgaaccaactaggaatagattttctgcctggttcctgtcagtccttgtaatatctgcagcagcttgtgagacaagcgtgttcgcttttgtgaacgccctttttcttctttccgattcctctgcctgtgatagtactcgctccgaaaaaaaaaaaaaaagcaaaccgtggattcttgggtcaacgtgtccgttttatattgtccgttttatatgaaatttttttataattaaaatttctattgttgttagatgataaaacatgattaatatgtgacttattttttttatatattttttttaaataagacggacggtcgacacggttttttttttttttaagaaggagggagtaagtcacatctctggattctgctgaaaagctcactagcgccatcctgcttcagagaatactttatgctttctgacaagtcggtgtaggagtagtagtattgctaggtgtactccactcccctccttaagtacattaccagtgcaacgtaaaacagctttgctcctgagcaacggaaatgcttaataccgtactcttgcacttcgtcagttggttgagtacactgtgcaagtaccaaattggtcttcttaagtgttactactaggttgatcacttgttgaaccgtttaggctgtcgatcattagcattcagggttatcactgcaaagtcccaaacaaaaagattctcccagggtctattctcccctgaaccgttttcccattgaccggccaatgctgcaagaagctggatgcagagctaggagtagctgcagtgcccccactcctgcaccttcctgcagacactcagagagagggagagatggaggactgtgatgactgaccagcacccctgctttggtctccatggattcaatgccaactgcactgcaattgctgccggccccctgagacaatgtcaggcgctgtcagctctcgcgtccatgcgattgaatgatccattgctggcgtttggaccgtcgcctctcctcccctgcctcgcacacagtctgcagcgcatgcatgcatccatcatgtacagtgcagcattggacacaagcctccacatggagtaattgttactgaagaaattcccagaaattacatgtcccgcgttacagctttcggttcatccaacagcagaaattaacctgagagagtgtttgggaattagtactaaactttagtttctcttctagagacttatgttttttagaaagaggctactcccagacaccccctcagttttcgtagtactggcacctgcctatatgtgctggttttcgacgcgtactctactaatctggagtttactccaaaacgaggaaaaactcagctgtcactgtatcatcttcatcaccgaatccagcggagcacgtactgtatgacgtatctgttctgacagcgaagttgaacaaatccacggcgcccagtattcccacgacagagcccacatgagcccgtctccagcacgtacgcgtacaataaaaaggctgtactactactctgtatacacatctgcggctctgcacccatctcgtcagcaaaacgaaacgcatgcatagagaggagaacgttcaaaaccattcattcatcaaccggaggatcagctgcacaagcaagccacagtgcagcatgcggtgaatcgcacgtggagaggctcaggtgaccccacgacttgcacggttttggctcgcaatatcgcgacgagacgaggccgtgacggcatgttattctgctcacactgtcttcgcctcccccactaccacgaccactcgcgtgttaagcccgcatgtgcttgcacctgatcccgtggcacgtactccctcggtcaaaaaaaaaaaaaagagaaagacaaacccagaccgtccgtcttatttaaaaaaattataaaaagaattaaaaagacaagtcacacataaaatattaatcatgttttatcatctaacaacaataaaaatacgaattataaaaaattttatataagacggatagtcaaagttggatacggaaaactaggatttgtcttttttttaggtggagggagtaatggagattttttttcccgttttggacgggttgttcagtcagtcatggctgggagaaaaggctgtggagatgagatttttagcagcggtgcacacatgcgtgcacgggcaacctagacagttgggattttactactgacaggaagaggttgaattaaactagtgtcgtcattcgcggcaactctgagttaggacagactgattgcccagattattcggtttttagtgtatcggcgagggcatctgacgccctcgggatatgaggccctgcaacgtggtggtcgcgggcgccggagttctctcccggttagtttacggagcaggaggaggtcggcgactacttctactacgctctcgttcagtttcagattcttaccgctgtatcgtggcgtttagtttaaaatccctcgcgcgtttggggtgaagggatccgatgtgttttttgcagggatgtggcctggttttccgtgtgtaggggagggagatgtcacggcgcgcgacagcatttctcgtgacagccgcttaactaaacgcctcaatctgagagctggtcgtcagggatcagcatctgtcaggaggccgcaaccagtggttcagctgcaagtgttaagaacagtaaatgatcagctggtggtggtagtagtgctgctgctgctacttgcagtccctgcagtgtcagctgaacgtcaggggacccttcaattcgctggaattgtactgcggtgacatcatacaaaccctggaccaaacgaaacaaaactaggaccttgatcacttgatgcggctcggcttggttggctactggatttaacccactctttgctttcgtccaccctcgatggccggtttccagttgagtaaacaatgtacagcttgtgttgttcacaccaaaattagaagtttggttgaaattggaacgatgtgatggaaaagttagaagtttgtgtgtgtagaaaagttttggcatgtttagttcacactaaacttcccccaaactctcaactttctatcacatcacatccaaaactttcctacttacataatcttctaactttttttccaaactaccaactttctccaaacttctccccaatttcagaaactaaacacagcctttgatgtaatgggaatgttgaaagttcgaagaattattttggaactaaacacggccacagtttcttcatagatttgttgttactactccaggagtactatcttttataccggtcaacgcacagcttacagcaaaatgcaatcccccccccctgctagtgaacagtgtctcatatcccatccaatgacccaaaacctgcacctgattgaactactcaatgaggctgtatttagtttctgaaattaggaaaaagtttagggaaagttggtagtttggaaaaaaaaaatagaagtttatgtgagtaggaaagttttggatgtgacgtgatgtgatgaaaagttggaagtttgggggaaatttgatgtgaactaaacatggccgcacaatgatagaagtgcaatgtgcaaaatggtaagcaatcagccaatcaccacaatactggaccgcgttatcactcatcggtgtcaaccgctgcggcaacgtgggccgaggcttcgaattcgccgcgccgcgtgacggcccatcagaatacgagatgggccggcccacccgcagcgaactcatccctgcccaggccagcccatccactctgggatattgtggccgtccgatgcgatcatgccaaatctatccaacggctggtgtatctgaagcgtgtcgatgtcttcctccgaaaggagcagcctccacatcaaccgcctctctcattaattagcggaccatttctaattcacccctcgcatcttttcgaattttcgagagctcaaagcctcgaaccattcccttcttcctcgtcccaatccaagttccaaccatccagggcgggggttttcccgttaatccgcgcctctccgtgtcggattgaattgaagcggagagggggaggaggaggtggaggtggaggtggaggagggcggcgggtggcgatggcgatggcgaggctgacgccgaacggcgtggcggcggcgctggcgggggacacgaacctgaagccggtgctgcagatcgtcgagctgcggggcgtccaggtcaacggcgcgggcgtcacgcgcggggagaggttccgggcggtggtctccgacggcaccgccgcgtcctccgcgctcttcgccgcgcagctcagcgaccacgcccgatccggcgccctccgacgcggcagcattgtgcagctcagcgagtacgtcatcaacgaagtcggccccagaaggttttgttgcctcctcctccactttcccccccattcccctgcctctgatcgatgtgtgattgcgtgcgatttttggcccgtttcgttttagggttcatgcttgcccctggttttatgtgtgtcagtctgcgtgtggtttagattcccgctttcagctagtttgcaatttaaattaatacttagtacttgccattctgttggtaaattgtcgatgagcttcatgtttcctactagatactagtagaggtgcatcaaaatttttctgacaatggttttgtttatgacatcatttgatcggtgcttgttaaccatttgtccaattgattttaattctgatttgaattattattgtcagaaagaggcctcggtattgcagtactaatcagtggtaactaaggctgtcctgtgacacaaattggtgtttgtcgatactcagtagttaattggctggcattagtattaacgattacaaaatagtgtgatatatgtgcttgggtagcctttggtgttcgccatttctggcaggtagcatgtcaaacgatgaaggtaatatggtcagtttgactactacacactttacagtgttgtctgatttagttcactaatttagttgtgtgcctttttttctctagccaacaaatcgccatgtttgggtgcatcgatttggccaatgtagttagatattgatcagcattaatgctgcaactgtctggtgctgtgaacagtttgggtctaagtactaagtattttttatcttttagctgtagccattcagttcaacacaacaccgtactaaatgcatttcttttgtatctggttcataagtaattggaagcatagttgtgtccattcaaatcatgttggcaaggcgacaaatgcaaaagtgaagataagtttctgaccaaaaggtgttgtaattaaacatagtattcatgtagcagtgtgaatcatcatattctgagccttttgcattcttattttcaactgatctactggttgatagagcagaatcaagaattgttttttgttggttgagctgacttgttgcaatacctgtaggattattgtcattctgaacctggaagttcttgtttcggagtgtgagataattgggaatcctacagcgctttcagaaactggatctcctatcccaaatccgacaagagtagagcaatttaacggagcacctcaatatggtttgatggcagggaactcatcaaatacaaccacaaagcctagtgacaatgttccattgttccaaaattcgatggcaggaaactcctctaactttgccactaggcccagtgacaaagttccggtcttccaaccaacagtccagccatcttatcgccctgcacctaattacaaaaaccatggagcaatcatgaaaaatgaagcccctgctagaataatccccatatctgctttaaatccttatcaaggccgctgggctatcaaggctagagttactgccaagggagatatccgccgataccataatgctaaaggtgatgggaaagtattctcttttgacttgcttgattctgatgggggagagatacgggtgacatgcttcaatgctcttcttgatcgattctatgaagttgtggaagttggtaaggtctatgtggtatcaagaggaaacttgagacctgcacagaagaactataaccatcttaacaatgagtgggagattttattggagaatggatcaactgtggatctttgtcctgatgagaacagttccattcccacccagcggtttgacttcagaccgatcaatgaaattgaggatgcccagaacaatgctatccttgacatcataggtgttgttacatcggtcaatccttgcaccacaatacagaggaaaaatggcatggaaactcagaaaagaactatgaacctgaaggatatgtctggtcgaagtgttgaggtaaccatgtggggtgacttttgcaacagagaaggctcacagcttcaaggaatggttgaacgtgggatctttcctgtgctggctgtcaaagcaggaaaagtgagtgatttcagtggcaagtctgtcggcacaatttcttcaactcagctcttcatcaaccctgattctgctgaagctcatagtctcaggcaatggtttgatagtggaggaagagatgcttctactcagtccatatccagagatatcacgcctggagcatcaaggaatgagatccgaaagacagtagcacagatcaaggatgaaggtcttggaatgggggacaaacctgactggattacggtgaaagccaccgttatattcttcaagaatgagtccttcttctacacagcttgccctaacatgattggcgacaggcagtgcaataagaaggtgacaaagagtactaatggcaattggacctgtgacaaatgcgatagggagtttgaagagtgcgactacaggtatctcctgcagtttcagattcaagatcactcgggaacagcttgggtgacagcattccaggaggctgggcaggagttgcttggctgctcggcaacagagctcaacgcacttaaggagcgcgaggaccctcggtttgcagacaccatgctcaattgcttgtttcaggaatatctgctcaggctgaaggtcaaagaagaatcatacggcgatgagcgcaaagtgaagaacaccgcggtcaaagtggagaaggttgatccttcgggtgaaagtaaatttctgctggatttgatctccaagtcctcggcgctacattagcagactgtgctactctatcagctgctcgctcgtgcgtggtgaggtgagcgaggtgaggtgttgcagtgcccatagccctcgccctcctgctcgatttttgtgccggtactttaatattaacgccacttaatagtttatatccagattagtgctttaatagtttatatccagattagtgctgatatttccatttttgtgccggtactttaatattaacgccacttaatgtatcagcttttatacctttttctcgatcaaatgattgccttctagctgcagtgcaatttctcccttagttttggtttgtacatgcctgcaaagccttactctgtcgcgactaagaaatctcttgtgctcttccatgcaatcgaacatctgttttacattcgcaaggctattaggacttgggttagatgcaaacaagcggatccagagaagaagttaatatccgtgcaaacgaaaaaggagcatttattctttcaataacaaggtgtttaaggtgactatgtcaatctcaaggtacgttagtcaaatctctcggagaacataggaagtgttcgtgtgtagaaaaaggagcaaacaatacatacgtcgactctttcttttgcacgagaacgcgagtcgcgatcacaactttgctatacaagtgtggtattcacagacgtccaaaagcgtacatcaatctcagtggtttccccctctatttgcatgcaacacgtggatcacaagaaacccgaaactttcccctgtacaaccgtagtgctctgccctgaaaacttgatcggcactctcacgtcgccagcttgagactgcatctcagccagtttttttactcgtagcagaatcgacactggtatcggtatggcagaaggattgctcttccgtggacaaacaccctgttcagtggcaaagagaaagttgggtaaataaatcaagatgcaaagcaaaggggaaaaaatgccagaacgtgagaaagtaggtcgaacagaacagcctgttcatcatacatcgttttcagtggaaagttgtgtctggctggccctgatcagattccgccatttgtcctgaataagcatcatgattcattagaagaaataaaatgcacgaacaaacctaggagttgaaaaggcaattgcaccttaagatccaccgaggtgcggtacgaatatgatgagaaggctagtcttctaatctcggaccatttgccagccccatatcgggccacaccatcgaccagcttcacaacctcacacaatgtccatgctcgatgatgcttccgcttcccaccccgctttgttttgggattgtcatcagagtcgcaaaaatccttgtcctgcagaccctgaacatccttttcacaagatgtttctacatgtactcctttcttcccagtgttcttctgctagcaagttgaagaaaaatattatataacacataatacagaagtagattacacagcattaagccattgaggtactatgtgtttcaaatatatttctagtcagtacttcattctgaagttggattttcactatattgtccaacatgaagaaacatcatactagtggaacttctatggctttgcttacatggttcttccgttcaccttccttttccaaattcactacatctgcagcaggggcctcagtacattccacagaaggctcaggatcctgatgcaataaaaaaaggattcaggtagctacattgagataattataccaaatctaatagcgtatgacacatgaaaatatggttttgtcctaaattattctgaattggtatatggtgcaatatggtacatcagatcaaatggaatattggcacaatgatgaggaaactatcaaataaagactacaatggcaaaatcagttaacaaaaagttcagagatttcccacatttaatttatgaaatatagcacacggtgtttgtaggaagtaccatgggcaaagagtgaaattgtgaaaaagaaaattaataatctgcttgattgaaaatgggcatgagtctttagttagttggcttccaagaacattttcccttagataagtttcttaggtcagatgcattctgagcaggaagcaatttacaggccaaaatgcgttaacataatgctttatggaaatccatattattttgataaatagagaaggtacttgcaatctcatatcaaaagaagaaattctaaaaaggagcagaaaaaggaagcatctaacataaaaagaggacatccctaaaatagttccaaaaatggagtaaccaaatatattgttggtcctgtatacttgtatagtaatcgaatatttgcgcaaatgtcacaatgataataaatggtagtcaaattgtccagagctggaagattatataatgcataggtagacaattaccaaaaatggaatgaagttactcctagggcgcccccttctcatccttgaaacataaggcacatgcacactacaccctccaagagtatcttctctagtaggataggctgtgctcaacgaatcaacctcatgcaaaggcgctatccgtggtctcaataacacctcatcatatacatgcctttttccaggtgaagaaagtctcccagtggattcatgagtgtcaatatctgagagctcctcaatgtatctttttgttggctttctaattctcttagtagttccttgttcggcaaaaatagttacttgtggttcatcattatctgttggtactcttttgagtctcttggacgatctctgttgctcctcactatgataggaaagacttgatggtaaatctctctcatgtccaggattcattacttggtccctaaccaaattagcctcaagttccatctttggtattgcttcaaccactggtatttcttgtttggcacccatggcaataactttataatccctaacaacacaacctgaacttggaacatcacatgaattgatcaaccccattgcaatccgtcttttgagccatagcttgtccttgacagtagtttgacgcccaaatgtggctctaaatgcttcctgaagttctctcattgtaagatcatccaagcagacttctccctttaaaatggaaaaatcaggaactgaactagtaaccccagaaacagattgtcctgcagatgcctcatttacaggtttcgagcaggcatcagccttttctttatcagaagaaaggtcatttaatactgttgattttgtagtctcagtcgaagcattgtcctgttgggcaatgatatttgccccttgttctgtatttagtttatccagctgctggtcatgaacagctgaacaatttgaaggaagaactatcgaatcattcaatgtacataacctgtcttcctgtgaaatgatatgcatctatttagtgttacatcaacttgaatatgtagattgaaagaagatgtatacaggtgcatgtttagtggatggttttaagggaagtgctcaaataaaaatagattgccctgggattgtatttcacacagatcaatctcttattaccacatctttcaatgatctacagtcagtcagatatgtctcaccgcatatcctgtgttcacttaaagaactcagcatcttctcattacattgaagctcatcccatagttttgatccatccatccatctctatgtcagttcttgatgacgataaaaatatgttcctaactagtactaaacaaagttgttacatacaaaagtggaatttgttgagaccgcatacaattgaactttgaactgctaattagacaaaaaagaactaatccatatttttaccatgccagaattagcttgaaaaaaatgaccacagaggtacctaagaacaaactaaacctattatctaatagaattaacatactatctggtcataaaatgcttatactcaatcgaagatacttcacttcgattagtgagggtattgaatgaaacagaaaataggtttagtgaatcatgttcatgatgcacaatggataagcaatatacctcataggtttagtgaatcatgttcatgatgcacaatggataagcaatatacctctaagccagcatctaacttttgtgtctgtacatctgcagtgtctaatttggaaggcccctctgtgaaaatatagtaataagtcaacatctcaagtaatcaaaccaatcgaatcaattcattaatcatgctagcttgcaaactacaatttatcctcacatggcatgatattcagttatcgatctaaggaagtatgatcacccaaacagaaatgacaataaagtagaaattgagatagaataatatttctgagggcaccttcaaactcaggcttcttcactatgcaatcattagtaaaatattcctccacatgtgttacatcgtcaatagaaggcagatcatcatcaaccttctcatcatgaaggaaagtttcaaactgtaagacctcatcctccgtagcaggaataagtgttccatcaccttcaacctgaacattttattttaaagaaaatgtgtttctcaaagaactgactaaacaattggaaccaattatgtatattagtgtatagccaatagaccctatgatgagaacttacccgaactaactggtaaacaacaggatcagaattgtcattcttatcaaagtcattatcatcacttctgttgtccagagcatcttgtggaccacccacctccatagatcagtacaagcttcatccaatacccttactaatcgaagtctaccaaggtgaaattctacagtcagctaataagtttaggattaagattaagtcaattaagtaattcagcaatcctggagagtagagagaacaaatataaagaacatttgcaaggatttatgactaaacaaaaggattcaggtaattgttggacagactattgcgatatgatccacgctatctttaggcaccactctttttcccctattacaaaatgagcaaatccatgtgtggtgggaatgacaaaagcgatcacacaccatagtgagatcctcaaaatcccaccaaaaactactgaactggcagacaggggcggatccaacttgggacatgggggaacaaacaaactgtttcttgtattaaggttaaggctctgaaatcaatagaagaagcttcttccagatctagaagagaaactagggttaacgcaagcaaattccagacaaaagtactcccggtgggagagagatgaaccagaaagaggatgtggatgctcaccaggatcccctccccctgctctgcgcgccagacggagatcggcgcccctcccctgttcagccgcgagatggcgcaaggagcggaggagacgagacgggggattttcttttacgcgaagggaagggggagatacggagatactcgagctgctccactctatctcagtttttttactttaaaactgcacttaaagtttgagatggataatcttgtgctacttcataatatgatatttcgaaatttttgttcaattttgaacactttttgttccatggataattgcgtgagttaattaaaaaaattatacagtgataatggagtctaactagagggcgatggtatattatactccctccgtcctaaattataggcgtcctccttttaagaaaaatcaagctcagtaacttttaactaacaatcatactaaatatatatacgctaagtattatacatgttacttcctccgtttcacaatgtaagtcattctatcattgcccacattcatatagatattaatgaatctaggcacatatatatgtctagattcattaacatcaatatgaatgtgggaaatgctagaatgacttacattgtaaaacggatgaagtatatcactagatttatattttaaagtagtttcatgtgatgctaattttatattcgttggcaacaaaatatagagtaaattaatggttagagtatgtcagtaaagaccatgtaagaaaaatacatgccttataatttgagacggatggaatagaagttaagcaaaatacgatatcatattatataacgagtcaaaatcagtgacacaatgaattctctttgaaaaataatatagtcgaatcgttttttttattttagtcataatagaacttttttttacctaaacatgattgggggactttgagagaagataggaagaggggataatgtcactagccaaaacacatggggggaggggaagttgcttacatccatggtatgttttgataatatactattattattaattttgttcttcactgtaatacgatgtaaaactaaaaaattaacatatattactatttcattattcacttttcttcttattttctcgatcttttttattttcaatgacaatattgctagaggtccgcggagccgataaccatgtgggggtatttcaatgaagctaattttgcatagtagatattgctaactattatctataaacttagtcaaatttgtttaagcttgacagtcaaagtgactcataatatgaaatagaggggtagttgcatgcctatgcattacaatatgatctatagataaaaatatgatttagtttatttctaatccatttttatgagatgttggctttttttatttctttaaagaagttatttagggtatagttttttgaaaagtgaggtcaattttttaagggagaaggagcattaatacttagatggattcttttttatttctttaaaagttttttaaggagaagagaatttttttttgaaagatataggaatatgtttttaaaataattaatatctccctcactgtcgctcacccccttgtcgtcttaggtactcctctaggctttaacttttcgatttcgaagtaaaaaaatcgctcttcactggtttaccaaatccgatcaaaaacgataaaaaccaacgatttttagtcaacgccgtacggaaaactagctaataccgaccggttttcataaattcagacctaacagtttcacaaaagtcaactggttttcatgaaattccatcggttttatgaaccgtgccaccctccgctgccttctctccctcccaccttcctcagtacactcctcctccacagaccacagctagtcgtcgtgccagcctgctcgtacattggagccgaatctagttcgagaaagaaccaccatgatgactatcaggaggaaaataaacatggcgggcgctaacaggtatggtggtaagagcaggtacaatagctgtctataaaccagctataaaacatattttaaagagttaaaagaaaagagagaagagcagctggctacagatctgtagctagctgcagcacgaacttcaaaacgtaatatttgtatgacattgtgggaccatatattaataatacaataaacaattattgtataaattgactattatattggttatagatgatttatagctagtagtgagctatactattgaacttgctctaagcccatcgtcgacaagagctcgttaggctgcatccaagagacaatgtcgcaacgtgggagcagagcagagaaagacatgcggagctctcgtcgcgggctcatgctcaaagggagagtacacttctcgtcggagcttctcgtccacccacggaacaggccggcatcagggacccggagtcccggacacacgcgggcgggaagtttaggcccatctcgattttactagctgcgtggccagcgtgggagcgtgcggcgttgccaaccgccaaccatggcacgcgcgcacgggacgaggcgcgtcggctgccgggagagcgccaccgcgccaggcgcccgtgacgtgcatgcgacggcgtggccgccccgtgcgggacgtttcaaacaaaaacataggcagattggtcgtgcgacgacgtgcgataaaaagtggaggaagcctagactagacgagacaagctgcgtgcgtgtgcgcgtagtggccaatgtgggggcggctgcggcgcagttgatcattagccgcggcgcaatgtcgcggtggattcgctttcctttcgtcgtccggtggaccgcgcgcccatatgcgatgcgccgctgcgcgaaagggaggatcgcgaagagacgtgcggaggacgcgcgcgaagactatcagtgtgggcctgactcgtgaactcttttgggaacgtttttgctgcagcgagtcgatgtacgtgcacgtctggatcaccatattctagtgtaccgaccagtgttcaacacatcaatcattttattttagataatagaataaacatcccggcatttacttatcagagctacatccaattattacaaagtatcactttaacaaaatgtgtagtttaaatgaaattaaacacacccaacaaaataaaaaaccaaaccaagataagaagaacacatttattaaagtctgtttatgaatttccatccatagcttaaaaagagttgcataaccgtcgtcttaagcatcaatcatggtgggtggtgtttcatcgccaatttactttgtagggttcaggtttataagttagttttttatacaagcttttgcgtcggcactggcctgcaccatcatgaaccgtagttagaaaaagagcacgattcgaatatcttacaaggaaagaaattgttcattgtatccagcagagaaacgatgcaccacccccgcgcctttctttgctccgggaaagagctcgctttgccgctcgacggaaagcttctctgttttatgaactaactaacgacacgtacgttaatctagcatccctagcatccggctaaacgggctaaagtaaatggaaatcagtgaacggagcacatgcatgccatacggaagggccctaatagtcacaaaaatttccgatcgtccaaataccgttttcataccgagcgtcattttttttatataagaggtaccgtttacaaccgttaccaagtattgcaaattctaatttctttctgcatcatactgatatcaacgccgagtaatttaaatgataaatatgatcaatcaccgattgattgagcgtcggtttcgaagagatgctatcgattctcgttgttttcactcactacatcttttttttcgcgaactcatcactcactacatcgatagactgttttactgttaacgcttcaatttccactgcgggagaaagaaaatgtacaaattgtcgacgggcagtgtctttgcatgactcgagtttcgctttaccagcacgccgtcaccgcgcgccgcgcagagccctcaccgtccgttcctccccaacaaactccaccgctggggaagagacgagcaactaaaaaaaaaaaaggcgaaaactcgagtgcgcgcagtgtcatccgcccccgtttccacctgtgcgcgcgcgcggcgtttttcaacccccacggacacctccgcacgaacgcaccaaccaaaccaaaaagcccctgcgaatctgtgatcctctctccctcgccgcgatcgcgttcgtcccacggccgcgcgcgcgtcgcgggggcgtcactatgtctccgcaccacagcggccgtctcgcgccgccgcgccgcaaccgggagaacccgtccttctccgccgcgctgctcgacgccatctaccactccctcgacgccgatggcagcttgccggcgtcccccgccgacgccgaggggtcaccggtgcccggacgccgccgccgtccttcgcagtgcaacaacctgtcgccgtctgcttcttccgtgcggtcgccgcggctgcagaagacgccgcggccgtgtcgcgtgcggcctgacccacagccttcgcttctcttgccgccgccgcagccgccgccgccgatgccggagtcaacaggagacgtcgcggagaagaagaggggcagaaggaagaacaagaatggtgccaagtcggcgccattcgcgtgccttctgaatgctctgctttgcaacaggaggtcagccaggtcggccgagccgacgacgccgcgggctctggcggtggcgccggcggcagtggcagtcaccgccgctgagccggcgtccgcgaggtcgatcctgtcgtcgcgcgcttcccggcgacagcccgcggcgacgggtgggatcctgactccggcgaggcgggcagtgcggttctcgccggtggcggtcgtggtggacgacggcgagcacgggtgccgggacgccggggtggcgaggctgcgcggcgcggagagggaggtggccgcggcgcaggagtcggcggcggaggcggagaggagggtggaagagctgctgcgcgcgctcggcgtggcggaggagagcgagagggccaaggagagcagcgagtccagctccgacctgttcgagctcgagagcttgccggcgttcgacgacgccgagctgccgcggccgcgagctgccgccggactcgtgctggcacgtccgcgacctcgcgtttgttgagagttgcacacaagaattaatacctcttcttcgacgtgtaagctcaatgcagctatgcagcgtgcttacgcttgtctggatgctgaatggctgatgaatgtttggaaatggcactgcattgtcgagtgaaaaacaagtacaggcatagcattttgcatggggctatcacatggcgctttgttgttttccctgccacagaaaagagtgtaataaatttcaccatggtgcccaggtttctccagccggcccggcagatttgttactctgatgtctttctgcccgttgtttccatacaagcaagtaatttttttaaaaaaagagatttggaacgagagacctccaaacattttttttaagaaaaaaaaatgagtgtattagggattgaacacaatatttcagggttgaagccatacacccattaccattgcactaccaagtacatctccatacaagtaattgattgtgttacttccattgtttatctacaattctacaaacgtagggctgttttggtttgacgtcatacttatcttactagatatttggtaactttaagtagtagttgtttggattgctttcaatctttaccaaatcaatacaattaatactactattctactatactaaaactgggtactgccaaatcatacccaaaatttgacactactaataaattagtgggatggtagagaaccaaacaaatccgtactaccgtaagtttgtcttacaaaacaatttcaaactcccttgtcgtgttaactttttcaaacgttttgaggtcaagaatgctgtcaaagaaactctttcgttctagaacacaatttatatttatgaaataaagggggaaaaaggaaaaagaagaacatatccatgcatctcagagtagttcaggaagaacatgacctgcgcaggacgctgcttgttgggcaaaaacatttgggctagttggcctagctctgtatcgcacatatggcccatcggctcacatgacgaaacgggccggaaattccactctcctggactcctgcgcttggagccggcccaaaccaaaccaaatcccaatcttgcaaaagtttttaccgctatcattctatcaagggctgttctgcaaaatttgctaccatcagttcgtcggaccgggagcgacttctaccattggatgtagcatcaacggtgggcgagagcccgcgccgctcgccggaggtctcctcgcctcgccgcctccttctccggcgtgtgcccctcctccgctcctcgtccccaaagccaatgccgcctcgatctcctcgccgacctcctccacagtacagctgggccgccgccgccgccgcctcctccccgcgctgcctccctctcgcggtctcgttccaatattggcctccctctcaggtctccgcggccgtctcctcctcaaccccaccatggagcgtcacgaggaggtgggttggagcctggacaccgtacctggctacctgtttgctgctgtaaactgccaacttgttcttgttgatctctgcactaagacctaatcttcttttgtatcaggagttgcctcctaatgtcccataaaaattcctcgtgtgtctctttcctggttttgggcgcttcggatcaatccactttgggctagaagaagcttatggtaaggtgcattttccctgctaacaatctgattctggaggagaaacaacattagtgcttttcgattctcacagattttttgttaactgttctgaactcttgatgataaattggcacgtactgtttggatgtagaaaaggacatgttttgcatttcaacttgttgtatgagaacaagccttttgtcttgcaatctgatgaaacactgtcattctgttatcaagttccattagattttattttgttgttgttgttgtgagatgttgagtatgcttctgaaagcgtcagtggagagatcctgacttcatgagaagggcaataagtgggttgagcagtgcgaatggaaattttaggaacaaattaattgatgtttttgaagagaataatgtttcaactgattcacagcgatcatctttgtctataaaacagaactctttcaacttcagctccttaattacatatagcaaacgaaaatgacaaaaactcggttatattatgtccatgtacttatttgtttggctgtgggtttgtgcttttgcagcttgctatctagtgaatgagtaagttgagctgagagctaggggtttgaacaagctattgaatctgtcattcttcagaaacaagttcatttaatccggtatgctggataactgcacatcaagcttgaatcatggtgtcttatcagttccggtttggttgaactaaatctgggacaggtgatacttttggagcattggtctcacttctgctcaccttgaatttgctgtactttttgtcctcgtaatgaaacctgataagttatatgacatgttggttagctgttattccagctgcacttgtttcaggtttttttagcaatatgtctccggcatatgaccattgctgggttgtgagctggttactttcttgtatgggctaatgttctttggagtttggatttgacacacgtccagaaaaacttcaaataacctttgaggtaatagtttttttactacatttttgctggtagtgtcttgcttgttatattctttgagtggtttcaattggagcagcatatggtgttatcagttttacattatcaattaaccatgctaactttatcaataagatgaaaagaatccatcagtgttattcttagtattacttccctaagaagtatagcattcactgctttggatctgctgtgatttgttgaactttttggaaacaagaaattaaggagtatctagaccttgtattcataggtgctgtcacgccccgaactagccccgaacagaaccagcccgtgacgctccaaattaacctgttaaccgataccagtcctaggaaatagtgctggtatcacaggaaaactgaataccatagcaacaaaggtctctttattatagagtaggattacagtcatgttgggctgcggacagatcccaagctcacaactgcattacaaaagaggaaagcggaagccaagacttggaccattcatcacaggcgcgacttgggaactagatcgaaatcctaaaactcatcatagccgacttgctcctggaagaactcctcgtcagcgggatccatctcatcttcttcagcaactgggggggattatttatatagagcaatagtgagtacaggagtactcagcaagtcatgggaattatgtgtttaatgaaggcttcaaaggaaaggctgttgtttttacaattgattttagttaaactccttttttttaaaaaaacaactaagtgagtgcttctcaaacgacacggatgagacaatgcatctcgtccggtcggagtatgtgcattgtatcagtctttgattgattcaagattggcacccggccacaactttcaaacggccacccgggcctagctgatcccgtcaaccacagatgttccaaacatcgaacccaaatcaacaatagcaatttcacaaagtagtagtcaaacaaaactacgctaaggaatcaccttacatccgctcatgaccgtgggcacggctgttcgaacagtttaataacctctgcagagggggcacactttacccacacgacattactaacacggatcacccagcctgtgcagaacagccacgtctggtgtccttgaggctttcatgacaaggcatttcgagagccgacacaggtttaccatatgccaacgagaggggtcccagaccaacaacaggttaggtcccagaccatactatgccaggaagcccaggggtcctccccaacaccaccctggcaaatccacttgtctcccggcatcaaggctcccctgattagctaattactcagccaggggtgtcccattccacccatgtggtcgtacttgttatatgttcggatgaaattccaaaggaataggtccttaagtgcaagagcgggaaaccgtgctcccgagacgagacgggcactgtgacgagaggccgacggcacgagagtgatctctccggcctcgggccggggaagaggaagaagatgagtgcccggagtccccttcacgcgtccttcgcatgcacctgctctcctggtgctttggcgacgaatggcggaggtgcaagcagggcagagcgacgatggtgtggcaggcgctgacggcggcggcgactggccggtcggccagcacggcgcgcgcgcgcgggaagcaacgggtggcgcggcgatttgagcggcgtcggcgggagcggcatcgagagggagcgagagcagagagagagagagggggaaagaaagagagagagcgagctctcttgctcagcgcccgagcggcgcacgtgcctcgcacgtgcgggcaaggatggaggggagaggagagatgggctgagaggaaatggccggggagaagagatcggcccacgaactcgagggaggcaaaatagactttttcgagaagatttgattcgggacagattgaggttagggtttggattcgacgatggattggggatttgagatctggaatggcacggacactggacaacaaacaaagaaacatttttcgcatttatgatttttaagagatagttttcccactaggtgccacgacggaacgggcgctagagaccaatccccctaacaagaatctcgaccccgagattcagcacctaagggagcagctccggaaactcggcgcggagatgatcttctcgttcccaggttgccttatctttagaatggttgctccattggaccttgtagaacttgatggtctttcttcgagtctgacgctttgcctcttgaagaaccttgatcggtctttccttgtaggtcaggttgttttctagctcgatgttgcccaggggaacttgttcttctggaactcgaagacatttcttcaactgggatacatggaacacgttgtgcacatctgcgagaccttcaggtagctcaagctgataagccacttcgccacgtctggctgttatgtggtagggaccaatgtagcggggtgctaacttgccggacatcccaaacctcttcataccgtggaggggtgatacccgtaggtacacatgatctcctttttcgaactcaagatcacgcctccgattgtcagcataattcttctgacggttctgagctgtctttaaacgttctcggatcagcttaacttgttcttctgctgccttgagtatgcaggaccgaacaccagcgcttcgccaacctcattccagcacaagggagtgcggcactttcttccgaacattgcctcattcggcgacatctgaatgctggcctgataactgttgttgtatgagaactcggcatacggcaggcaacgatcccatgtgccttcaaaatctagggcacaagcacgaagcatgtcctctaagatctgatttactctttccgtctaaccatcggtctgcggatggtaagccgtgctgaagttcaaattggtcccgagagcctcatgcaactgcttccagaaccttgaggtgaactgagtacctcggtctgacacgatctttttcggacagccaaatcgacataccacgtgggtcatgtagagctctgccagtttctttccatcaaaggtagttttcacaggcacgaagtgagccgattttgtgaattggtccacaattacctagatggagtcatacccgctaggggttcttggtaaaccggtgatgaagtccatcccaatttcttcccacttgcattcggaaattggtaggggttgcagcagaccagctggtctctggtgctctgctttaactctttggcaaatgtcatagagagccacatattccgcgacatctcgcttcattccagcccaccagaaatatcccttaatgtcctggtacatctttgtacttcctagatgaatggagtaggcagactcatgggcttcttttaaaatgatatcttttaattctttcttggctggtacgcagatgcgagatccgcaccacactgtgccttggtcatctatggagaaaccggtgtatttcttctcgtgtattctttctattaactcttttatacctttatcatctttctgagcttcccggatttgcgattccaatgtaggttgcactgtcaggctagcagggatggccgactgtaccactatcagccttaacttttctaattctctgcacagacgatcttggtctggccatactttaactgcattgcagtaggtcttgcgactcagtgcatcagcgaccacattggctttaccgggatggtaatggatcccaagatcataatccttgattagttccaaccaccttctttgcctcatatttagctctgtctgagtgaagatgtatttaagactcttgtgatcggtatacacttcacacttgtacccgatcaagtagtgccgccagatcttaagggcatggatcacggctgctaattcaagatcatgggtgggatagttgacttcatgaggtctaagctgcctagacgcataggccacgaccttacgatcttgcattaagatatcccaagccttgccttgacgcatcacagaagatttcaaagtcttttcgtatatctggcagggtgagaactggggcagtggtcaatcttttcttcatttcttgaaaactgtcttcacaggctgctgaccattcaaacttcttttctttctttagcaactcggtcataggtctggctaacttagagaaaccttcgatgaatcttcgataatatccagctaggccaaggaaactgcggatttctgacacattcttgggggaattccaagcaagtacagcttcaaccttcctgggatctacttcgacaccgttagaggagatcacgtgccaagaaatgctactcggtccaaccagaatttgcacttcgagaaattggccaacaattgatgttctcttagcttttccattatcagcctcaggtgttcagcatgttcttccgcattcctcgagtatatcaagatgtcatcaatgaataccacgacaaacttgtccaagtactccatgaagatcttgtttatcaggttcatgaagaaggccggagcattggtgagtccgaaggacatcaccgtgaactcatacagaccataccgcattgaaaaagcggtttttgggatattctcagatctgattttaagctgatggtaacctgacctgaggtcaatcttttagaaaactttcgctccttcaatttcatcgaacagatcgtcaatccgaggcaacgagtacttgttttttatagttacttcattcagggctctatagtcaattaccattctctcagagccatcctttttcttaaccagaagcactggggctccccaaggggatgagctaggtcgcacataacctttactctccaattcttcgatctgctttttgacttctgctaactcattaactgccattcggtagggtctttttgcaattggtgcggtgcctagtgccagttctatggcgaactcaatctctcggtctggtggcatacccgttaactcttctggaaatacgtcgggatatccacagactatgggcacttattccaagggaatggcttgcaaactggttaggatagaccgacttgcggtaagggtgttaggggtaaagcgaacttgctttcctccaggtccttgcaaggtgatggacctttcggcacaatctatctgtcctttgtgcttagccaaccaatccatccctaggatgatgtccaaactttgcgagtctaggattattggtttggctaggaaatcaattccctcaattctaatgttaacttcggggcatattttagttgcccctatatcccttccaggggaatgcactatcattggaacttgcaatttttgggttttccaaccatttctttttacaaaagcttgcgatatgaaagtatgggaagctcctgaatcaaataggacgattgcgggtacggagttgatagagaacatacccatcacaacatctggagcatcctgagcggtttcagcttgaatgtggttcacccggcctcgaccgaagttgttggaaacatgagatccctgtccactagcctgagaactaggacgagacggagctggtgcgggagtaggagtcctggcggtgctgccattagaacgtcctgagttggagttggcaggatcctgtgggcattgcctggcatagtgtctcatctggttgcatcagaaacactgaacagacgccattcctgatggtgccttgaaggaggacacactattcggtgcagtattactgctaggggcacgctgctgcggctgaggcgccaggcggttagtctgaggacgaggtgcatagcttggctggcggttagcatgagtgactgactggtgatattgcatgggttgtccaaagcgagggcgaggtgcacctcgggaggaattcccctgatgattagacttgcgtttcttgtattcctcggtagcttcttttctagcatcttcaaacagaagagacttgttgatcatgtcatggaaagtggggaaattatgagcaagcaactgaagtctcatcccaactgcaattccctttaagaacttcctgatcttcttcttatcggtgtccacttcctcaggggcataccgagccaacttgttgaactgactcaggtactaattgacactattattgccttgcttaagcctgttaaattcctccttcttcatatcaatggtgctttcaggcacgtgagttgcacgaaaagccgtagcaaactcatcccaagcaatgttagtggggtcaggatgagcattgcagtagttttcccaccaatcagcggcaggtcctcttagctggtgagaggcgtagagtgtcttctcgaaaggagtacattgtaccaagttgagcttcctttcaacatccttcagccaatcatcagcctcaacaggcacgacggtctgagagaactcgagcggacgagacctcagaaagtccgtcagcttggatctgttgttacccatgtggggatggccatttccatgtgcattatgctgaaagccggctatggctgtggctaatccctgcaagatctgtggctgtggctatgccatcaagtgctgcatgttgttttcaacatggggtggggaaggcatgcatcctccaacagggtcgcgattaacagtgtggtgagagcggtgagaaccatgggactgctcaacctcggcatcgcgggatgctgtgtggtgcgaacggttagtgtggtgagactgctcatcagccgactcgtgatctgcctctggctcaactctgccttcttcaaaaccaaaacggttcggtgcacgggtagcgcggcgaggacggctagccatctaaactccctgaaaaagggcggggtgagaatcggacaagcacttaatgaagacaaggagcaaaataaataacagctcagatagcacacactaggcataaactggttttctcaaatcataaagacacctgatacaacggatgtggacaagtcacagagctacgccgagcttgactgtacgcacaccacctaggagaaccagactaccaaacaacacccacatcaaacacacggacgcactacctcgccacgactccgaaagagttggcggcggaacaaaagggcctaacacacggacaactgctgaagactgcctcctctactcctcgcctgcctggctgcctcctgtggtcagttcctcagtcgaagaaacgtagatcggcgcacgcgaagggaccggcggaacctgtcgagggccggcaacagcacgggccgctggcggagggggagttgggtagtcgaagcggaacactgtggaagagccaacaacacgcttccgcgcagtgcggatgaagcgtgggccacggcaggaggaagcaactagagtgtgtccgggggtgtagaaggggctaactgggtgtgggtagggagagtacactggtgagtacggcgcacgcgagccgggggagtgcgggccactgggagtgcgagcagagccgcgggagctgtgggaagacaggtggctggcgtggcagaggcggccaaagtcccaagaggtagtgtcaactgaggtgacaccgtcctcggccaggcgggtctcgagtgcagcgtagcggcgtgcaagggagtggtaagcctcaaggagaaggtcgtgctgggtggcctgagccttagaaagctcaaccatgcgagtcagcacaggctgagactcgttgtacgggcaagggtacctggtgtcagtgcggccagaaggaaggcgtgggagctgccggaaggcagagcccccgaggcggtggctgtagtcgtgggccaagcgacgaagtgcagtccaggagaggtcctggtacgcgatctggagagtgggcctggccatagtgaagtggtgtgggcgaaggccagccccgtgtatacctccacaagggtaaaggtataccgaaagctcacaacgagggggaacacggtccacggagtaccccgtgtactcgggacacgagaagccaaggaagcgggcgaggtcacgaagctgagcgacgtggtgaccctcaccaaaaccatgggaactgaagctggcgttcactgccatctacaattttgaaagagggagaaaagatcagtaaccattttagcaacaaactactgaaaataaagaaagcaaaaagaaggcttagcttttcacaagtagtttttgaacttaatatccttagggtcgtcctaaacgtcgggtttcgtccaagggccaagcctgtgctctgataccatcttttatcacgccccgaactagccccgaacggaactagcccgtgacgctccaaattaacctgttaaccgataccagtcccaggaaatagtgctggtatcacaggaaaactgaataccacagcaacagaggtctctttattatagagtaggattacagtcatgatgggctgcagacagaccccgagctcacaactgcattacaaaataggaaagcggaagccaagacttggaccattcatcacaggcgcgacttgggaactagatcgaaaccctaaaactcatcatagccgacttgctcctggaagaactcctcgtcagcgggatccatctcatcttcttcagcaactagggggggttatttatatagagcaagggtgagtacaggagtactcagcaagtcatgggaattatgtgtttaatgaaggcttcaaaggaaaggttgttgtttttacaattgattttagttaaactcctttttttaaaacaactaagtgagtgcttctcaaacgacacggatgagacagtgcatcttgtccggtcggagtggatgagacagtgcatctcgttcggtctgagtatgtgcattgtatcagtctttgattgattcaagattggcacccgaccacaactttcaaacggccacccgggcctagctgatcccgtcagccacagatgttccaaacatcgaacccaaacccacaacagcaatttcacaaagtagtagtcaaacaaaactacgctaaggaatcaccttacatccacccatgaccgtgggcacggctgttcgaacagtttaataacctctgcagagggggcacactttacccacacgacattactaacccggatcacccagcccgtgcagaacagccacgtctggtgtccttgaggctttcatgacaaggcatttcgagagccgacacaggtttaccatatgccgacgagaggggtcccagaccaacaacaggttaggtcccagaccatactgtgccaggaagcccaggggtcctccccgacaccaccctggcaaatccacttgtctctcggcatcaaggctcccctgattagctaattactcagccaggggtgtcccatttcacccatgtggtcgtacttgttatatgttcggatgaaattccaaaggaataggtccttaagtgcaagagcgggaaaccgtgctcccggcacgtcccccggtctgcgatttttggaaattcatttagttcgtaagcaccgacccaggtgtcggtgacatgggatcaggagtatcatgactagaggtttgaggcaaactccatttcacacatgcaagggcacaacgaggggtcgtcagcacgcaaagcgatgtcgctccacatcgtttagtccatcagataggataagaccgcacccccattcgtcatcagggctgaggcgccctgacccctcgtgggtctttgctccgagtgcatgggttaggtcagcacagtggggctcacctaaccacatttattgcggttgggctgagcgtgtcacgccgtatgtaacgcagtgcagtgcactcgtttatccggtctatgaccagtcacagaccggtcagatcgcgggttaggtggcgacaggcgatctgacgcacacctcgccccatcccgtcaggacgagggcttctaggcgctcgtccccagctggagctagcgtgttacctcccagagatggcacgttagtcctggtcagatatatgccaggcttcatcctaaccattacaggcaagatgttgtgtgaagaaggacgagcatgtaggttgctaagctgacacgtggtggacaagaatgaccgacgtgactggtctgataccggtcatgtcgtcagcagacagccacgattccacgtcgcgcctgcttccggcggaagtggaggtaggtatgggccgtcccatcagaaggtcattcggacggcaaccatacaagtctccgtctgtttatgaaaaggtggggtaagtccccacaaaaaagagagaaatggtgcatgtggtatctccttaagatataaaaggaggaccttgcccactgagatgagggagtagactggacttttccagattagaaacccagaacaagggagaggctggctgatactttgtagctccttcatacacagatctcccaaaacacaggagtagggtattacgcttctcagcggcccgaacctgtatacatcgcccgtgtcttgtgtgtttcctgtctcgcgagccttccacatacagagagcttagaatctctccatgagtccccggccgaaccggcaaaggggggcctgcgcggtctcccggtgaggagccccacgctccgtcatctggcgcgccaggtaggggtccaggcctcgggacccgaggggagtgctcccaactcccttagattgattgcttggatcgccgagatccaagcatatctcacagataagactctacccgaggaccgcgaagggagtgaacgcgtccatcgcatctccaaacgctacgtgctggtagaagggaccctctatcggcgcgtggctaatggaatcctcctgaagtgcattcctcgggaacaaggtgttgtgcttcttgccgatatccatgaaggcgaatgcggagcccactccgcctcgcgcaccttggttggtaaagcttttcgccagggtttctattggccgacagctcttaatgacgcggtcgacctggtccggcgatgtagagcgtgtcaattccacgccaagcaaatccatcagccggcccaggccctgcagaccataccactttcgtggccatttgctgtatggggactcgatatcctgggaccgtttaggcgggccccgggcgggtttgagtatctgtatgtcgcgatcgacaggttcactaagtggcccgaggcttatccggtcgtcaagatcgataagcactccgcacttaaatttattaagggcatcacggcccggtttggagtgcctaaccgtattattacggataatggcacccaattcactagtgaactcttcggcgactactgcgaagacatgggcatcaagctctgcttcgcctcacctgcccaccccaaaagcaatggccaagtggagcgcgccaatgcggaaatcctcaaaggccttaaaaccaagaccttcaacatactcaagaagcacggcgattcatggatcgaggagttgccagcggtgctctgggcaaaccgaactacaccaagccgagcaaccggggaaacgcctttcttcctcgtctacggcgcggaagcggttctcccatccgagctcaccctgaggtctcctcgggctaccatgtattgcgaggctgatcaaaatcagcttcgcagagatgacctcgactacttggaagagcgaaggcggcgcgcggccctccgagccgcgcgctaccagcagagcctgcggcgctaccatcagcgccacgtccgggcccgatcactctgcgtcgacgacctcgtcctacgccgcgtccaaacgcgtgctggattgagcaagctttcaccaatgtgggagggtccgtatcgagtggtcggcgtcccccggccgggctccatacggctggccacgggcgatggcactgagctgcctaacccgtggaacatcgaacaccttcgtcgcttctacccctgagggggggggtcgggtgtcaggtttcgggctcgggccaaccccgcacccccctcgggcgtgcagggttggccgggggctacaacatatgcatattcttttttctcttacatctgtatttcaataaaagcagtttcaatttcctaaaggctgtatctgtgctgttttttccttttgaagaatcttgacttgaaataggtcactcgtgctcaatcctgccctcgggggctcgggtcggctaaaatcgccgaacggggcccagaaccgagccgtgccccgaggcgtggtgaactccggggggggggggggggaatcggcaaaaacccacaatcgggtcacccataaccctcggtcaccacgttcccggcctggccagtctcgacatgtggatctcctcaggcactagccccgacccgcgccttttgaggactagaacttgggcacgagcccttattcaagctaagacacaaaaggaccacggcacagatcatcctcatctcatactcacagcaagatgaaattaacacaaaaatttcttcatttttgattacagattaagttgatctatacaaaaaagaggcccgaaggccttagaagaaagaaaagaagaaaaaactgaagaatggcgggggtctgggggctcaatccgatgcgcccggatcgccggcctcgacgtcactgtcgtctgcaccaccggcattgccctcctcgtcggagttgggggcgaacgcaagccgaggggccaagccatcgaagctgtcgacgatatggtcggcggcatcccggacctgcgcgcgcgcgcggtcctcggtcccaggagggaactcatccagcgccatccatggggagaaattggggtccctggcctggtaactcgccaggacgagctccaccgctccttgggcgaggtccctcgaggatgacttaattgtcttctcgagctcctcggggagccgttggagagccccggccatcttcgagaggcgctggacgaggcctccctggttggcggcgtactttacggtccgccctctccagaggcccacttgccgaccggcgcaatctaggcgggagacggcgtcccaaagcatgccgggccctacctcgcctgccaagcggagggcttcgacctccccggcggacgagtccagcgcgccctgcagatcggcgatggtgcgttcggcagctgtgaggcgggcggctaagtcgctttcgcccgtggccgccccgccgctgcgcgccctcgcgtccagctccttcgcccgcgcctcgagctcagcggcccgttggttcagtacggccctctcggcgcgggcaccttccagattgcggcgcgcctgctcctcctgcgctgcctcgcggagggacaggctgactgccagctgttgcgccgcggcctcggccccctcgagagctcgctcccgctcggtgagcacgtcctcgcggaggcggagcgtgaactcttcttcggcgcaggcagcctcgtgcgccgccagcgttgcttcccggatggtgacagcggcctcgcggtccgccagatccctctccacgacgcaggcgcgctcttccagcgccatggcgcgcgcctcaagggcctcttcacgctgccgggacgccgcttcggtctccgccgcccgctgttctcgggcagcggcagcgtcaagcaccccctgggcggcgtcgagcttcttccttagctccgcctcccagctcccgtattgaaggcggagggtgtcctgcgcctcgttcatcacggtggtggcaatgagggcagccccccgctcctcctccacttccttggcgatctccgccagcaccttcttacgggtttcaagctccgagacgtgccggcggtgagccttacggcccacctccaccatggcctccaccgagcgtcgcccctcttcgacacgcgcccacgcggcgtcgagctccgcccgctctgcctgcaggacctccacctgggcacttaacccatccaacaccgtggtgtttgcggcggccaaggcctgcagaaggggctctgcgttcagtggggcgatagaaggcgtggggaagagccgccttggagaggatgccacgcggctcgggccgccaatggaagtgccggactcggggatgtcccccggacccggttggtcctgagcgtcgcccgagggagtgggcccaagcgacgcgcccgcggcctcgtcgcgagctgcctcggaagtcgccatcgcctcgtcctggcgaaatccgacttcctcccgagcggcttccccggcctggcgggcccgggcggcctcctcccgagcagtttcctcggcctggcgagcccgggcggcctcctgggcggcctcctcggcttcccgtaggcgatccgcggcctctcgccggtcagattcccgcctgagggcctctgcggccgccggatcctcggccttagactggccggacttggaatggcgggagggatgcgacgggatctcgctgaaacaaaagaaaaaaccagaagacgaacaagatgggtgagtgaaaactcgtgtcgagagaatgaatacagccacgatgggtgagagacgaacctgcgagggggtcggttaaacgaccactttggaggggaaatgaggtttccccgagatggttctgtctcccccatcttgcggggccgcttcttcttgcgctccccctcgggctgcgatgttggcgcggccccctccgggcgcctgctgctggcacgcgccgccctgccccctcggggaggagatgggggaggtgttcctccctgcttcctcttcccccgggcgtcggcagggcggctgctccccgggcccctgtcgcgggacccagaagcacgaccccctctcggggtagattgttcccccctgcggctcccgcctacgccgtcgtgaccctttggagctcgctcctctgaggccccgaccgccatcataatggtcaggatggaggcgcggtctggatcgctgcagagggggaggattccttggggaatgagggccgcctctacggagttgagattcagcacccgttggaccaatatcttgaagtcctcaggagcccagtcccatctcactccctggtgggtcctcgtgaagtcttcggacccggtgtactcccaggcgccccgagcgcgtcgctggagcggcgcaatccgacgacggaggtagtcgccgtacaccatggcccctgtgagcccctgggatcgcaggcccgccaggcggtcgaggacggcgtcatagccatcccccagatctaccggcgcccgccagctggaggcctgcgccgggggctggctcggaagtcggaggcgcgcctcgtcggcgaggggagtgtagaaccagtcgctcttccagtcgtcccacttcttgcggagggtgcaggggatgtagcggttcagcaccggcccccgtggctggaagtagcagccaccgactaccgatggcggcgacaccgactgcacggtgaagaaccaccggaacagccgaagagatgggcgcaccccaatgaacatctcgcacaaatgcgcgaagatggccaatgtcatcaccgcgttgggggtgaggtgcgccatctggagatcgtagaactccagaacatccatgaagaaagaagaaaatggtggaaccagccctgccattgcaaaggggagaaagaagacggaccgccccgggtagtctggcgccgggcgtccctcgcccagcgtgactatctcccggccggtggcagattccggcatgaagcggcgcggcagcccagcctgcctctcgctcacgatccgggaaggcggcagcacgctaccatcgagcagagcggaaccccgtgccatggcgccggaggaagagaagattaagagcgagcgcgtgtggcgaaggtagggcacaggaaagaaggagttagggcgcaagcggtgaagacaaggggaataatggcgaaaggaaggaaacagatcccttcctcagtgcctttatactcttgccaacgctgtgcccggctcctcgcttctcgcgcccactatttcgccccctcgtttctcgcgcccacgcttccactaatcacattcgcccgcttgcggcgcatgaggtggatatgcggttgtggcagtcgagatagatcatatcgtgcgcgcgttaattacgctcgccgaccgaagcgacgttaccatatctccagacgaaacgaatcgccatgtccagattcgtgtgctactcaagtaatgtggcagtcttgaagacaccgctcattgttgacagccgagttaccattgccgatgtgcgtggtttgtgaccgttgggtttctgcccaattgtggagaccggtcccacctgtcaccaggtcttaggagtggcgtcacgcccgaccgtttcccttaaagagggcgattgccctggcataacgccgggggctactgtcggtgacatgggatcaggagtatcatgactagaggtttgaggcagacacaatcgcacacgtggcctggtacccccgagggacgtcgggcccaagggtgatgcgttcgccctcctcttagtccccccgagggggg

SEQ ID NO: 5401 - DNA, 13872 bp, Oryza sativa
gtcggtgaagacgtagacgcccaacaacgggggcataaaggccagccatgcaggcggaaacaccagtcgtcagtggcggatgcgtcggccggttggtgaagacgtagacgcccaacaacggcagcataataggccagccgtgcaggcggaagcaccagtcggcggcggacgaggcggccggtcggtgaagacgtagacgcccaacaacggcggcataataggccagtcgtgcaggcggaagcatcagtcggcggcggacgaggcggccggtcggtgaagacgtagacgcccaacaacggcggcataaaggccagccgtgcaggcggaaacaccagtcggcagcggcgaaggcaagccggtcggtgaagacgtagacgcccaacaacggcggcataaaggccagccgtgcaggcggaaacaccagtcggcggcggcgaaggcaagccggtcggtgaagacgtagacgcccaacaacggcggcataaaggccagccgtgcaggcggaaacaccagtcggcagcggacgaggcggccggtcggtgaagacgtagacgcccaacaacggcggcataaaggccagccgtgcaggcggaaacaccagtcggcggcggtcgaggcgagccggtggtgacgttctgactgatccattcctggagcgtaagagataagcttaaagccatgaatcccttttatgcatatctggatctggatcctttgtaatattccccttggtgatggcagaagtggccaatgtgggaacaaagtcgtccatcaataacaatgaagacaccagtcggcggcgacgaaggcggtcgacggtgaaagcgaagatgcccactaatggcggcataataggtcagccgtgtaagcggaaacaccagtcgacggcaacgaaggtgagccaacggtgaggacgtagacgtccaacaacggcggcataataggtcagccgtgtaggcggaggcaccactcggcggcgacggaggcaggccggcggtgaagtcgtagacgcccaacagcggcggcataataggccagccgtgtaggcggaggcaccactcggcggcgacggaggcaggccggcggtgaagtcgtagacgcccaacagcggcggcataataggccagccgtgtaggcggaggcaccactcggcggcgacggaggcaggccggcggtgaagtcgtagacgcccaacagcggcggcataataggccagccgtgtaggcggaggcaccactcggcggcgacggaggcaggccggcggtgaagtcgtagacgcccaacagcgtcggcataataggccagccgtgtaggcggaggcaccaatcggcggcgacggaggcaggccggcggtgaagtcgtagacgcccaacagcggcggcataataggcatgccgtgtaggcggaggcaccaatcggcggcgacggaggcaggccggcggtgaagatgacgatgcccatcaacggtggtgtgaccaaccgaccgtataggcggggacaccagtcggcggcgacggaggcaggccggcggtgaagtcgtagacgcccaacagcggcggcataataggctagccgtgtaggcagaaacaccagtcggcggcggcgaaggccagccggtcggcgaagacgtggacgcccatgaacggtggtatgaccaaccaaccgtataggcgaggacaccagtcggcggcgacggaggcaggccggtggtgaagtcgtagacgcccaacagcggcggcataatagaccagccgtgtaggcggaggcaccactcggcggcgacggaggcaggccggcggtgaagtcgtagacgcccaacagcggcggcataataggccagccgtgtaggcggaggcaccactcggcggcgacggaggcaggccggcggtgaagtcgtagacgcccaacagcggcggcataataggccagccgtgtaggcggaggcaccactcggcggcgacggaggcaggccggcggtgaagtcgtagacgcccaacagcgtcggcataataggccagccgtgtaggcggaggcaccactcggcggcgacggaggcaggccggcggtgaagtcgtagacgcccaacagcggcggcataataggcatgccgtgtaggcggaggcaccaatcggcggcgacggaggcaggccggcggtgaagatgacgatgcccatcaacggtggtgtgaccaaccgaccgtataggcggggacaccagtcggcggcgacggaggcaggccggcggtgaagatgacgatgcccatcaacggtggtgtgaccaaccgaccgtataggcggggacaccactcggcggcgacggaggcaggccggcggtgtagatgacgatgcccatcaacggtggtgtgaccaaccgaccgtataggcggggacaccagtcggcggcgacggaggcaggccggcggtgtagatgacgatgcccatcaacggtggtgtgaccaaccgaccgtataggcgaggacaccagtcggcggcgacggaggcaggccggcggtgaagacgatatcgccatcagcaacggcagcggcgcacaccaaccgtggaggcgatgaaaccaatcggcagcgacgaaggcggccggcggtacatgtataaaataatagatcaaataataattagtgatctgtgaattaattctaatttatataagaaaatttagaacgataaacctggtttgtgatccaactttgattcgaggcctgtcaatggatgaaccgtagcatgcagccgtgtcatgcagccgtgtagacatgtaatcgtcggtagcacatgcacggattagtttggagaccactttgtgcatgtaatagctgatttgtgtatggattaatttccttgaccacagatttgaccaggtatatttaatttgtatcctggactttgtgtcttgccgtacgtatccgagtagtattgacttggtgatgtacaggctcaaccaacggtgatcttcgcatgattttggcggcggctgcttgctgattgcttcaaatcatgccctggtgacgaaaccgacggaccaacagatatggcagcattgtagcgacggatttgatctcactgacggaggtaaaattgacggtaacaagctggttgtagatcgattcgatcggtgattaatctcctggttgattgaccagatccagatagaatttttggcgacgaagaccctgcccttttgttgagaggatcacggccaaagacaagagtagcaccgatgatgccagcacaaagttccatcgcacttctcgacggaaaactcgacgcagcccctacctggcgcgccaactgtcgaaacatgaattcggcaataataaaaggggtagcgcacgagacctaaaagtggatggatgcggagacaaaggatttagacaggttcaggccctctcaatgagaggtaataccctactcctgtttggggatttgaatccgccgagtgtgtattaatctgacgatcaggttgtctcatgccccctagagggcttcctgcccaccttatgatggggggcaggattacaagatagaaaccttaaccaacacggtatcggtctactttacaatcttatcaaaccaggactttaggctgttccgtaatatataaggaaacgtaatacccgagtcatgatctattacatattccatagatataagttatcccctatgactagtcggataaccatgccgtatgggtatggggtacccataatatccacacgtggcgagacaccatttccgggcgcccgagcgaggcgtcaacgatggccaactgccggcgagcgcgaggcggcggtcggacgaatctcgtgttcctttcgctccgtggtggcgcgtcctaccgcggtactcgctacctcccaaaatataatgattttaaactataataaggtctctaaaatataaaatattagtttgactaccaatatctgtaaaactagtattgtaaaactagtattttaaggtaaaaaaattacatattataatagtttgtttaatgataaatctaataccatcaattttacatgattgatcttttttaaatttttttactattaataattaaagtttaaattttttgactttttttgcggtggttaaattttttgacttgctactctgctacaaaataattagtatattttaagacggaggtgtacttgatacgtaccacgacaccggggcagttggtcccccaatcacggccgtttgcttacccgataaggaaaaagagttgggaggagacacaactcgcccatgcactgcacagagagcggctggttggtcaccacggtagcgtacacgaacacggtcgatcgggagacgacagacgagacgccatgcatgttcgcggccgctcgccggccggtgttagcggtggccggtgaccgggtgtctgaaatcctatccgatctccttgggaaccggagccccatgcgcgaacatgagcatcacaacgtctgaacatgacgggaacgtggctggggtccgtcccttcccttcgcagcccgaaatgcgcaacgtgctgcagatcagtggttgattactccatgcttgtttatgtgcaccaccggggaccagtgagtagatcacgtgttaatcggccgcacacactgacgggatagtgccgtactagaatcatcggcactggtgtacgaagcgctactgtagtagttgccgcttttcaccgatggataccagggaaatccaacgtgcaatctgccgcgaggtttaccgggcggcgggcggcgaggtcggcaaattttgcccgagacgcgggcagtcggcagtgtggccaactccgcgtgaatttcttttgcccactcgggggaggtttgcttccgcgatttcgcctccgatcctgcagttgcttggcttgagcggccacttctccgctccgcttgctgctgtggcctgtggcatgtccgcgctgtatgtgcagcgtcagcgcggctcgcgcaacacgcgtctgttgcgtactatctccccaccttgttggttgatggccacatctcacgccttccagtctcgccggtgtcctggtgtgccctgctgacccaatgaacgcacagtagcatcgttttgctcatcgaagagccgaagatatgtccaggcagctacagattgtctatttgtctactttttcttttgaaagagaattactaaatgtcaattaaaaaaaatctatctttgcctgtgagcattgctagtggccggtgtctactagctagccaagagccaaaaatgggtgatccaatagctgtaggacactgcgccgaccggagcccatctcccacagattccagtcgattcctcttatcgtctcctattatttttttcccacgagaattcagatggtatcgacaatatcctagagtaggctccgtcctcgtgcaccaattattcatgcacgcaataataatttgaatagtgcaactatgattaattggaaggattagcttgttgccctacgcaacgcacaaccccaaacccaactgacggggttaatatctatcaccagcacgactaatgacatgtcaattaaactttgattatccgagtcatcatcgaatggctttcttatctcgcaactcgcacattgctttttcagtgacccaaagggagctctcacaaagtcccaaaaggaaagcatttgactctgagttagtgcgagccacgttttgccatttttctgattgcaagatgctttcccttcctgactgacccaggagagcttcaccgattgctaagcaacaaccctgtagcttcgtcttatggattttctttttctgtaatcacatgggggtatggacttgtagctggtgaagtagataagctgcttaccagataagatacttcacgagaaaacagtattatattaaaacagatactttcacgagaacatgaaggcaattgtgactgactggctatatatactccaggatgaacccattatactatccctccatctcaaacaatagagcgtatttttgttttgttaggacagggaatactctattatgatataattctcacaaaattaatatgctttgcacgactgatcattgttttacatggcattgatccacaggtaaagtatgtatgaagaaaagaagctatgtatcaacagctcattcatgtttctgtgcccactgagatcaccacctcaccgtcagtcccatgatcccatcctgaaacttggacaggcttaacaacagtcagtcagcagaaggcagtgacgtgaagccgtcaactgggcaagagaaaaatcaccatctagatcatggcgtccaagcaaggtagaccgcagacatctctcttcaaaactgatgccccgcacattcctggcggctacacactgaggagaacatcaccctcgtcgaccatgttcatatgcaaagagctcctagatctggtgcaactttagaatcgtgatcccggatggctggtgtttcatcttgttctttcttcttttgcttcttccccttctggcctttcccttggccacctttggtcctgatagtaaagcacattaagcagatagtattagtacataacacttccagcattgtgttaaacatgcaatgcaactaacctccctagtgaaaaaggaaatagtaatcaggtcggtgactttaaggcatatgggataagtgcatattttgcagcaatactgttaaggtttcataggccagatacaacagcagcaatgcactatgcaaatacgctggaaatattgatttcaccccccaaaaattccatttgaaagaatgcttacaatgcgaacagcaggacataagttcagttgtagaatagaatatggtaaaagacaaacaaaaggacagaaacattataaaggggattagctatatttaagacaccacattttccaccaaaaaacaaaaaaaaattaaaaccaaatctcaatacttacaccatattttttgcagcacacactatataagagaattaggatgaaaacaattaattacctacttgaaagaggagatagtagagcgaaacatacttacataggagtataaaagaatggtagcaatccgaatgggaaaaaaatgactgaaatcaagtcaaaaatgtggcgccatatttttagcaaaaccattataaagccatactttggaggttctctcgatggtgcagttgtttttggaggttctctcgatgctacagttgtggctaaattacaagaaggcttgtgcttcctagcagatccacaagagcattccttggtttttgactttccctgtgcaaaagaataaagggataattcctatttattccttccaacatagtattttaacaaggcaattcaatgtttggaaactattaagagtcgtccacatgatagttacctttttagaatgtgaactgttgtgtttctgagctgtttcgcctttgctagaacagtccttttcttctttcttgtgttcatccagttgactctcatcctgcttcatgctaagctcatcctctatggtctgtacatactctgctgatccaggtaatatacacaataaaggaaatgagttcagtgcatggccaatgtaaaacaaatattacttgaacaggtatgagaaattggatattaattgaaacagttaatgccctcagtttacaaaatgaactacttgtgcttctaaaatagtggtctccaacaataaccagccaaacaaaaatgttacctcctacagggtggttagatagcacactaactcttagtacagatatacctcctacagggtatgatattgacctttggcaattgcagaggaactgaacatggaaaacacccagcacagcaactggtatgggctgtttggtgggagcttaaaattctgagaaacagctagttggtaaccggcatctagttcattttctggattctatagctaagaatctggattgtttgagagagctgaaaattctgggagaagctgcagtagctagaagctctccaacaaggccgtagtcttacttgagctttctataacaccgttcatgcttcttggtactgttatcatattttgatgatcttaaaaataaccagtaaatggtaaatatcatattagtgaggcataaacccaaaatgccatgagcacaacacccagtataggttttacctactagatttatgctactgaattgaggggtgtgcatgaaacgcttgctcaggtgaggcagctcatgtttggcaagaatatgaataggattaaacaatgaaaactcaatctatggaatcccagaagtactccaaatttcaccataaatttcattaattgtcataagctgaagtcctcaagaaagataaggatgagattcattcatagggacagccactttagacttcagaataatcaaatgtttaccatcacatgcatagtccagataaggatctccatccgcatcatcagaacccagtattagttgctcagctaacatgtactctatagcagcatcaatgtcaccatccatgtctttcaaaacctatgtgatgtggcattgaccattaatatataatgactgattggctgctacggtcagcctaggctcgcagttgcaatacaagaaagtcgatttgttgtataattcatacctgttcaactgcagcgatattagaacatccagttccagccatcaccaatttaaccgatatatgatcatactttgatctgtctgaagatttcttcaggtcctttgcttttgtttgagcattattgcttgtgctagctacattggcatctgcctgtaatttcataacggataaaattaagattagtaacagagcaagttgagctacaacaggatctcactgtccttccagggacacaaaacaaccaacagtttacaatttggacagtgagaaaccttgataataactggcattgcaggaccttgacatggatcttccctcagtctgacactattgtagtgctcaccctgatgatacgatctatattggaatcaaaacaaaggaacatgagaatgtatgtccttttactgccagtattagcatattagtttaaaacagcagaacacacattaacttacaaatgaatcatactggtagcttcacgatcagaaaagtttcttatgtaccatcgtggtgagttaagctgcaaatcattcagtaatggtacaggcatcaatcaaatgttacagtacgttctcttctatagaagaaaggctataatatgaaaatgagtacgaaaaataacagagaaccatcaggggatatataagcagcacattgatctatatcacccatgtgtttcaaaatacagactaggcaaggctcaactgcctagcgtgttattcataggttgaagaaatcatactgcaaagcttgtattgaaaattaccatgtggatgcatatgttttttctcttgagaatagaagctgcttgcaactccatatgaccagcccaagtcccatcctcaagcatagagtcacaatatttctcaaacggttcctcgtcctcaatgaatggctcaaaatccacacggtgctcctgtaagatgcatacaagaaagattatgaagtgtaaataggccaatgcttgcttgcagcatgtcttttagataaaagaacaacccagcctggcagcctgtactctacgcccagatcagatgtacacagccaaagtttgcagcatgtgcaataccttattgattcaatggcaccctaattacagttcttaagtcacagtgttacaagatgtttcttggtcatagccaaagcttgcagtatttctaataccttattgattcaatggcaccctaactacagttattaagtcacagtgttacaagatgtttgttttggtcatctcatctgatgcataccttaatgtattgcacaatcattgcacggtacttcatgtgctcttcctcgttgccttcgagctggtcgcccattgccctgcagactacgatgagtaaccatataacacaagactgcataatgcatatactattcctcctttcataaactaacagtactctaacatatcgtacaacatcgattagcctcttcttgtaaaaagtggcaagaatttgagtaatggaatcgaaaagaagacctaaagaagcagttgccatccgcactaacttcgataatcttcaaccccagcgagtccagctgcgcccggaactccgtcatgtcggccttcttcgcgaacttcttctcctcctaacaaatcaatcaccaaaaggaaaaaaaaacgagaaaatatattagctaaagctcaattccccttccaccaaaaacgatccaatctccagctgactgaggcgcggggtattactgcatcacgcttcggcttccgggctttgggcgccgccacggctaccttcttcttgttccgagccattacgacacgtgcggtagtagtggagtctcgcctagatttccccgcggcggcggcggcggcgagggggaggggaggcggaatcgcagatagtatcaaatcgtactctaccagaagcccggagaagaaatcggatgggaaaaggaagaggagaagagaagagaagtcgtcaggtgatatttcgtgggccaaatgggccgggccgtaacacctcaatccccaatctgctacggcccgtgtgtgaacgtgacacgtcatcctatttagaatcgaataccgaacctgaacgtgacacgtcagatttaggagtagaaacgagtacactctacacgatacagatccaatacgagaccgacacgtcgtcagcgaccaagtaaaattcggtcacgaaccgtacgccaccaacctgtataaattcatcgaccgccaagcctctccagaacatagcacaagccaaccaaacaccgcacgatttcgtatccacacatacttctacgtgatttcgtttcgacgatctcgaggcgccgcggcgtgacgtgacgtcgacgacaaccatggcaggcggtggcggcaagtccgtagcggcggcgctggccatggcctgcttcctcctcatcctcgccgccttcgctcccccggcggcggcggcgccgccggacatcatgtcgatcatcaggtacaacgcggagcacggggtgcgggggctggagcggacggaggccgaggcgcgcgccgcgtacgacctgtggttggcgcggcaccggcgcggcggcggcggcggctcgcgcaacgggttcatcggcgagcacgagcgccggttccgcgtgttctgggacaacctcaagttcgtcgacgcccacaacgcccgcgccgacgagcgcggcgggttccgcctcgggatgaaccgcttcgccgacctcaccaacggcgagttccgcgccacctacctcggcaccacgcccgccggcagggggcgccgcgtcggggaggcgtaccgccacgacggcgtcgaggcgctgccggactccgtggactggagggacaagggcgccgtcgtcgcccccgtcaagaaccagggccagtgcggtagctgctgggcgttctcggcggtcgccgccgtggagggcatcaacaagatcgtcaccggcaagctggtgtcgctgtcggagcaggagctggtggagtgcgcgaggaacgggcagaacagcggctgcaacggtgggatcatggacgacgcgttcgccttcatcgcccggaacggcggcctcgacacggaggaggactacccgtacacggccatggacggcaagtgcaacctcgccaagaggagccgcaaggtggtgtccatcgacggcttcgaggacgtgcccgagaacaacaagctgtcgctccagaaggccgtggcgcaccagcccgtgagcgtcgccatctacgccggcggccgcgagttccagctctacgactccggcgtgttcaccggccggtgcggcaccaacctggaccacggcgtggtggcggtggggtacggcacggacgccgccaccggcgccgcctactggacggtgcgcaactcgtgggggcccgactggggcgagaacggctacatccgcatggagcgcaacgtcaccgcgcgcaccggcaagtgcggcatcgccatgatggcgtcctacccgatcaagaaggggcccaacccgaagccgtcgccgccgtctccggcgccatcgccgccgcagcaatgcgaccggtacagcaagtgcccggcggggaccacctgctgctgcaactacgggatcaggaaccactgcatcgtgtggggatgctgccccgtcgagggcgccacctgctgcaaggatcactccacctgctgccccaaggagtatcccgtctgcaacgccaaggctcgcacttgctccaaggttttaaatttaaattttatgtttacttttaatttttagagttgattttagcgtttttataagtaatttctttttcatcattgacttttttttaagttgttaagaacatatgtaaaagttacattggccgctaatacgtgttatgtctgtgtgtgttatgtgctcacacgttgccatgttttttccttgacagagcaagaacagcccgtacaacgtggaggcgctgatcaggactccggcggcgatggcacaaagtgttccggaacaacctgattcaatctcttttgtagttttgaatagggaagatctagtatagaagccttatctttgttactgttaccgagtcctttattattatcgctctttttttttcgcaagatgtataaagtcctaaacagttactgttactattactgaagttattatctatctttggatatgagttctcccaagtacagcatcacgtgttgttacagctctatcgtttgttttttagggtgtgtttagtttacgaaaaaaaaattggtatcacatcgaacgtttgatcgacgttgaaaggggttttcggatacgaatgaaaaaactaatttcataactcgcttggaaaccgcgagacgaatttattaagtctaattaatccgtcattagcacatgttggttactgtagcatttatgactaatcatggactaattaggctcaaaagattcgtctcacgatttccatgtaaactgtgcaattagttttttaatctatatttaacgcccgatgcatgtgtccaaagattcgatgtaatatttttagagaaaaaaattgggaactaaattattaataaacgttacagctgacaaatgggattgtagcttttgactgagttgacaggaacagcttcctccatatggagaaccctgtcctgaaatatcaggagaaccatctcgtatttggctcatcccaataatccttctttctataaaactaatacctattaaacacctaaaacttaacatcaaaatatactacctctgtttcaatttataagactttctagcattccccacattcatataataaatctatatatatataaacacacaaaacttataacatataaacatatagtaattatatttacaattatttcattataaaactaaatatatacatgctaaaccatcatccttcaatcattttcataatatttcagttcaaatcatttcatcgtttcttcaatatctaacgtatatattctgcagcaaagcgcgagagatcatccagtgcatgttatgcttgtgctttgaacgatagtttcagcgcaactaattgcattggtactctgtttcatggtgtggaataaaactgccatgtttagtttccttcctattcccaattttccatcacatcatatcacatcaaaaaaaaacttttctacacatataaacttcaaactttttttctaaactctcaactttctttgaacttttattttttttcaggaactaaacacacccctgctagcatgagtttccaaaatataaatatcaggagaatcctatttccaacaa

SEQ ID NO: 5402 - DNA, 22957 bp, Oryza sativa
agtacatatattttggtagtttagtttcacaataccacagctatcgatgaatggattcacccgtgagatgacgtggttattccatctaggatgagaacgtggcatcctattaatttcgtgcgatggctggtaataggatgtcatgtcctcgtcctaggtgaaacagccacgtcatctcgcgggtgaatctattcatcgaagtgtggttttgtgaaactacacaaccaaaatgtatgtacttaagttccaagtgtcaaagtgtgtgtggttttctgcaacttggaccacaaaacgtgtagttttgtgaaatttactctataaagagtaatgcctgattccagtagtgatttttgtacacacatttttgttctgtttccaattgaagtgattgatagttgctgtcttgtacttttttatgtttatactgttcagtgtagaaaaactgactataatttattgatggtttaacactttgctttacttaatagcttggtagcactaaggttttccttagagctggtcaaatcgcaatattagatatgcgtcgtgctgaagttttggagaatgctgcacgccacattcaaggtcgtttcagaacattcattacacgcaaagagtttgttaaaacaagggaggcttcaatttctatacaagcatattgcagaggtaaaatttctgttgctttgtcaccttatttcctccatgaattctgatatattgctgctttcagtgctaaattgctgctacattctggttgctaattttaatgactttgcaggctgtttggcaaggaagatgtatatggtgaaaagagaaacggcggctgctataattgttcagaagtatgtccggagatggcggcttcatcggacttaccagcaagctcattcagcagctcttcttattcagtcctgtattcgaggatttatcgctcgccgttatttctcagttatcagagagcagaaagctgctttggtgatacaggtgtgtccctcctcttaagtttcaacttggttatctggaaacagtgctaggatagtaaataaataatttttaagctctcttttgaagtcataagcatgttccttaatttgttgttgagctgttggctaaggtaagtctagactaattagaatattagcttcatagcttggcatggaaggttatattgtattgtgatgccatcaattgtttatacgagaaaaaaactgactcatatggttgagttttcaacactgatttctgttggcaattgcagtcattgtggagaaaacggaaggttataattcttttccaacaatacaggcaagccactgtgaaaattcagtgtgcttggagacagaaacttgcaagaagagaactaaggagactcaaaatggtaaattctttgtgctattcgatatattatcttttggcgattttcaagccgtactgcaaaactaaaatggaccattgcctgttttagttttttttggtttttctacctcaaacactaccgtattactattacttgttattctttcttcctccacatgctcatgagggatacatgtttctgtgtacttgaaatgatctggtccaattttccttccaagttactctgatctgctccctttgtgtcatctggcaggttttattatcctgtttacagactagttttgtttctagcctgttattttcatgcattgtgaatactcttaggcttagttcatttctatgtatagaggttagctactacctcgttatttgtgagcacgcttcccaaactgctaaacgttgtggtttttgtaaaaactttctatatgcatttcttttataaaatcaaataaacccaattttcaagtttttaagagttaatactcaattaaccatctgctaatggcccgcctcgttttacttgcaagtgaaaagctgtcccaaaccgttcattcgaacatagccttatacttggtttatgttataggctgcaaacgaagcaggtgcactgcgtgaggcgaagaataaacttgagaaaaagttggatgaccttactctgagactaactctagaaaggcgactgcgtgtaagtgttgtctatcattttttacctttgtgttctatttgttaattagtacttaataagatttgctgttgaggggagaccacacatgtatatattttactaatatgcttgttcctaacagtattatgacacttatatctgtcatttggtatttaatgcttccataccattgtcacatcatgagattaacctaaatgtttcagaaactgattctgtgaaaaaaaatttcatgtttaataataatcataataatgtatttcgcctcatggggcatgaactttaaaatgtaggctgctggtgaggaagcaaagtcagtagaaatattaaagcgcgacaaaatgatagaatcattaagtgccgaatgtgctgcagccaagtcagatgctcaaagtgaacatgacaaaaatcggctactccagaggcaattggatgattcgttgagagagataactatgttgcagggtagcaagattatgacagcagaagcagaaaaggagaactccaatctgaaggttcaaaggctttccttgtcattttaatcgcaatgatgcttggttaactacattttcagttattctctgctgttttttttacacctttaattgcatctctcttatttaatgatttttccattgtctaattgctgtacttctaatgtgataaagttaccacaatcatttttttatttagttttaccattagttttcattgctgctgtaatttgctgttagcaatatgcttctgtgtttctcttaattgtactttggctgaaattattctatattactctgtacagaacttagttgagtcattatcaaagaggaattcgtcactggaatatgaactcacctcagctcgtaaaggtagtgatgatacgatgaagaaattgaaagatgttgagggaaaatgcaaccatctccagcaaaatttggacaagtatgttttccctttcatttattaaaccatagagtgctagaaaaatatgtatagtattctaaggtttattgctgctcgtttgtattgggatgcaaagcatctaacagctactggtttgctaattttagattgcaggagaaacttacaaacttggaaaatgaaaatcatgttcttaggcaaaaggcattaaacatgtctccgttgaacaatatgtccatggctacaaaggcttttcctcaggttcttttctttgctctttattaattgcttcagctatctgtttgttgctgttaatatttgatctagcatttaagttcttttattgatactcatatttgggacactgggtactgctctagtttgcatctcttcttaaatagtttactgacatgctgcttgaatgcagaaattcgctacaccgattgggcttccaaacggcgagcagaagcacggatatgtaagcctattcttttgatcgacgtacagaactgctatagattcgtctgacatattggatctcaatttttgaattgtaggaaacaccaccagcagcaaaatatctcgcttcacttccacagagtttaactggatcaaggagaaccaggatgcctgttgaaaggcaggaggtaaattccacatcatatttttcatttgttaatttttgcttgttctagctctgttgataccaccttagataagatggcaaataatttgttctggacgatgtgacattattcaacaaaatttcttatgcatcttggtgatgattttgtgtcatgcaggaaaatcatgaaatcttattacgatgcataaaggaaaatctaggattcaaggatggtaaaccagtcgccgcatgcatcatctacagttgccttttacactggcgtgcttttgaatctgagaggactgctatttttgatcatgtcattgaagccataaataatgttctcaaggtaaacttacttcagactcatctattttgctgtttgtgctaaatgtttatttgcggatgtcaaataatcatggaagttctcctgttcttactccagggggaagaggctgacggtagattaccttattggttgtccaatacctctgcattgctatgccttctgcagaagaatttacggtcaaatggattatttgctacaccatccggccggtctggtggacctctagggataggtgacaagatagtgcaagtaaggaaccctgaaaattatggatcattttcttaccagtactattgaattatgctcagtgtgctgatatccatatgaagtaatattttgaaagcaatgtcctagtttaactctacattattttatcatgtctgtatattttttggacatgacctggctattgacccagtcaacaactcaacgtattgggtcactggttgaagctgttggtcactgatggggcccctggtttcattttagcggcaaaaacaatagcatgacggtgcttagtaaggtcttaaatagcttattcggttcaactggaataagtagtagctaccttagttggttaccaggcagatgcagcacacatttttggaatctttaagctggtggagctagccagcagttgtattagtctatgccgtcagttacgccaaaactacctggttttaacataggtctttggatttgccacttcaaagtggccatcaatcagatttggtctggttggactgtcatggtgaaagtgctggttctcctcctccctcctttctgacaggccactctgctgttctggggcagatctggtaaatcatgtgtacctgtagaggatctatacgcttcccataatgggggaaatggaaacatcatggcatcatgctcttcaagtattcttaatttgcacaactgtataagcccagtaacatgttttgctggtatagaaatttgttgtgcaatttttattttccttttttttcgaaaattcgggtacgataaaattattgtttccctctgttactgaaatggctcctgttttgtttcttgcagacactcagatctccttcgaagcttatgggacgcattgatactcttggacaagtggatgctcggtatccagccatattattcaaacagcaactaactgcatgtgttgaaaagatttttgggcaactcagggataatctgaaaaaggaaatatcaccacttcttagtgtctgcattcaggtacttatccactttaaaatctggacgacaaatagatacattggaaacctagatatgtcagtacaccggctcccatctgaatattttcatgcaggctccaaaatcatcacgtgcacagcctggaaaagcatccaaaccacctggggttggtgcccaaccaccatcaaactcccattgggacaatattgtcaattttctggacttgcttatgtccacgttgcatgcaaattatgtgagcattttcttaagctttttttcttcatcagtggatttaaaggctcttggggtgaatcattcttttttattattatttttttttgctgcaggtgccatcattctttatacgtaaacttatcactcagctattctcttttataaatatacagctttttaacaggtaatttcctcaatttttaaatttatccttgttacatttacatacaagcaaacaaaacagtttgcacatggtaaccaatcgatgttattgaatgggtagttattccttggatgatataattatgtcttcattagttttgcaaatagcgtgatcattgcaccttttatttatgatataagcaaagggcctttttgacagtgaactgatggaattctgttggttaaaagttataataggagatggtggtagaattactttgggaaaaatcggagatggtggtagaattactttgggaaaaatcattactgtattatgtttgagataaagttataggtaaaaataaaatgatgaaatcatatggtttgtaatgatattaacagtcctgttcccattgttccatcagccttcttcttcggcgcgaatgctgtactttctccaatggggaatatgtcaaagccgggctgtcattgctggagaaatggatttctgatgccacggatgaggtaggtgtttgcattctgcttgtgaagttgttttgcactctgagaatggactatgagaaggcctgataaaattgttagcttatcccactatatttgttcccagtttgcttatataccttgtgttttaggaacttaggagcaagcaacattattatacattttatcggtgctctgactttttcacattgctttactagtttattatccttgtactttcagtttgcaggaacatcttggcatgagctaaattatatcagacaagctgttggttttttggtaatttcttgtgcatgctgcatttgtttccatgtttctgtgcttcttttgtatgcctgccgaacatctcactaattgcataacacaggtcatacatcaaaaaaggaagaagacgcttgaggagattaggcaagatctttgcccggtaagacttgctgcatgtatgacctccgatttgtgcatatccattatttatgccatacctcaactagttattttctgctcttgttctttgtagaacttgagtgtacgccaaatatacaggatatgctcaatgtactgggacgacaaatacaatacccaaggaatatcgaatgaggtaatcacttttggattggaggctttccattttttggggattcactatgcttttttgttctgagaatttcgggatctggcaggttgtttctgcaatgagggaggaagtaaacaaatatactcagaatctcgtatcaaattcctttttattagatgatgatttaaggtatgcgtgatttcttggttaaaattttagacagcagaatcagcctttttgtgtatgtaaatcactactatccttattgcagaacatgatttactatctgttaatttgcccttgtatgtgatgctttctttcagtataccgttctctacagaggatttgtcaatggccatccctgctatagattatgcagatgtagaatttccagaatcgcttcatcactatccatcagtacagctcctagtcaagcatcatgatccacagcctgtctaatagtatggttggggttgccttgaagattcgtttatttttgttcccagtttttagtggggtttcatcttttgaactgttgtatggttgttaggcttgtagtcttaagtttatccggggtgaaaaggttgtaacagaaatggtaggatgtcgtttcaaagcaacaattgttgctcggtgaaaattaaacaatcgtggaccctggttgtccaccagtcctatcttcagatgtacatagtgttgtagagacagttaagcatttgctatgaaaaatatccatgttctgtagcgttagttttctactcgtgatctgatgtttggtgcaatgtttggcaaaaacataactacctttgggctcgtcaaaacaaaaggagaataggaaaaaaaacgcaattagtatacctctgccattacccgattagtggtacctgcatcttaaaatttaagcttttctggctatggagtagtcaacactaacatattaggattatttgataactgttataacggttataaaaagacttgcaatgggttttaaggagcgagtgcgctgatgtatctgtggcaaaatctgtcgtaggtaatgtgaaatgtacgtgaaagtgttgggaaataacgggaattgtttgtattcagaaatatccagggaagacaatcccttaaattgtgcgtttttttctgactaatgtagaaatgttcatcgatggacatgtagtattatgcgggaaaactgatatgcatacgactcaattgtttaactcacgtacaactgaatttgatcagcggttgtaaacagttacagtgtatatgaacatgctctccttatataattgcatatctctagttatatatgagtagtggtgaaatcgggtcgggttcggtcggatctcactcttcccatatccgaacccacattttataatcggaatcgggttggatacggatagtatcgaatacggatacaagcacggataatatcgggcacaaatatgagacgaatacgtaccaagacggatacgaccactatcggttacgaatatcttttcggatatcaagtcaaagcaacgatcatctatactatatagataatagctatatattcaaccaaccccatataaccataatgcgactatattattagggcttaagatgtacgggcaatacgacaatgaacaattgatttttaactggaaaaattgaaagtttggttgaaattggaacgatgtgatggaaaatttgaaagtttgtgtgtagccgtgtaagaaagttttgatgtgatggaaaaattgaaagtttgaagaaaaaatttggaactaaactcggcctgacatgtgatgagctgctaacttcctgttcctgaagagatgaggatcggctctggcagcaaaggcatgtagcggcggtggccgcggctcagcggacgcagcaggtggcgcaccggtggcgctcgtagtctcggcatcattgctcaatgggattagtgaacagtaattagtatttttggttattgggttgttaggcatggtttactggttgatggtggtcattgtactagtgggccttttggccactagtgctttattgggctagacatgttatctaggtattatccggatatttaaccgggtaaaacccatatttttgctggataactcgtatccgtcggataccgtcctcccaaacccgatctcatatccgatagaaaatacccgtattcaaacccgctacccgtaaaaacttccgggtacccgaatttttgacccgaaattgtctcgaaataatacggtcaggcgggcaggcgggaaatacccgccccgttttcacccctatatatgagttgtataactggatcgtacttatagcagtagaactgaagtttagttcttttcaattgaatggctgcttttgactgaaccctcttttcatttttcacatttattattttccgggattcagcggtacaagctgaaaacaaagggaaaaaaagaacaccattttcctcaagaaaacaaaaggcaatattacattttttgctcttgggatcgaaaatagcatcaccaagaaaaagaatcaacgaacatgttactgcacctcctgcactttgcatccaccgtagaaatatgttaccactattatgtacacttgaaacgatctcgaacaatacacgctcacacgcgcgcacacacgcagtaacaggcaaattcacgccctgccgcggtcgcactttgcatccaccgttgaaatcttgagctagccgcccctgtccctgctctgcctcggcgagccggacacggagctcgcgtaccggtgctcccccttccgcatcgcgccctccgcgtgcaccgccgacgccacgtacctcctcttcgccttggccgccgccgccacctcctcctcgccgtcctcacccgcggccgcggccgccttcttcccgtcgtccttggcagcaacaacaacggcggcagcggacgggacggtgtagacgaagggcccggcgagcacgtcgccgcaggacgtctgcagcagcggctcgagcgcggcgacgacgtcgcgcatgtgcgggcgggacttgggcacgctgtggaggcagtggtacgccaccatggcggccttccccgccgccttgtccgagtagccgccctccaggctggggtccatcacccggtgcagccgctccggccgccggaggtacggccgcgcccagtccacgaggttctgctcccgcccgcgccgccgcttgtccacgctccgccgccccgtcagcagctccagcagcaccaccccgaagctgtacacgtcgctcttcgccgtcaggtgccccgtcaggatgtactccggcgccgcgtacccgtgggtccccatgacgcgggtcgtgacgtgtgtcgcgtccccctgcgggccctccttggccagcccgaagtccgagagcttcgccgtgtaatcctgcatcgcccaacataatataaatctctccgtcagccacaacatcataattaactatagctaagagcaagtttaatagtatagccaactactaactttaaatcatttataactaatctaatagtctattcatacaatagttaactataaaaatatactcacaattaataaccggtcccacctctcatacacacataatattttggagtatgtgttgcagctgtttttctctctcttctcttttcttctcgatatgtgattatagctggcttatagcatgcgtaactgctctaatgtagcattgttgatttgaacttttgtttgtatatggtgtcagcttagtctatgtttctgtgtaacataaactgtaccagactcgataatgttcacgtgtgattttgctactacaagacgatttcgtgtcaaaattcgatgctacctgccatgggccggcatgtgtgttttactcgtagaatgttctctttactgtttaggtgggtaattaactagtcaaagagagtggttagctttgcaattaattgctcggacaaacgcttgacctgtacaattttactgttctagaggctttgtagccacagtgctcatgaacagcctttgcaacaaccaattgtgtaatctggccggcgatcgatcgacaccaaaccgtacgtttccctaatttacatatctgcttagaataacacggacgtttttgtccgattaggtaggaggcataaataaacaaccaacccggaggagagtagtcctacataatttgttcatttctttaagttttggatgcactagtacttaattaattctccatttcttaagttggccgccacaactaataaagtttgccacaaagaatcgacagagattggccaaaaactatagttcaaatcgtgtactctctactctatatacgtgcgtgctgcccctgcagctaaggtatagcttatggccttattagattcagaaaattcagaattgactagtggcgatctggcgattaggcgaacgggtcgtagtcaccaacgcagattaagaaatcttaattattggagccgatcgtacgtacgtgtgcaagatagacctggtaaaactaattaagcataattaataatcagaggagtactcaccgagtcgagcaggatgttggatgccttgaagtctcggtagatcaccggagtgtcggcgtcgtgcaggaacgcgagccccttggccgcgcccaccgcgatcttcagccgcgtcgcccacggcaagctcgacagcaaatctgcaagattaatcaattaaccgcgctcagttaatgatagcaattactggttaataatgatagtgcaattgattagtgagggtgattaagcttactcttgaagaggtggtgctcgaggctgcccctggccatgtactcgtagacgagcatccggtggtcgtcttggcagcagtagccgatgagcttcaccagatgcggatggctcaacatccccaggtacaccacctccgcctgtgcgtgacaaaaccacgcaattaattagctacgaactcgactaattatcgtcaaagagtaccacggaattactctgtacgtaccagccattcgcggtggccctggtcgccttcgccgtcgaggtacttgacggcgacgtgctggggttggaggaggccggggcggagcttggcgtcgatgaagcccttgtagacggggccgaatccgccctcgccgatgaagttgctgccggagaagctgcgcgtggcggccttgagctccgccagcgtgaaggcctgcagcccggactgcgccagcgtccgcgacaggtcctccagcgacagcgaccggagccgccccgtcgcgctccgcatccgcctcaccgccttcttgttcttcaccaccgccgccgccgacgccttcttctcctcgtcacctcccgtctcgtcgccaccgccgccgaagaagcaacgcaacatcctcctcatctctggcaccgcgccgccgcgcgcgagtgcaacaacaacgacaacaacaacgacgagagaagaagtcttttcgcgggagagagtgcgggtgaggtgaggagggaggacttggtggtggaatggatggtttgacacggagtggggtatataaagaggaggcgggagggagggaggcgtgtggggggttggttgggttgggttgggtttgttcgttgggttggctctcggagtctcgtgcgcgctcgcggagtcgcgcgtatgaaacggccggattgacctgatcacctaggcgatgcccacacgccggccggacggctgggttaacttggtggtttccgcggggggtgatgtgatgctgagctctatagcctctatgtccccctatgaggccgaggccgtccaggtagcttgacataatggattgtttctctcctgttttttttgtctatattttataatagacaaacattatataattagaattatataattagagcttggctgtatcggtgaattgaaaataaaacccgagctaggttagacaaatataataggtgattggctcggtagatggactaaagataaaatactagatctactatggttccgcacacgtgaagagggctactacatatagtggaaaggagatggaagaaaaacgattgcacttttaatgtagcagagaaaattacactttaattccgatgaatattgtggaggagctataaaagtttcagagccaagacaaaactaaccagtacattgagtattttcttaaaaaaatatatatgcctaatttatgcaaaagaaaaatgtgttcaccaacgagcccagctcgtcacccaaaagttgttgagaggtggcttcgctattggatgaattaatataatagtaatgattctagattaatcctttcacgatcctcgaggtggtataattgagtgccacagtaacactaaatgtgtactccctccgtcccaaaaaaaaaggcaaaccctgggtttccgtgtccaactttgactgtccgtcttatatgaatttttttataattcgtatttttattgttgttagatgataaaacatgattaatattttatgcgtgacctgtctttttaatttttttttcataatttttttaaataagacgggcagtcaaacgttgggcacggaaaacagtgtttgtctttttttttacggagggagtactatattttcaaaacttatttaaggatcttaagtattctcttttcatagtaacgttacttcgtacatacgttacatgcgtataagaaattaattaatattttaatgcagcattcttggataactatgacaatatttgtgctggaccacactgatgttgtttaaactaagaagttgtaataagcgttggaatttcacacatttgaaaaatataaagtagtcaatctctagcatttgatggatgtaaaatggtttaaagatgatgtgactgggaggggctatgtatgttgcttgtggaaagaattaaagcatggatatggtcggcttgttgcttactacctccgtcctaaaatataactatttctagcacagtactttatcccaaaatgaagctatttttctacctacctttttctctcaaccaatcacaaccattctttttcacctactttctctttttaaccaatcacacaccttcttcaatcattctcacctactttcttaatacccgtgccaatctaaaaaatatttatattttgggatggaggaagtatgttttgcatccgagtcatggtaagacagagacatcttaccttcccttcaagtttctattagaagatcacttcatttatgttgttttctactagatggtttattttatttttaaaggggaaagcgaccatgcaaaaactaatgatgtgtttatggatcttatcatctggacttgtagagtttaaacagacctaatgatcagggtgtagaacatctgatttgaatatctatctatctatctatttcatctgtagctaactgaagccaaaaacaattcgactagggcttatgatcaaccgattgatgttgaaggattatagcaatgaacgtaacgacaatagaagtagagaactgccttatttttacctacatcaagctcgtcagttcaccctaaaacatatggatgcacaatatatagtctatctcatattataagtcgttttaattttttttatagtcaaacttttttaagtttgatcaagtttataaaaaaattagcaacatataaaacattaaattagtttcattaaatctaatatttaatataatttgataatatttttgatttgtgtttaaaatggttctatatttttccctacattttgataaaattttaaaaaaattgactggaaaaaatcaaaatgacttatgatagggggagcgcagttaattggacatctagaaagaaagcctcaaaatagagaacatggataactagctatggcgatagctaattaattaatcaaatgcttttatgctaaagataaacacgactaaactttagtaaaaaaatgcaggatcaatatcgatgttgaaatacaaatgtaggggggagttactccttaactagtggaagagcagcattctatatatattatgcatttggtgaaatagtgtcaagtgcatgggtttgcttcgaactaaactatttggtgctcgtgctcaccatgcgatcaggtagaagaatctcatgcacatgcacacatagttccaatcaaaggaacggggaatccaggaaggctggaggaaagcaaggcgctgatacgaggaacagtaaaataatcagccaaccaaaccaacccttgcactgtactagactgttcatctatctgttgttagatttgcctatggctggacgattggcctagagtaagtttaatagtatagcccactactagctccaatttatctataactaatttaatagttaattcatacaataattgcttactatactattaatatatggtctcactgtcatacacacagtgtgtactggagtccgcgctgcagctgactacagatctatagcccgctgctcttctctcttattttttatctcattaaaatatatttacagctggctaatagactgttattgtacctgcccaaagaaaatatgtttagatcaacagatagatggacacctgtaagaccatatcataatacttctggtgagaatacatgatggagaccaggatgaatgattagccgtatctgcactcgatttgtacgatgtgtaatctctcaacgattgaggtgcacatgtgtgtgtggatgggtgtttgtcgaggaatcttggaatggttgatgaaataatggccattgattggctctcgtttctcctgagtcaagtagataatcactttgtttacaggcgttgttcactcttcgccatcagcataaccttttaggttgaacgaattatttcgccatcagcataatcttccgtaaaattcttgctttttgaacgggaaaagagcctgtctattcgtgatgcggaaacaagtggatggtgttaaagtgaaaagaatgaattatttgtagtcctacagataacgagatcataggtgaaaagatagcgtgaaagccatcctgtcttcctgattttgtaaaaaactctcactctgtgtccctataagaacagagcataaagatggctactcatactgatttttcaacctcgattttcagtgatatatgtacgattggttgatgaactaactgcacgattcaccgtcacaattactcagtacattcgcattcttatccactaattaatccatcccatttttcaaaataaaaaatatcagccttgaatatatcttgacttcaatcatcgttcgctcatagtataattcaatcccagctctcaggaaaaacctgtgcagtattttttttctcataaccggaaattactactgctgctgtactatgtacttgcatcagcactaaaccattttaattttaattcgccactaattgtaaattcgggcgtgtgccctcgcggacacggtgtctggtttgatttaattttcttccaaccaaactgggccatgagacgctccccgacaaaattggaggattattacagagattctttgcagaaaaaacacaaatctttgtggattaataactaactaataatgcaaacacgttctccaaccaaccctgctcgagatgagtacgagatgaaacatggttttggatttttggagctgtaccatgtttctagaaatggagcggctagctaagacattgaccatttctgcttaacctaactactccctccgggttgataatacttatcatttcggaaaagggtgaggtcaaactttagaatctttgattatcaatcattttcaaaatatttctctttcaaatatggtgactatatgtatagattggtcttaaaaaaatactttaataagatcatatatttgttaacacttttatatatattataatagaaaataatggttaaagttgtttttttgacaccgtgccattgtccaaaacgataaatattatcaacctggagggagtacccgtatgagctagccatgattaggggaccagcactgtactactgttgcattagcacttagccgcagctacttatctgtgagatgatacttcagtactttgtttgtttcttaaaaaatggatttgggttgtcatgtagtatgagttggtaggattagtcttaaatggtattcagtagttggggatgagaaaaaacaatatcactcgacgcggaacagttcatcaagttgtaagtaaaataaaattacgattggcaattttgtaagtatatacttgtgggcaaatgtatcttgttaggtcaatggctgctttgcaaggatttccttgagctgcacaatacaagcactgatcatttgagaggatatcatatcatgtcacaagattgtaagacctcccttgtgggcctgtggcagtgtcgtaattctgacggtttatacgggttgtttaagtatagtcatgttttgaaatataaatatttctaggttttgtaattatagattatgtacatgttttaaatgtaaactttgtaaatttgtagaaaattaaaatttgagatgaaacagagattgtctggctagaatagtacaacatactccctccatcctaaattatagggtgctatcctttaagaaactaggtgataccccgcgttttgctgcgggacttatgtataagtatattttaaatattgttaaaatgataaaagttgaaatgttgagaaaataatatgaaaaagatgatttgacacatacttgttgatctctataatataatattgtagatgatgtatcatgtttgcatgaaatttaaaatatactataatagtaattgctagtgagtgaaaatatgacatgtttgcatgggattttaaatgggctagaaaagtaattgctagtgggtgatgatgtggcatgcttgcatgttgagctttagcttctaataattgttagtgggtaccaactatatagaaaatatagatattaaactcggtatttttttctattaattatattaactatatgtatatatgctaggtatatcactagatttatattttaaaataatttaatacgatgctaattttatattcattagcaatataatatgaaataaattaatgatctatcctatgcacacagaccctcacgtgtacacacgtgcacaccaactaaaaaatatcaccaaaaaatctaaaaaaaatcatacacatactttcaattgtattacatttagggttaaaatcttaacgtcaaattcattatgttttagccgtaacaaaaaaaaaacaaaaaatctgacagttttaaggttgtaattttgtcagaattttatcttttttgttattctctatgtagaatgaatttgaagatgcgattttgcacgtagatgtaatactattgaaagtacatgtatgaatttttctagaattttttgtgataatttttagttggtgtacacggtgtgtacacgcgagggcctgtgtgcataggatacgctcccctatatcttggaagatcgttcttataatttggaaggaatggatagagtaccgtacaagcagccttccaatggaagcgtagaagcaggattttagtactgtagtgcacatacatttcaacctccaccgtgtgcagatgtcaaagggctaaacgtttgacgagagctcccaacattcagaaaccggacagcttcctcccttgaagaattcagtcatgtgctcaatttgacctgtctcagtactcctacggagcactagtgcccacacggctctacagcctttggactcttcctcctcctccgtccagacaagggagagcttctgcttctacgcgttcgtgacgctggatgtttctgcatacgagagaagagaaaaaaaatgagagctctgcatggtttggtttctgtcattctgtgggcaaatgcaggccatgacggctgtaatctgtagaagtattgaatttgaccgagacctgcagtagttagttccggccgatttggtcaaattctaattttcgtctcaaagtgctgctttgcggctggcacctggctagcgagcagtatggtcctttcttcaggttcaggttttgatttttttgaaattttccccaacttgaaaatgcaaaggtttctggactttaaaagcggtatgattgtcatttgtcaacgtttgaattctctagagacctctttcgttagcggctgcggcaggtggtttaaacagagtttttgagtttcacatgcctttttaagttgctattgtttcgtatcctgaaacacttggtgagttctagctgtttcggaaattaggcaccaaaatctgctgttaggtccagtgaagattcgcctttttttatcgattgtgtgccggcttttcttctctgtgtccagttccaaattgatagcatatccaaatctcaactttgcaacgcacttttcagagagaaaaattctccggttgaccaaataggcttcgaattagtaatgttcagtccaaagttcaaatccttgccctattggtgttgctcatctccaaccaaacaagaggttttaatttacagcccacaggtataatacataggtaaccaagttgggtttcattgtttcacacgtcttctacctggtcaatgcaaagaactgttctttctcctggtttcaaaactctccaagtacgccacctaggcttattaagtatgtgacattatactttaaccattaatattatttataatatatatataaacgactacaaaattagtatcatataaaaatattttaaatacgaacataatggtgctgacattaaacacatgtattttttttactttaattattaaccaaaattcctgatatcttatattttagaatgtacagacactcataacgcacgcacactcacttctatgaacataacacacgcacgcacataaaccctatctctataagcatcttctcaacgtcgttactaccgaggctcttctaaactaggctacatgtactttcgctctaaactttaattttattctcgtttaatttcgtggcctttgcatgcatggagagctaggattgggaagctggcaacaaggagaatcagtatgcagcttcaatctgacgatttctctggacgtgtcatgtttaacaacggaagcaaaagcaaacgcttgctgatgacgtgccacgcgttgtgtggctttcagagcgtttaaagacggtttttctctgtgctctgaatatacgtacatgtgtagtacgagagatcggaggagaaagcgaaaacgacggcagctagttgtagcagtagccagtagcaagcgtacgtacgcgaaagcgaaatgacaactaaattaacctcgaatccgtgctgctcaagatgcccggagagcttcaacgcttttcgttttttttcttttgtttaattttatcacgcttaagaagataactgaaactaaaacgtgtttgcctcttcataaacatatatcatcgattaatctgcttttccgagttgtttcacgcgacgacttacgcacttacatgagagtgcaaaacttatcaaataaataaactaatatatatttttattttctgtaaagttgcactctttttgtttcctctgttgcttataagccgtgcaaaaataacgaagtaactaaaaatagcctatgcgtgaaacctttatctatgcgcatttagcaatttaaaagctaatataaaaaaaccacaataaaaacccttaaaaataagtttcaaatttaaattttggctatggcaaataagccaaaagataaacgatgtaagactttggcattgggatttctgaactcctgaaactgtacttatcgtctgtcctttctttctgaagctacacagaaattcagttcattgcggcccagatgtaaacacgtcccttttctcagtcactgtggcagcctagtcatcacgtgaagaacactatcgagctagttgcactgatcgtatctcaactcaattggtcgtgatcagataagattggcaccacacgatcaatcaattctgcgacggccaaattgcagccaagccgttgattggtttaatttcagatgttagcgtgtcaccggcctcttcgccattgatggcagcaagaacgcaagaacctggagatcgaccggtctgacgacgacgaagacgacgcacacgcgcgtagtaatcctcaaggcaagcagaggatctagctaataagtttcttgcttaattaatccatggaggggcataagaaaaatgatcaaaaatgtcagcaacaatgataacaaaaagacgggtttagctcacataattaagagatgataatgacatggcataaacaacaaagggtcgggctaactcatgtcgaaaacgaaagtaaacgggaagcacgtgaaaagcaggaagacgatgcacaactaaaccttacaaaatttctttcagtaatcgcttagcattagtcaacagcaacataagaacattcttatcaatgtctgtccctatgttaattaatctgccgagtaaaccggatagtttcacactatggagactggagataatacttttttgcaggccgcgtagttgaaattaagagggcagggctagtccatcaacgagtgattgattgcatgacatcagtgtatattcagcgccgcggtcagagacttcagggttaaactaatggcgtttttgtttagcctgacgaaactatgtagtagtagaagctgaaacacgctttaaattgcacgaagtcaggatacgtacctactagttaacctgaactgcatatctgaagttctgaaacgtgctgacaatttgtgtatgatcgttcaatccattcacattgctaaaagtccgtggattagcactgtaaaggaaagttcatgcgttcgtccaggaattgaactcttttctgtcaaatgtcagcattccagatgaacatgaaaatctagcgtttttgaaagccctgcaacaaatggtgtgtttagttcctgaaaaaaaattggaagtttgaagaaagttgggagtttaaaaaaaagttggaagtttatgtgtgtaggaaagtttttgatgtgatatgatgtgatggaaaatttttgatgctttttggtttttgaaaaaaaacatcgacagcaattgggtcggagttttattctccgactcgcatcatctccgatcggtatttttttattttctccgatgggcttgcagaaaatccatatagatgcagaaactagcactgcaagtctgcaggagaaaaagttcatgcgtttccctatgaatatttgagcatgttttctgtcaaacgtcagcattccagatagatgagtctgaaaatctagcgtatatttctgaaatccctggaagaaaacatcgagggcaaagggggcagtttgttttttcaatttccgatagcctgaacacgttggtcagtattatcgggatcggagttttaatctccgaccctccttgagtcagtatttttccttttttggagccctcaaaaacaagacgaacagattgaaactccgaaccccttcggtcgatatttcctacgagacgagacaagacatgcaatccggcccattaatttgtgtccaaatcgtcattcataaacagtccatattacagccggcagaaaacgttacaaacacaagaacattcttatcagcgtccatatgttaatcaatccgtagaactcactcactcaggtatgctggacagtttcgcactacagatagacttttgcaggctgttgtgtcgaaattaagaggcggttctagacttctatacttagctgctgacgttagtcctccaacgagtggtatgagaaaattgacatcagtattccgtgggcagaaacttaaaggttaatctaagacgttctgttagcctgacgaaactgtaatagaagctgaaacacgcgctcttcaggaaaacctatcaatcaaaggacgtgactatcaaccgtgctgacatgctgtgtaactgtgtatgatcgctaactccgttcatattgctgaaacgtgtctaattgttttgagccttttggggtcaaagatgtgacgtaaccgtggagagttttgccgatgagcagtgtgctcaagaaacgcagcagcaatcttgtgtttatgtgttcctccaggagtattttatatttgctcagtttctgtaaaacgtcagcattttaaatgaacctggaaatcttgcgtatcttttgaaattcttgaaagagaacattgagggcggtggcagtttatctttcgaattttattgatagcctgaaaaattcgatctagtgtgttggagttcctgatagagggcaacgcggccgccggcaaaaaa

SEQ ID NO: 5403 - DNA, 48739 bp, Oryza sativa
  unsure (1)..(48739): unsure at all n locations
ctcaagaaaatgctaccaggagctactgaaccggtaaatcctcaaaattcattttcagaccatgtacagttgagtactgtcaatttcagactatgaacagtagctctaacacttgtgctacacaactgcaggtccagtatttggtttcaaggtggggaaccgacccgaattcgcttggttcttattcctgcgaccttgttgggaagccagctgacttgtatgaaagattctgtgctccggtgggcaacctgtttttcgctggggaggccgcctgcatcgatcactctgggtccgtgcatggagcttattcttcaggcattgttgctgcagaggattgccgaaggcatctgtcgacgcagctaggcatctccgaccttttccaggttgggaagattatcatgagggaggagatgactgaagtcatggtccccttccagatatccaggctgtgaaagaagaacaaagcctgcctatttagcaccgtgtttatcctgcagctgctatggttaatattgtagctgctgctctgtagtttcctaattatctcagatcctgtaccgtttcacagtttgatcgtttatgtgtattcaaataaaaacagaataattatatatcaacagaccttgttctctgaatccatggatattgcttttcatttacacattcccagtcagtactgctgaatttattttagttttcagtgtttgccttgagactggagggctgtagtaaactagtaatcgtctgatcgaacttggcttgcgcccccatttgcttcattttgcatgtatatagggttgtagatgcaggctagttgcagttcaatggtcataaacagtggaggtttttctttctttactttcatacgtagatctccactaataataaaccatacagcatcctgcatattcggaaacgattccaccatcgtgtgaaccatatcaaacgcattcattccactgtaacatctgctgccacaatttgcaatgtccatcccatcctgtagcatcagacttgtaaattgtaatagccacaaacagagaatacattaattccctcccccaccacctaaaaatcattttttttctttcaaaaatacatatttcattaaaaaatctattatttattttcattgtattttgttttatcataaaatgcattttaccatgatttgtattttacatatttacacaaaatatttaagacgaatattcaaacatatatgtctaaaagtcaacaaccacatattaaaaaacggactcaatactacctcctttttaaatagatgacgtcgttgagttttgaatacacgtttgactaatcgtattattaaaaaatacgtaattatcatttaccatattttttagttgttttatcattaaaattacttaaagcattatttatatgttacgtatttgcacaattttttaacaagacgatactcaaacgtaacgttatctattaaaatacaaagggagtatatatattatctgtgttctagtagttcctcttgtaaaaggaagaaaagataaaaacaaactggtgccgacgccaactatttccaccgcatttgggcccacatgtccgggagccaaacgcggctacgcgacccaaacgcaaacgcaaaggcggaagctgggatcccgtgtcgtcgccgactccgactcctcctcctccgctccatataagactcgccccaaccccctcatcaacttcataccaaaccgaaccgaaggaccccacccaaaatcacacgcgccaaccagatcaaacccacctcgcaggagaagagaagcgatctacctctcctcgaggtggtggtgaggatttggagttgaattgtggggagggggacctcgcgggtgttgccggtttggagcccaagatagggttatgagctgcttcgcggaccgccgctgctacgccgccagccgccgccaggacggcctcctcgtgttcatgttcttcatctcgattcccatacgtactagtagcagtagtagtaataattgtaattccagtagtagtattagtagtaatctcctgtaagcggagttcctcctcgcggctgcgtgtacggggacgggaggaccttcttcctcttcgtgttcatcttcttcttcttcttcctctcttccttcggcttcggcgctggcggctatggatcccaatagcctcaaaactggaggtatgaattattcccacttttttgtaatttttttttctgaaattttatctggtaggagtacttggtagtggtgcgtcgtgaaaggtgggaatatttcccattgatcatagtatttttagaaatctatctattgtactttagaattaaattttccacatagggaaggtgatcatcacactttagattttacaagattattagaatttataattctagttgggtacaaattggttagttagttggtaacttgggtatctacagtattatgtagattagtgagcttgatgttcaacgtgatttctctctcttatgattcacatacctgacagtaaaaaacattttttgttcaggcctcttgcttccgaccattgagaggcaatgtgcttcgcctccatccgtcatcgtgatcggtgggggaatttcaggggttgcagcagcccgtgctctctccaatgcttcgtttgaggtgactgttttggagtccagagatcgcgtaggcggtcgtgtccataccgattactctttcggatgcccaattgatatgggagcctcatggtcagtctcaccctgaattgttagtgtgagaaattcactttagattctgttcatacaagcttacttactgttcattccaaaaattcaggctccacggcgtttgtaatgagaactccttggcaccattgattggctatcttgggctgaaattatatcgcactagtggcgacaactctgttctgtatgatcatgatttagaaaggtaatcttttagctcttgatcttacgcttttctttaccgatccgcacaatccttgttgattcttacatcaactctgtcaattgattctgttacagttatgcactctttgataaggctggccatcaggtctcaaaggagacagttgctaaagttgaagaaacatttgaaagaattcttgatgaggtacataatgaactcatttatacttggtacttctggtgccgtttgaagagcatgttcagttcactatctaatttctgttgcattaatgttccaaaaaaaattttctgttgcattgcagacagttaaagtgcgtgatgagcaggaacatgacatgccccttctacaggcgatttcacttgttcttgagaggcacccccatctgaagtatgcacattcttgtaccatgctatcaatttactcacaacatacttaataaattcgtaggatgcatcatgagaggttgactgatatggttaccattatttgtaggttacaagggatagatgatcaagtcttgcaatggtgtgtctgtcggcttgaggcatggtttgctgcagatgctgatgaaatatctctgaaaaactgggatcaggttagctgaaatcagtctatattagcacactgcacattcttatagtgacattagtttgcttagtgaaggatattggtaaattacatcgaattgtttgccatcttgcatagttagttacttatgtttgtattcctcttaactatgcaggagcatgttcttaccggtggccatggtctgatggtgaacggatactatcctataattcaggctcttgcacaaggtctagatatccggcttaatcaaaggtgtgttcttttacctcccgagcatacaaacacaacaattaatttcagcatactgaagtccctttttcagtgtattttggctccacaaaattacttgtcgtttcacttgtcaatattgctaaacagttttgcttactcgcttttgctactgctaaatcttcagggtaaccaaaattgcccgccaattcaatggagtgacagttaccactgaagatggaacaagttactctgccgatgcttgcatcattacagtaccgctcggtgtgctcaaggcaaacataatcaagttcgagcctgagttgccctcatggaagagctctgcaatcgcagaccttggtgtcggtatcgagaacaagatcgccatgcacttcgatacagtcttctggcctaatgttgaggtgctgggaatggttggcccaacgcctaaagcatgtgggtacttcctgaacctccacaaggccaccggcaatccggtcctcgtctacatggccgccggtagatttgctcaagaagtggaaaaactgtcagacaaggaggccgttgatctggtcatgtctcacctgaagaaaatgctacctgacgccactgaacctgtgagtttgccatctcagatcatggccacagttagttccattttcgagttcgcattatctgaatgaattcgttgttcttgcgactgacaatttgcacttgttgatttgtgttattgcagacgaagtatttggtttcacgctggggttctgacccgaactcgctgggttcctactcgtgcgacctggtcgggaagccggccgacgtgtcggcgcggttcgccgcaccggtggagaacctctacttcgccggcgaggcggccagcgccgaccactcggggtccgtccacggcgcctactcgtcggggatcgccgccgccgatgagtgccggaagcgcatcctgatgcagaagggcatccctgacctcgtccaggtcaaggcctacgaggagatggccggagtcattgctccccttcagatttgcaggacctgaaaaaactgaacctgctccaccctgccattgtcatggaatctggattgattcaattgccatgcctatgccctggaatcttgatgattcaatcactcatacaagttcaagttcatgtaggggattaactgcatgaatcaaaattattaattaataattatgtaattgtcatgttattattgaataaataaatcgagatcatgcttgagatctttgtactgggacacagtttcaattaattaatgctagtaacaaccttggagtgaatgaatgtgagtagttgggctggagttgcttgttcgtcttttgctgctgtgattgcaacctgcgagggagaagtgcacggctgtctcgtctcatgcctttgcttgctttgagcctttgaccgtcgccggcggtggatggcagctgacctcgacgtcgacgtggtggaacacaaatttggcgccacgcatagttctgaagatgacaggtcatcttgtgactacaataaaacgctacttccttaaaaaaaattcagtttttaatacaacatttaactctccgttttatttaaaaatcttctaattagtatttttattttcgttagatgataaaatgtaaatagtattttatacgtaactatatttttaaatttttataaatactagaaaaaatgttcgtgctgaagtatattttaattgggtgaagtatattttaattttattattgttatatggattagttaagatgaaatttattgtgggagttcgcttggatatatatttttttagaaaatcatgagctgtggttaggagttcgagatcgtctcaaggtagtatgcgagttttttaaacagacttcttatatgattccttctgtattacaaaaataaataattttaaaaaccgactcaaatatatatatatatgtatttactccatcgtcacttaaagatttgggagggagaccggttgagctgacatgtccacgatggcagaatctcccaagattccacgtggaaccctaaccttccctttccaaaaagaaaacgagagcccttttcctattgacgcacgtgagcgcaccgcttaagccacgctacccacgctacgcctctctatacctaacgctttccccgaactccaagagatcaaaaaaaaaaaatctcaaacggcaaagtcaaaaaaatactactactccgacacgaaaaacaaacagaaaatcgggggaaaaaaatctctgtccattcgttcgcttctcccatggcggcgatctcgcgcgcgatccgggcgtgcgccgccgcggggtcccggcggagcatggcgtcgtcggcgaaggaggtggcggcggccggggcgcgggcggcggcggcggtggcgcggcgcgggcgggagcgggagcgggaggaggacgggaggcgcgtgcagtgggtgttcctgggctgccccggggtggggaagggcacctacgccagccgcctctcgcagatgctccgcgtgccccacatcgccaccggcgatctcgtccgagacgccctcgcctcccggggccccttctccgagcaggtgaaacgccgcctccgtttctctcttcctctctcttggccttcgcccttcgaggtctcacaatgatggtgatggggatggatgataatgaacaagagagcatgcgtttttcagattccaatttcttgctgtcaattgcttttgttaagttgatggatcccctgcatcgagtacggaaaaggctttaagtactaaattgttcttactaaagtcttattatgctataagtaaatctagatttcctctaacccccatctagttaaatcaagcggttaagatcattgtttgtaagagttatgtaagatttttttgtagtacgtgtggttataacaacgaacaggaaaagaatgatccttagggtgcctaaagagatggcttgatgtgagaatagtaatgtattacttctatgtttttcattgttctgtgtctgatccgatttcagcttgcggagattgtgaataatggaaagctagtgtcggatgagatcataataaatcttctgtcaaagcggcttgaagagggagcagaaaagggtgagctgggcttcatccttgatggttttccaagaaccataagacaagcggtgagctagttatttgacctgactgtaagtatgcaaaacacatacttgcaacttctcagtatacaattatgatttgccttcaaatttgcattttcatatttaagaggtgaaatcatatacatagcatgcaatttgatacacataatgtgtaacttgattgctgaggtagtattaatctttggcagttcaacattaagacgctgtgcctttataatcagcttgatctggttactagcagcattttggcgactagacaaatcaatttgttaacctttgcataagttggtagctatgcattagtttacttaggtgtgccataattccataaacggatcagttaagatgctatttttgtgcctatattgcatatatcgttgaggccaacaatcatcaactacttgttaaatcttatccactggaactattttgtgctttggtaggagatacttgaaggagtcacggatattgatttggtcatcaacctcaaactccgagaagaggctctgcttgcaaaatgccttggtagaaggatgtgcagccagtgtggtggaaattttaatgtagcgtccattgatatggagggcgaaaatggtggtcctcgaatgtacatgcctccactactgcctcctccacagtgtgaatcaaagttgataactaggcctgatgatactgaagaggtggtaaaggagcgattgcgtgtttatcatgatttggtatgttctagcttgtgttatttttatttattgaattcctcacttgtaatttgctagtaaaagactaaggctttgtttgtttgggcattcggcagttgcaaattccttgttttccgttagcatgcttcccaaactgataaacaatgtgtttcttttttaaaaaaaaactttttatatagaaatttctttaaaaaacaaataaactcattttttaattttatttatactcaatttatcatgcactaatggcttgtcttattttatgtgcaaatgaaaagctgaataagggaaagtttacatttagtttactttggcatcgtgccgtcctctctaagctgtcatttttgcagtgtgagccagtggaggacttctacagagcacgtggtaaactattggagttcaatctaccaggaggaattccagaatcatggccgaagttactgcaagcattgaatttagaccctggcaatgaaagatctgcagcagcatgatttttgctttaggaatgttcgttatgtatttgtagccctacgccagaagtagttaagtaatgagtattccttgtacctctagaagtagttcaatcgggttaccaaaattatattgatatagcactcaattgtataggtgattcatcatcgatcttgcatgatgccatgatcgatgagtgtgctggttgttattcttaaatgagaaagcttccaataaaccaatacacatttatttgtagccaactatgcttgttgaaagcaacacaaggcaagccttgtgatgacagtaatattttccttgcaactatgcctgtttgaaagcaatacagagcaaccattgtaatgaaattctggtgctattgacacattgagagtgtttgcacatggttctgaaatttcccttgccccaggttgggtcttatctgaatatgcaagtagcctgctgaatactacctccgtcccataataagtcccataataagtgtagccatgagtttctgtgcccaactttaatcgttcgttttatttgaaatttttttataattagtatttttgttgttatgagatgataaaacatgaatagtgctttactcgtgacttatgtttttaatttttttaaaaaaaaatttcaaataagacgaacggtcaaagttggacgcggaaagccatggctgcacttattttgggacggaggaagtacagcagaggtcacagactcagttcaagtagcaaatctgtcttttcgaatgcaatctcctcacggtaagaaatgtgtctacccttttagcaggaaccaaatagtatctggattagaagaaggtatcacggttaaaggcgttaggaattgttatactacagcattggtagcaactcaccgtcacaacgggggtgtagctcatatggtagagcgctcgcttcgcatgcgagaggcacggtgttcgattccccgcacctccaatcttttgatctttttttgatttccattttatcataacttaaaacctgttttttgtttttcattccaccacagcttcatcactcagaacttccatttcatcaaaactaaaaatctgttttttgttcttttttttcattccaccacagtttcatcacttagaactttattttcttgtgatgaaatgaaatgaaaaacaaagaacttcgtatttaggtagtacaaaattggaataggccgtagaaggtgcctatgattctgggctctggctgtccgctgatccgctggccgtagaagtcaagcccatctcacagtctgcagatcgcttctttttacaacccaacgggccattttcagaggcgtcacccgtaaatccttgggccaatgtgacccaatcaatttcgtgaaaagtactccgtagcaaacaacgcgcgcgcgttccctgcaaaaaacgccggaaaacgcattgccgagcgagccgtttcagcaaataagggatcgttagactttatcagtgactgtatgaaacttttatatatgtgtgtgttcttacgacttaaaagataatgctgaaaaatttatttcaaaatttaaattttggttttgacttattatatatttttggggcaaccgatggggctatgaggctatgagctatccatccatccatagcgcaacgtgtgacagcgtgaggtgacaagatggaaaaccgtgagccgcgccaccggtgtaaaccccctcccttcacgcgcgtttactttgcaagcaaaggacaaggaaaaaagccgtaattggcgaagaatgttcttggatttgattagcagcggtacggtaacacctctagcttgcatttgcatggtagggtgatttggctaggagagcaggatcatccgtgcattcaattttcctcatttctttttgcaggctcaatagaggagaggaggggcctagctagcaccaagataatgcagcaaaaaggagagaagagaacatgtcatccagtccaaagtgcaaacgtctctatacaaatggaacatatggagtggacctaagcctagttgcttctgtgtcccaagctcccaagtgtcaaagccttaatgtgcaaaaccacatctgtggggactcctgaaagcaaactaaatgattgcaaaagagttcgtttattcacctatttatttatttattttattttctttccatgtgtctgttgtttgatactttgattgatcatgtgctaaactgcagaaaaaaccaacaggcccagagtaccggcgaaaaggctcctcgatgaaaagtgcagggattctgggggagttgccagtgcgcccccgttggatttttgcacacatataaacaggggactctgctgcacctctcacacagtaacatatatagggacggttccaccaagcacgtttgggaaatggttttttgagcaacatctcatgcgaacaatttaggcactatttacttgtaccttcaccttgtacgtgtgctccatcccatagctgcattatttgcatcaatcattttaattgcatatatacatactccctctcgtatttattttttttaataaatgacatctttcactttttatcacacgtcttttaataagacgaaatatcaaacgtatgataaaaaaaatcaataacgccatctattaaaagacagattgagtatatgcgagacatttaattatttgccacctctcaacaatttaacactcgtgtgacataggagtagacgcatagggtaacaaattgctaaacgtcaagtaatctatgagtagcaactagcaaatacttaaatatctcctaatatgttagcattgcaccaaagtctataactatattgagctttgtcctgtccatggtaaagtgtggggttaaagtgttaaaaagctattggtagcagtatctagtatggcgtggcaggccggtgcagataaaaggggccccgggttttgcccggaaatgaggagaggacgccccggcagctagcggacgctttgcatttgcatgcatggtgctctctacttctccctccgttcccacggcaaattgcaaaacgcatgctagtatttggcaccattagcctaaggtagtagtatcagcgtgttacagaaagaaaatagttaagtagcagtaattaattaaagcctgtgattaaggtaaagcagcagtgcagttacaaaccgaaacaaacaagagtcagcgaactgaaaagaagaccgggaagaagaagaagaaaaaaaaagacccgaacagagttttgatgagcagtgtcaggtctgtcacatgagaagagagcgaagtagctaagctcagcccccactcgctcacatggaacgcctctgctcgcctcgactacttaaccagctaaacgctcggttgattaggagaggaaaaaaaacgagggaaaaaacgggtggaaacacacgcaaaaacacaacgccgtgcggccttgtaaatacggacgacgccgacgcgcatcgctccccgaacaccaaacgcctcagcttgccttggctctcgccagtcgctacgcccgcgacgacacgaccgcgccgcgcgcgcgcgagcgagcgagcatgtcgggctcctctgccgacccctcgccatccgcctcgaccgcgggggcggcggtctcgccgctcgcgctgctccgcgcgcacggccacggccacgggcacctgactgctacgccgccgtcgggggcgacggggccggcgccgccgccgccgtcgccggcgtcggggtcggcgccgcgggactaccgcaaggggaactggacgctgcacgagacgctcatcctcatcaccgccaatcgtctggacgacgaccgccgcgccggcgttgggggcgcggcggctggtggcggcggcgccgggtcgccgccgacgccgaggtcggcggagcagcggtggaagtgggtggagaactactgctggaagaacggctgcctccgcagccagaaccagtgcaatgacaagtgggacaacctcctccgcgactacaagaaggtccgcgactacgagtcccgcgtcgccgccgccgccgccaccggcggcgcggccgccgccaactccgcccccctcccgtcgtactggacgatggagcggcacgagcgcaaggactgcaacctccccaccaacctggcgccggaggtctacgacgcgctctccgaggtgctctcccgccgcgcggcgcgacgcggcggcgccacgatcgcgcccaccccgccgccaccaccgctcgcgctgccgctgccgccgccgccgccgccctcgccgccgaagcctctcgtcgcgcagcagcagcaccaccatcacggccatcaccaccacccacctcctcctcagccgccgccgtcgtcgctgcagctccctccggcggtcgtggctccgccgccggcgtccgtttccggtaatggtcggtgcgcgcaccgtacacttaatactcatagtagctgttacatcccctcccctccaaaccatttactactgttctctcacactgatatgtgggcccacctcgcagcgagctgagctccgccactatacgttattaaaagcccgcgttatgattgggctagttacgttgttgagttgagctggtcgtaattatttactaccgctacattttttttacctttttaccgtggggttcgggagagggtggtcgcggtaataataatgtcctcaactcaggggttgggagaataaagctgcgtgcagtgtggtgcagttcatgcatgggaaaggtgatgcgaatccggatattttatgggggtttaattgaaagatttactccacgacgatactaccctctactcctgccatgctgcaagcatgcgtaatgcgttacattgcgaaatcactcgctttgaatgaaaaaaaagcctgaaactttggagaaaaaaaaagcaccttttgttttctcctcgtgcatgcatgccgcgctgcgtatcttgaactactttggacttttgtatcgatcaacaaaactatacctatattagcagtaattaatactacatttgtagatatcctttgaccgttctatcttatttttgataattaaaaaaattagttacatttaaaaatgctatttatattttattatctaataacaataagtgtattagttaaatattaaacgttggatatgaatagtttaaaacgttggatatgaatagtttaaaactgtattgttttggggcggagtgagtaattgattgatcgattaattaagtggttgactaatgtgtgtgtgatttatttgtgtagcggaggaggagatgtcggggtcgtcggagtcgggggaggaggaggaggggtcgggcggggagccggaggcgaagcggcggcggctgagccggctggggtcgagcgtggtgaggagcgcgacggtggtggcgaggacgctggtggcgtgcgaggagaagcgggagcgccggcaccgggagctgctgcagctggaggagcggcggctgcgcctcgaggaggagcgcaccgaggtccgccgccagggcttcgccggcctcatcgccgccgtcaacagcctctcctccgccatccacgccctcgtctccgaccaccgcagcggcgactcctccggccgatgatcgccattgcaatcatatgcaatgcagcaaggacgatcgatgtaaataacccatggagatgcatggatcgaggcatcggattattgtttggaatggctgcaagaagaggagtagctatatatttttttttttgagtgtgcatcgccatcgcgtcgtctgcgagtattgggagtacggtgcattgcatgcacaacgcctccgtttcttgatttctttctttctctcctgtgtcctgtgatttttttgttgtttattcttttcgtgcaattagtggagagactggcaggtgtgtggtgtgaatgatcgaaatggttagtgtggctgctgctgctggtgctgttgctgttgctgcgttttttcttctcgggtgttgggtttgtcgtggacggcgatcattagcggcacagtggatgagagagctgagctctagctgcaggtcgcttggtctcgctgcgctgtcatgtgatcactactgcgcatgggggccacggttaccgctatagctgctgcaactgcgtgcgagaacgagctcgtgctgagctatacaagctttgctgctacttctgcttgcttttgtgctatggtggtgttggccgaatcagatcagagtttgtgctaccactttacattcgagattccgcttttgcccccgtggtgtacttgcaatatactccgttcataattaaactaattaacattgaattgaattgtacataacctaatataataaattaaatctgatcatgcatatccaaatttattgtattagattgtgtcacattcaatcttaggttgatttattatgagagtacaaaaatatactccctccgtcctatttttaagtgtaattatgagattttgtgtctaacattagaccgtctgtcttatataaaaaatatgattttttttttaaaaaaagtcacgcataaagtatgttttatctataataaaaataaaagtattaatcaaaaaaaaattaaataagatagatggttaaacttcgttggacaaagaaacacactactgcttttttttttttgacaaaaggagtactagtacagtactacgttcgtgtggtgtaataattgttgagcacaagatagcatgagatcgagcacagcggagtacgtactcatgcaaatcacctgatacgacgacgcccgtccatgtccatcgagtacatggaattgacgtgcattgtaccgatccatgcatgcactggctacactcttctgtcaattaattaatggtatcactagtacggtactctagctagcacaatgttgtgatttgcagatggtaatctgagcaaatgacaattaattgtagggacgtgtgtctctctgcattgccgggtaagccaagtacgctgctcccatttcaagtccggattaatgcaacgcacgcatgcacgcacgcacgcacgcggccaagtgatcaagaccgcgattaccccacagtcccacacgtatctacgctcgccgacacacgcgctaaaccctcactcacctcacctgcttttgctcgcgtgcatgcatgtgtctcgtctcacagcattgaactcctggtcactgcaaacttaactgtggtttaagaaaaaaaaaagtgataagttccatcccttgagggatacaaccttactgtttactatatgttatctaaatagttattaaaaaattaaaaaataataatatagattaatacaaaatatatcacatgcaaaaccaaatttaatttctataagctgcaataaaaagaacaaactaaactgaaaatagttaccgtacattcacgtctacattggttatttttttttacaatttataggagttgaattttaatttgcatatttgtaaagtgatacatttcatattaatctatcttgctaaattttttaattttttttaactatttatatgatatgcacaaaatggaaggatacttcctcgagcggataagttgttctccacatgcataggtcggcggccggatcgaacagccgagctgagcagcagcgaacacacaaccacctctctagtatagctagccctgcatgcacgacacatatattactactagctcgttagtttagagacgatatcgtagacagattaatcatgtggtagtacgtagtacgtgctgattctccaggttaacaaccagctagctctcgtagatgctttgcttacgttacagacagtagtacgtagctcctcgatccctagctagcctgcatgattcctcacgatttgtttcttcttgtgaaaagaatttaattacttatacgaagtacgtagcttgtgttccaccgagaaattaacgcgagaaggaactagtaggggagagattctcttctctggtcgattccactagctactctgctgtgctgcctgtgtggtgggtagcgtagctttgccaaaagctcgcgatcgatggatcatcgcatgggacgcgcgcggtcaaaaaaggctcaaaacgcacacacgattctgcgattctgcgcgggcggcgtggtggtgaggagaaggccgtcgcgcgaggtaggcggccggcgaatcgcggggttggtgcgacggctgcgctttgctgggggatcaaccggcaccgccctgtgctgtactacctgggctattatgctaatctattctagcgagagagggaaggtagagactagagagagagagagagtgggtgtgggtggaccgctgtcttgtcgctttgctcccatcatctcacctcacctcacctcaccgtccccaaaggcagcgcagataggggcatttcggtcttttcattttgggcataaaaacaacctctaattttccattgtcttgcctggttattcaacggcgagaaaccaagttagggagaactgtaaaagaaagtctcagttataaaaagagttaacttctgataataaatctgaccaatatttatcttaattagattcattgttaaaaattagttttttgggacgtaaggtgtacttgtactccttggagatagatttgttttctttctcacatgatgttccctgtttcatgtatgttgtgtaaaaagttaaatttttcaaagaattgaataatacagatcaaaagatagcacatgatatgccactacacaaacatataaattaaaattcaacctataaatttagaaaaagaacccataaactatttattatatattcgtagtcaaatttattaatatttttgcttagcttgtattagttgaatctaatcttataaatatgtttgtgaagtggtatattatatgttgatttatcttattaattttttaactttttaagatgatatattacgacaacacaagttatggtaatctacatcgttcatcaacgctaagcaagcaaacagatcaggttaagatatcaggggtaaagtaaggtgctctcaataaaacatatacatctcagcaatagactagattaataataaaccatctcaatagtatgtctatatgggtatttatacctctttaatccattgcctcgtttttctctatagactatctccaggttagtagatagttttgctttctctcttcatttaatcttttccatataggaaaatatgctgacatggatcttttatatatagtctataagagcacccgcaatgttaaagtaaggtactatttataaaacatatacatctcagcaatagattagattaatagtataccacctcaatagtatatctacacatgagtatctatagctttctaatctattgcctcgtttttctctatagactatctctaggttagtagatagctttgctctctctctcttcatttaatctctttcaagtaagaaaatatgctgatatggatctcttatagagagcctatagataaccattgtgggtgccctaaataactattacggttgacctcatatactgagatggcggcacagcgtataggatagtactcgtacgtttggtggcgatcaggctttaattgattttggtggcgatggcgatgattttggtgtgggagagtgagaggagaggagagtggacaggacactggacactggacacaggcggtggtggtgaggttggcttggagtgctagtactacacgtactactactactactgggagtatatggattcctctccccgctttgtggtgtcagaaaaggccctgacaatctcccctagctgtcatccccgctcagagccgtagtcaaacccccttgaccggacagagtagataccatgccactcaactcactcatatccccgaaatgcccctcccttccaatcacaaaggtatacgtaaccctagttaaggacctgtttcgagaagtttaaaattatgagaaacagaaattaaatggtactctcctcgtttcacaatgtaaattaatttactatttctcacattcatatcgatattaatgaaactaaacatatatatttatctagattcattaacatcaatattaatatagaaaatggtataataacttacgttatgaaatggaggaaatagttagctttaaagaatttaaaaatatttaggtttctcggattctaactcctactttattttctggttctataactatatatatttttagaatctgaattataaactgaagcttcccgaatagggccgagtttagttttaaactttttattcaaactttcaacttttccatcacatcaaaattttcctacacataaacttttaactttttcgtcatatcgttccaatttcaaccaaactttcaattttagcgtgaactaaacacaccctagcatcacgtttagttccaaaatttttcttcaaacttccaacttttccatcacatcaaggtcctgttcactttggtaaagttgccaaaattttggtaatttgctaaaattttagcagaatttcttatatagttaccaaaatttgatagcaaactaaatgtagcaacttttttggtaactttactaaaatttggtaagattgtaaatggcatcaaagtgaacaggtcccaaaacttttctacacacaaacttctaatttttctattacatcgttccaatttcaaccaaatttttagttttgatgtgaattaaacacagtataggtcttaaagctaattccacatgtctctagctagaagtagccactactagtacgagttcaactttgctcctttcaattcacctcaccgatcatatcgatcacccttataattcaccgcccatgcaatgcatagccgcctacgagtagtttttttgacgttacgcttcgttgtcatcttgctgctacagtacagacagggcagtgtgctactaccccctaatctctattgtactacacaatgcattatgcatgtctctaattaagctcaaaaaatcgtaaaatttgtacttctactccttggactacaaatttctcaagagaaaatggtgtggcaacgctggagcaggggggcctacaggtgcgtacttgcaaagagcaaaagcattggagcattggatgctagtagctccactgaaatgggctctagagagagagagagccgcgctctgtaaaaaggcatgcagatgcagtgcgtgggcaggggatccggagctgagcgagctagcggtgcatgcaagctgtaaaaaaaaaaaaggcacagcctgcacgattctccacgcacacacgcacgcacgcacgcacgcacgcacaaggacccccgttcccgttccgtccaacaagtacggtgtacttatatttgccagaaaagagctttgtatgactcagaataaaaaccttaattcgtaagggaatgtttggtggtattttgcctgaattatgtgccacatatacagccccatcgttgggcttatatctggaataagccaaacaacatatttataaacgaaaaataatttataaataaaacttttatatatgtgtccttagtgatctaaaagcacagactgaaaaataaacttctataaaaaaactcaaaatcagctttaaatttaagattaaaaattcaaattttagctgataagtataagcgtaagcgaaaagatgagcccggtagaatggaatgatacatactgtttaactattcattaagaggaagtggaacacgtaccagcactagttgcaaaactgaactttcttcgagaaaaaaaatgtattggattattttcagttgaacacagtatgctctaattaagctagtactgaatttggctaactcaagtacgtatagcagtttttcaagctactaaacaaccccttaatgagccaattgtgagtcagctttaattgattttttttaaaaaagctagtacttcctgaaaaagaatatgaggtgcagctacaaacaacacactgtgaatgcatggttcgacggccagatcgacgagaaacgccgtacctatatagttaagacaacaataagctcatggatggacgtcagaggacgtggtgccattggaggagcgtaggccgggcccctacttacaacaatctgcctatacattcaggacataaattgagcttgtggccatttatttcaggcttttgggttggagccttgcacaaatagttgcattattatattggaggaaaagaaataaaacgaaagcatgaactgctggttatatccgagaaattagtacacacacagtgggttactgatgatcaggtgatttgtaaactagttgaagtgagctgcagaggcaagccgaactgataagtgatatacagtgttcttgcatctaaaaatattagtattttgtattattagtataagactttgactgataaattgctctacttatatactattcatgtgatgaaaagcataatcataaaaagtacttctgaatataaaactattaacaccaatttgatgtcgaaaaattatatgctaatggagtaattatcggtctaaatcatgtcttaacgtaacaaaatatgtcttaattttttgaacaaaaggagcccttaatcttgtgttattagtcgagagatcctggattgattgaccagaatatatagggtcctctagtacgacagtagcatagctagctagtcatacaagaatagaattacgatgctatcttaaacgaccacacacaggagtaattgaaatggagtttactggcagcgagacggtggtactggtacgtcgacggatgcgccggagatggcagcttgtataaatgcaatcccggcccatgggcaggggccaaaccgccaccaatcacccctcctctcctatccgggagggacacgggggccagtgaaaacgaagaagccaagccaaagccaacccacagctgcaataataacgcgtagccacagccactgccgatgccgctgctgcgagagggtgacaccggccaatgcaacagcggcagcagcagcagaagaggcaggcaaatcataaggcttgcccccacgcagctgcgtgccagtcaaacggagccagtcaaaactccaccgttctcttcccccacactgtgtttcagccccacacaaacccatccatccagcaccgtacgtgtacttgtccagcaagggtagcggcggtgacagtatatgacattattgtaccatggggagagagataattggctgtgtttagtacacgctgaagtttgaaagtttggttaaaattggtacgatgtgatagaaaagttgtgtgtgtatgaaagatttgatgtgatggaaagttgaaaggttagaaaaaaaaaaacttggttaaaagtttggaaaaaaaactttgaaactaaacagggtagtaatatataggttaggccactgggatgcatcatgggttaaaaaccttgaatgctgcgctggaacgagaattccgtggtagtactgaactttaattttagtcggtagattgtctgtgagagcatggaacatattgtgaattatggatgatagaaaaaactgaattttgtaaccattataggagaaaacaatcaaacgagttaagtattagtagaaagttaataacttggtttagaaaggaataacttatgacaagaaaattttatggacaaattagcatgagatctaacgtcatggaaaatctctgcaatttttcttgcaatctatccaaactgtcgttcgtgtaaaaacataaaattgcttgaaaatccatgttttacatttctatttttcttttaaaattttacatttttcatattaatgtgttttctcattcttgcatttttcttgtgttttatatatatggtcatttctcaaatgtttgaaaatcctcttttatatctgtcctaaatcgtgcgctaccttttactacattttcttaatcctacattaaaaaggtggtcttataattaaggaaattcatgaaaactgaactggttcctattaaattatttttttaaaaaaattactttgataaaaagagctgtagcattcttaccttttgcgtccaactacagtctacagtcagtcccggagacatttaaccgacatccgatatataatgatggttcacgtccagacaaagtcaacagtcaacatggcatgcaaagcaactgttcacgctcctcgatcagacaagataaaactgtgcccgtacggacatggctggtatggcagtagctctgatcaccaagagtactccctcggcacaattaactggagcctgcctgaacgaaacagaactcaagagtaccaaccaaaaccatcacacccttgtcttttcccaaaaagtaagatgcaggtaagcgcaaggattaccacgggcaccatggttattagtggactttctcttccagcatttgacaaagatccaaaggtaagaagaacaagattttatcagcatctgttcaggtataataatattatatgcattaaaagagaactggagtaaacctactcaagagttctataaacatactaggaaccactacaaaaggaatatgggcatttccacaccaaagaaaccagattcgtcatttggctccaagcaccaggagggaaaaagaaaaataagagaagcaattatgaaccctcacagaaaatcactcgataatcttgacttggagccaataaagaaataacatgagttgataaaataggcttttagtcccacaaaaggttgatcatcgagttggccaacccggcttctttgaaagttttatcactctcgtactccaggtttgtggatgccctaggaatgggctgtacgaaatggaaagccttcttatccccgtcctccacttgaggatagcagaatgaccacaggagctgcggcgagatggataaagcatcagcgaacaatgtaggagaagagacaaaactatggaaatttatttcagtgttctaaccttaataggatccgtgtgaaggaaattcctctggatcctcctaccatcaggtaggcgaattgcaactctgcacaaaagctcccgacttcctttgggttcttcagggagaggaggatagttcagcttagcactcaggctaggctcattttctacctcaggttcaatcttttcctcactagtgtcagagcctttactctcctcaagagaagccgctactgcccgtgctagttcttcgtcttcatcctctgtggctactacgggtacaggggttttacctacaaagaaatggaactgtgaacatgtgcttttggtcaaccttgaaatgcattgcacgtaaccagatcctaacataataataaaaaaaaacacacacacacacacacaatcaatgctgcgaaattaatccatcaaaatatccccttaagtagtggcatccatatgaccataccggtaatattgaaaattacaaattttctttgtgcatgtcatgccatgcatggagagcttacgctaacttttgttatgcctacccctcttgcaaataaatctgggtagttgcttatcacaagtcaaatttgaaataaccttaacttacaatcgacacacaaagaccatcgttgtcagagggtggcaaaaccagttgtgacttttgcctaaagataactgtgattagacatgatttaaattctaattcctaactacacaacaaataaattgttgttgacatatagactactgaaatattttttttccttgcgtctggtctatgttatgcattatcattgttcaagatgagtgttaatggaaagtgatatgtcagcgatgattcatatccaagtttgaaacatggctaagacaagtactgccagaaaccatacatttccaatgattttcctattataaaaaatgtccattgagtctcgtgtccatactatccaattattgtgttatctgggccattaagaatccttaatatctagaagtacctgccaaaaacaagttgaaataaaccactaaaacttattgccagctatcaccaacaggataaaatctggtgacagatgatgtatgaggatagaatgactcgtaaggccaatcctccgactcccataaaggtcagtgattatgccaggcacatccaccagataatcatcgttatatcataattcataacaagagtaaatttcacaaaactacaggtattttgaccaaattatcacaactacagatttaaggagttgtatcacaaaactacatatttagcaccaaatttatcacaaaactacagattttagattaagtatcataaaaatgcatatttaatattgaacttatcacaaaactacaacttttggagtttaaatccctagcaccattgttatggtggagctataaacatcattactttgtgatttaattgattctaaacctatagttttgtgataatttagttactaaatatgtagttttgtgacacttcatcttaaatgtgtagttttgtgataaatttggtgttaaatatgtagttttgtgatacaccgagttaaatctgtagtttggtgataatttggtcatagtatctgtagttttgtgaaatttactctcataacaattacaagcaacctcccaatgaccaactgctcctggaaatcacgcttatgtagtgtaagaacgacctaactgtagttggatgatacaaatgaacaccgctcccccttatccaattttgtaaagcatcaaatgctagtacagctagcctacccccaacttgattgggaacaaaggctgatgctgttatactaagtactagaaaacaaaacacaatgcacctagaggcaccctcacatgacaatcatccctgctactttttcaagaattggacatccactcacaaggtttgaaagttttgattgtatggaagccccatatctttaacagatgaagtttcgattgtcacgaacttagcattaactatgcatctattccacaaaaaagttatttcaccgtgttaaaagataaatccatataatgtgaagaaagattgcaacgaaaaaagataggctcaacatatggttatttatgtactaatgtgcttggttcatataatagttctgcagaaacaaactattcgagcttaaatgtttcaaagggaaaaaaaaacatcactgctagttaacatatctttggacacaagccataccttgtttgccgatagaagtttcctgatcaacttttcttggccgtttttgaggttgagctgcatggtgctcctttggacctttgtccaggtaaggcatcaaatcctgtggacagttcacatgcagacagtaacaaggaataccatgtcaaatcacagttaagattccagtattagaatgtggaagtaagaatgttatcactacagaagttagtaacatgagagatgaaagatagtaggtcgatagggttaccaaattacctccagcaaacggtccgggtgaatcattccattccacccacgcattttttgcccagtgatagggtcaatcagaagaatggcaggaacagagaccaaattgtagtaggtgcataccttcctcccctcactggtgtcatggtaaacctatatttaagatgatagaacatatcagtagacaactagagatgctaaaaatttgatccatcttggggtttgggaaaaaaagtgaacattagaaactctttctttccaatactattcctaatacatcaggaataaaaattggagatacagttatgtggctcaggtatagaaggcgaaacaaaggagtaaggaccaacctgccagaaaataaagttcgatcgaattgtctgagccacagcctcattagcccaagtgtcccgattaagcttcatgaaagaaacactcaagagtaaaaactttgccaatgcaggaaaaagaatgaagggttaacacaaggctgcatgacattaatggtaagatctgtaccatgtgagagctgaactcttcagtcgattgcaaattgatcaagagccacttgtccagaacagaagcctctaactttgcctacatttatgaaattcattgtttttagaaatctgaattaaattggtaggttatagaaaattaaaggataatcaaattagtattatgaagttcatcagctccaggctttcacatgaaaattagtagcagtttactagttctcgtgcactggtcattagacaacaaatgaatttgcaacaactaataaaaacatcaatgtactttcaatgataaatagtgtgaacaaagaacattaagaagcatgtttgaccatgcctcttgttgacaaaagggaggcaatgtttgcttgagtaataaactgaaccttagcagctaataaaccgaactaattatttgacaggtaggattgttagcagctgagataaatgaagagttcgtgggttacatggcgtgctgctccatgataacaattcagtatgtcactaatagaatattgcaattttcccaatgcataccaaatgcccacagacaaagcaggttattgaagtttgcaggcaaaggcagcacatggtcatgttagagataaaaaggtaacaccagacgttaaataagaaaaaaaggatagctgaccttgtcgaagggtccattgaacatcaaagcaaatggtggacgatacaatgccgccagattatcacgagaactagatgcagcattctgctcagaatcccaaacagcagattgccttgactcctcttcaaagttacgaaatgcaactgttgaattaggccgaacgctgaaaagaagtcataaaaccgtttcaaatttagaaaatgatagattttaaattagtagtccacgttccaggaaaatcatgcaaaaagtttggttctattagtgctatacttctctttggttactgtggctcaacttgagtttcatctctagcctattctaattttctttagagtaaaaggctgttgttttagaattttggttttagcaaagcaagacatagaagcctaacaaagcatgtcggcccaaaagaaaagagtacaacaaaatttgggccttattcatctccaaaagaaagagtagaacaaaaattgcatcacttcccacactttaggtcattaggtgtggctcagcgctattccttccagatttaacaaaagtggactataacaaagaaccatagtaataatgtcatatgtattcaagagatgttgcatctaccaaagaaatggctaaacatcagcaaaatcaaccccaattataataaatacttggcacagcgcatttaagtatatatatctaagtatacccccttaatttgcagtgccattggggcagtcccagatatgccatcggtatcatagagaataagggataaaataagagctgtgactgatatgttaatggtcattgtgttgtcctaatgggtagaaggataacaccccgaataaaaacattcctaactttatctttttcaggaggcaacaatctctcctgttttgaaaataattggcagcaaatgaaatgactagatgtttcttctgatcagtaaattctggttgagttcgagctagtgattgtcatcatatctgttggtgacaagtaaagatatctaacttgtagccatgaacgaaatttgttggtgaccaaccaaataccaataatctcattggttgcaaactatatgaaagagatgttagtccacttggcaggggaagagagggcaggaggcttgactgcaaattagtggtactagaaaatggtgctagctattaacatagccaaaggtgcaatttaggccaaaaggtttatatcccatcagcaagccaacaatgattaccaacaacacatgctaattccattggacgagaacaaaattactataggttagtgacatctattcatcaccaaccaaacacacacatgccttttatgaggacttaagcttcgatttgaagccatcaaaaacttaaagctcccctaaacagcatggccttaacattgtcggataagagtttttttagacaatcacatgccccatgtaacctatcccaatttctctttgaaccaaaccaatgattctaggcattactagtaccgattttgtgccaccgatacaccctatttggctatttacatgtatcagtacatcacataaaccacaatcaccacaggggcagcacagatattgcattgaactagaagttgtctcacacaaagtcttaacacttatactgaggaactcaatcccaggaacccaactatcataaagagtttgctaaccaagcactagacttacacgaccatgggggcatcgccgtagagagtctcccgctttgtgggcagcggtgcccgcacatcctcttcctccccaagtccctgcagcattccatcacccagtgcagcagctgggggcggagcgaacctgcccatcacagcacacggtaagcgtacacaaaccaacagaaaactcaaggacccaaaaaccaaagcccaaacccgagaaatctcgcgccgatccacctatgacctacctcatcgcgtcctccacctcagcagctgctgccaccgccgccgccgccgcttccgccgcagcagccggcgatggggccggatgcgccgcaagggcggcctcgccgtcgatgtagaacagctgcaacgcctcctccagatgccagctcgtcatctgggagagacgggatcgcatcaaacccttcgaatcgatcagaagctagactctagaggggggaggaacgagacgacggacctggaggaactgggtggccgtctcgggcgtctggccggcggcgatctcgaggaaggaggtgacgagggactccttctccgcctccgtcgggggagcgccggccatggcggcgaagtcggggatgggaccctctcgcgcgcggcggttagtagggtttggtgggacggcgaggagtgttggtgaggtgggggagaggggaagtggaaacgtgcggggtgagtaagacgagacgagtgcgaatgtgcgatgcgatgcgatggggaagtataggattggagatggtataagtgttggggggagtacggcttggaagggaagaaagggcccatcccgagcccagaaatgctcatgccgtgggcctcgtgattcgatcagttcgtggaccatgccacgtagtatatgggcctaggaagtataaaatgggtcgtttgtccagttggtcagattccagtaaacagtacaactgaggtccctcagcgaattacaaaattgtcaacttacagaaccgaattattcttggtctttaggtgatattgaccctggttttgttcaacaaagcagctgagtcagcacaggacccacgtaggctccgcatgtcatggtgaccaagtcattaccctgtcctcttctcctcgtctgagcaggccggcagatcgaggaggagggggaggagaccagcggggtgaggtaggaaagaagttgagccggagcatggcggtggacatgaatgcaaggtgggcgtcgttagagaaagtggcagaccagccgccgcagccactcttgtccacaggcggcttcacgatggagaggactaggaggatggctgcggaggtgagaagcgggagcagcagaagggagtaggcgacgtcgatgacgacttctatttctctcgtgcccttctcactgctgcaatgtcaagataatagacgtactattagccagatcgacgtagtagtattgtcttgccacgctaacccaaataacgttgttaaaatgtttagatcttatatataaataaattttttttttttttttttttaaaggggagaaaaaaaaatttgaaagaacccaccaaaaaaaaaaggggggggggttgtttaaaaaaaaaaaaaaaagggggaacttaaaaacccatacaananaatttgcaatctccggtgttgagcacgcgtgcagcgcatgggacacggtggcgctggcttaagcggtttccggcgagagagaagacgaggatttttttttgttttttcgcggcaaatggaccacggacacagtgaaaagcccggcccagttaagtatactagtttcaggcccacgaacgcatcgcacaagcagcagtgcggccatggcggctcctcctcctcctcccatccgaagcaagcagagcgagatctggaaggcggccatggcgcgcctcgcgctcctcgccgtccccgtcgcgctcctcctctccctctccttcctcctcctgcgccccgcctccccgccgctccccttctcgcggcagcaagcggcgtccggccccgaccgccgccgcctcctcagggtctacgttgcggagctcccccgcgcgctcaaccacggcctcctcgacctctactggtcgctccccgccgccgactcccgcatcccggcctcctccgaccccgaccacccgccgccgcggcctccgcgcgcgcactcgccgtacccggatagcccactgattaagcagtacagcgccgagtactggctcctcgcctccctccagccgggctcgtcgtccgcgcccgccgtcagggtggtcgcggactggagggacgcggatgtggtgttcgtccccttcttcgcgacgctgtccgcggagatggagctcgggtggggcgccaagggcgcgttccgcaggaaggaggggaacgaggactaccgccgccagcgggaggtcgtcgaccgcgtcaccgcccacccagcgtggcggcgctccggtggccgtgaccacgtcttcgtcttgacaggtactgtgattcagttggaaattggaaatgtgctttttattttttcctgagtgaacttaagtgatcaaaatggcataatggaacgggctgttgatcatattaaccctccattgctcccaattggtgtgggttatatgttaagcattcgataggttaagttatgcttgttgtccgtctattatatactcaatcccaactctcaactagtatatgattggaaactagttttttctcctccatactcaatcccactttctgactgatatctacagggtttagctactcaactctaaaaactgtgagctgatttaggcttgaaatcattttgtgtgttctgttagttaccggctatacatgtgatttgttgctcggcgcctcagtgtaagacttaccaagttcccttttccaaacagagggagtgtgcccagaacagtgagcacattgacatgtagatttaaccatgataggaacctcacaatgcactcataaatttgaaattagttatgtgcatacttggaataggggggtcaaggtagctggttttggtttcttaggcacgctttacatgttttcttgtgtaagggagtggcatacccttgaaatgccatcattaaagaaaaacaattttgaaccatgtgactttctgtacatttgtcatcaaggggatattggtaatcctcagtgtttcggagcaaaagacacaactgttttgcaagcaatgtaggaatacaagatatactgtttatgttttcgttgtaattgatctgcatagtagcttattattcttttgtatgctcaggttttgttaaatattgaggcattctttgacagaccctgtggcgatgtggcatgtccgtaaagagattgctcctgcaattcttttggtggttgattttggcggatggtacaaacttgattcaaactctgcaagcagcaatgtttctcatatgatacagcatacgcaagtgtcattgctcaaagatgtcattgtaccttacactcatttgctccctacaatgcacttatcagagaataaggaccgccccactcttctgtacttcaagggagccaaacacaggcatcgggttcgtaccatttatcatactaataagcatttaatgtatgcatggcaatatttatcttctttgtagtatctgaatctaagcaattggaaatgaaaatggaataaaagaacatgttagtatgatatgggctatcttaaaattttattttagaacctgttgagtctgaatccacagctctttgatattatttagagtaaagtccatcaccggtccctaaacttgtatcgttgtgtcatcccggtccctaaactcgcaaatcgaccgttcaggttctcaaacttgttcgactgtgtcatcccggtccctaaacttgtagatcactcgtataggtcctccaacttgttcagttgtgtcacctcagtccctaaacttggatttgaatatcatctgggtcaaataggacggtttaaagactttatatttaaaaataattcataactttttcatgtgaactctaatgaagacaaactttatatcaaacttgtagccctcgacgcgatctacaactttgtagttgatatttttttttattttaagtcattttttgtcccagaatgtaattttaattttaaaattacaaaatctataaacatgcaacaatattttgggaccctaaacagttttaattcaaaaaattttcaactacaaagttgtaggtcgcgtcgagcgctacaattttgatataaagtttgtctttattagagttcacatgaaaaagttatgaattattttttgatataaagtttttagaccgtcctgtttagagaccggcgtgacacaactgaacaagttggaggacctaaacgagtgatctgcaagtttagggaccgggatgatacagtcgaacaagtttaaggacctgaacggtcgatttgcgagtttagggaccgggatgacacagcggtacaagtttagggactggtgatggactttactctattatttatgtatctacaaggaaactattgccatttgaagcattatgctctcaacagaacttttatttacaaaccagctttgtttatgacttatgagattgttgttctgtactactgtgcatctctatacagctttatcttactataacttctgaaattttctttcagggtggtttggtacgggagaaactatgggacttgatggttaatgagcctgatgttgtcatggaagaaggttatcctaatgccacaggacgtgaacaatcaataaaagggatgcggacatcagagttttgcttgcacccagctggtgacaccccaacttcatgtcgtctctttgatgctgttgctagtctgtgcatacctgtcattgtcagcgatgagattgagctgccctttgaagggatgatagattacacagaattcgccatttttgtctcagtcaataattctatgagaccaaaatggctcacaaactacttaagaaatgtccccaggcagcagaaagatgaattccgaagaaacatggctcacgtccagcctatatttgagtatgatagtatttacccaggtaggatggcctctgctgcacaagatggtgctgtgaaccacatctggaaaaagattcaccagaagttgccgatgattcaagaagcggttacccgagagaagcgaaaacctgatggaacatcgatccctcttcggtgccattgtacatgactcgcgagacatgattgttagtattagcaatcaatcccccatgggaggagttagttagcattccctgccaatttatggattgtttgtagtgcaaatatgagagaaatttcaacagtaggtttatgctcttgttgtcaattgtatttcgtctggagtgattccccgcattgctccatgtgtgaggtttgttggttcactgccatgagaattcatatatgaatctgcccattcggcagacaattttccatattactcagagagaagcttgagacagtacgtagtcccttatatttgttgcttctaaatgatttggctagcgttcacccaaaatgcatgcatgatcatgagcaaaataccttttgattcaacagaaagagatccaatctatgatgtttggcagtaccaaattcaggacatgaaaagcaaaagggagaaattttatagtctcaacaacatgaactgtagccaaataacagataggctgccaacatggtggccaaaggaacggagatattgtcatccacaacatcattgacaggaatacactccactacagtagctgctaatgcaacaagagccagtttaccaagtgccagatcccagcagacagtgaagtaaccaaggcaagagaagtagaacagcatcctgtgatgcaaaagatccatgagttaacaataacaaggagtaacaatgcaaaagaaccagcaatgcattctgaagcaaaaacctacagtgcagatagaaggaagccagaaatgaacattgagatgcttcctatccagctcttgttctcattgaatggcagcttcgcggagccataccttctcccaacaatgtcagcaaagcctgaaaaaataagaaccaagaaggtggatatacttagcagaagcattcatttcatcaagtgaactggggtattacaaaaaaaaactgcagattttcctaaattcccaggagatccaacatcttaccatcaccaccactcatcatcgacaacgaaacaatcccaataggagactggcgccagaagaccaaaacactgaccagcagcacaatgacatagtacagaggacctctcagcaattccctgtaagcaaccaaagatcatgtcaaggaatactattttgatttttgaatgaaggagtatcagaaataaggatcatagcacgaactctggttttccttcacgggtcaccgattttactagagcttcatcagtggaaaggcggagcccgtaggtcagaagccttatgcagttcagcaacgggacaattgccgcgaagaaccgtgcttctgtcgaattactgcgaaaggggcatgattttcttaagatctctagtctgatttggttgtagaaaacatttcgatgctggaagaagcagtggcaagggagacctgaatagtggccaggaagacatgaacaggactccggagagcacatgcacaatttttctgctcaggttctgagattaattatgaaaagaatcagaagttaacaagatataattaagaaaggtataaattttatgcttgaataatctattttcctttgattgatcaataaagaaagacttctcttttatctatcctaactactgtattttttgaacagtagcagtccatctgaaccagtcagatcttcccagcaattgaaaataaattcaagatacagatcacatccactgaattgtatataccatattttactctccggataacagtcaacagagctaaagaattgatattttttgaagaatggcggagatcaaagcttcagctccacctcaaaaaaaaaagaaatacaaaaaaaaaggaaaaacgagatccgacacctgttcgatgagccgccgcgccgtgagcccgtcgaaggcgcgcaccagggagtacgcgcccgcggtgatgagcagcgtggcggcgcagtcccgcagcgccgcgggcgtcgccgaggccgcgagcgccgccacggccggggcggcggcggcgcccacgccgagcacaagccttcgccgcatggagctcgccgccgccgccgcaggagacgcgagcctggacttggagcgcgacagcagcaaggaggaggaggcggcgaccgaggaggagcacgggaagtggcggacgacgtcgacgggccgcgccgccgcggccattcggtagacggactgcagtgaagcgaaatcgctggtaggccaccgcgaatttttgtcggggcgcgcgcgggtttctcgttgagacggggcacttttgtagttttgtggaagcgattcgtcccacctatccacggtactgtgtactactgtatctttttccgaaaataggagggctcgtccaaccctcctagagtgtacgtaatatctttgttggaaataggattctcctgatatttatattttggaaactcatgctagcaggggtgtgtttagttcctgaaaaaaaataaaagttcaaagaaagttgagagtttagaaaaaaagtttgaagtttatatgtgtagaaaagtttttttttgatgtgatatgatgtgatggaaaattgggaataggaaggaaactaaacatggcagttttattccacaccatgaaacagagtaccaatgcaattagttgcgctgaaactatcgttcaaagcacaagcataacatgcactggatgatctctcgcgctttgctgcagaatatatacgttagatattgaagaaacgatgaaatgatttgaactgaaatattatgaaaatgattgaaggatgatggtttagcatgtatatatttagttttataatgaaataattgtaaatataattactatatgtttatatgttataagttttgcgtgtttaatgagtagaatctatatatatatatatatatatatatatatatatatatatatatatatatatatatatatatatatatatagatttattatatgaatgtggggaatgctagaaagtcttataaattgaaacagaggtagtatattttgatgttaagttttaggtgtttaataggtattagttttatagaaagaaggattattgggatgagccaaatacgagatggttctcctgatatttcaggacagggttctccatatggaggaagctgttcctgtcaactcagtcaaaagctacaatcccatttgtcagctgtaacgtttattaataatttagttcccaatttttttctctaaaaatattacatcgaatctttggacacatgcatcgggcgttaaatatagattaaaaaactaattgcacagtttacatggaaatcgtgagacgaatcttttgagcctaattagtccatgattagtcataaatgctacagtaaccaacatgtgctaatgacggattaattagacttaataaattcgtctcgcggtttccaagcgagttatgaaattagttttttcattcgtatccgaaaacccctttcaacgtcgatcaaacgttcgatgtgataccaatttttttttcgtaaactaaacacaccctaaaaaacaaacgatagagctgtaacaacacgtgatgctgtacttgggagaactcatatccaaagatagataataacttcagtaatagtaacagtaactgtttaggactttatacatcttgcgaaaaaaaaagagcgataataataaaggactcggtaacagtaacaaagataaggcttctatactagatcttccctattcaaaactacaaaagagattgaatcaggttgttccggaacacttcgtgccatcgccgccggagtcctgatattgtacgggctgttcttgctctgtcaaggaaaaaacatggcaacgtgtgagcacataacacacacagacataacacgtattagcggccaatgtaacttttacatatgttcttaacaacttaaaaaaaagtcaatgatgaaaaagaaattacttataaaaacgctaaaatcaactctaaaaattaaaagtaaacataaaatttaaatttaaaaccttggagcaagtgcgagccttggcgttgcagacgggatactccttggggcagcaggtggagtgatccttgcagcaggtggcgccctcgacggggcagcatccccacacgatgcagtggttcctgatcccgtagttgcagcagcaggtggtccccgccgggcacttgctgtaccggtcgcattgctgcggcggcgatggcgccggagacggcggcgacggcttcgggttgggccccttcttgatcgggtaggacgccatcatggcgatgccgcacttgccggtgcgcgcggtgacgttgcgctccatgcggatgtagccgttctcgccccagtcgggcccccacgagttgcgcaccgtccagtaggcggcgccggtggcggcgtccgtgccgtaccccaccgccaccacgccgtggtccaggttggtgccgcaccggccggtgaacacgccggagtcgtagagctggaactcgcggccgccggcgtcgatggcgacgctgacgggctggtgcgccacggccttctggagcgacagctcgtcgttctcgggcacgtcctcgaagccgtcgatggacaccaccttgcggctcctcttggcgaggttgcacttgccgtccatggccgtgtacgggtagtcctcctccgtgtcgaggccgccgttccgggcgatgaaggcgaacgcgtcgtccatgatcccaccgttgcagccgctgttctgcccgttcctcgcgcactccaccagctcctgctccgacagcgacaccagctcgccggtgacgatcttgttgatgccctccacggcggcgaccgccgagaacgcccagcagctaccgcactggccctggttcttgacgggggcgacgacggcgcccttgtccctccagtccacggagtccggcagcgcctcgacgccgtcgtggcggtacgcctccccgacgcggcgccccctgccggcgggcgtggtgccgaggtaggtggcgcggaactcgccgttggtgaggtcggcgaagcggttcatcccgaggcggaacccgccgcgctcgtcggcgcgggcgttgtgggcgtcgacgaacttgaggttgtcccagaacacgcggaaccggcgctcgtgctcgccgatgaacccgttgcgcgagccgccgccgccgccgcgccggtgccgcgccaaccacaggtcgtacgcggcgcgcgcctcggcctccgtccgctccagcccccgcaccccgtgctccgcgttgtacctgatgatcgacatgatgtccggcggcgccgccgccgccgggggagcgaaggcggcgaggatgaggaggaagcaggccatggccagcgccgccgctacggacttgccgccaccgcctgccatggttgtcgtcgacgtcacgtcacgccgcggcgcctcgagatcgtcgaaacgaaatcacgtagaagtatgtgtggatacgaaatcgtgcggtgtttggttggcttgtgctatgttctggagaggcttggcggtcgatgaatttatacaggttggtggcgtacggttcgtgaccgaattttacttggtcgctgacgacgtgtcggtctcgtattggatctgtatcgtgtagagtgtactcgtttctactcctaaatctgacgtgtcacgttcaggttcggtattcgattctaaataggatgacgtgtcacgttcacacacgggccgtagcagattggggattgaggtgttacggcccggcccatttggcccacgaaatatcacctgacgacttctcttctcttctcctcttccttttcccatccgatttcttctccgggcttctggtagagtacgatttgatactatctgcgattccgcctcccctccccctcgccgccgccgccgccgcggggaaatctaggcgagactccactactaccgcacgtgtcgtaatggctcggaacaagaagaaggtagccgtggcggcgcccaaagcccggaagccgaagcgtgatgcagtaataccccgcgcctcagtcagctggagattggatcgtttttggtggaaggggaattgagctttagctaatatattttctcgtttttttttccttttggtgattgatttgttaggaggagaagaagttcgcgaagaaggccgacatgacggagttccgggcgcagctggactcgctggggttgaagattatcgaagttagtgcggatggcaactgcttctttaggtcttcttttcgattccattactcaaattcttgccactttttacaagaagaggctaatcgatgttgtacgatatgttagagtactgttagtttatgaaaggaggaatagtatatgcattatgcagtcttgtgttatatggttactcatcgtagtctgcagggcaatgggcgaccagctcgaaggcaacgaggaagagcacatgaagtaccgtgcaatgattgtgcaatacattaaggtatgcatcagatgagatgaccaaaacaaacatcttgtaacactgtgacttaataactgtagttagggtgccattgaatcaataaggtattagaaatactgcaagctttggctatgaccaagaaacatcttgtaacactgtgacttaagaactgtaattagggtgccattgaatcaataaggtattgcacatgctgcaaactttggctgtgtacatctgatctgggcgtagagtacaggctgccaggctgggttgttcttttatctaaaagacatgctgcaagcaagcattggcctatttacacttcataatctttcttgtatgcatcttacaggagcaccgtgtggattttgagccattcattgaggacgaggaaccgtttgagaaatattgtgactctatgcttgaggatgggacttgggctggtcatatggagttgcaagcagcttctattctcaagagaaaaaacatatgcatccacatggtaattttcaatacaagctttgcagtatgatttcttcaacctatgaataacacgctaggcagttgagccttgcctagtctgtattttgaaacacatgggtgatatagatcaatgtgctgcttatatatcccctgatggttctctgttatttttcgtactcattttcatattatagcctttcttctatagaagagaacgtactgtaacatttgattgatgcctgtaccattactgaatgatttgcagcttaactcaccacgatggtacataagaaacttttctgatcgtgaagctaccagtatgattcatttgtaagttaatgtgtgttctgctgttttaaactaatatgctaatactggcagtaaaaggacatacattctcatgttcctttgttttgattccaatatagatcgtatcatcagggtgagcactacaatagtgtcagactgagggaagatccatgtcaaggtcctgcaatgccagttattatcaaggtttctcactgtccaaattgtaaactgttggttgttttgtgtccctggaaggacagtgagatcctgttgtagctcaacttgctctgttactaatcttaattttatccgttatgaaattacaggcagatgccaatgtagctagcacaagcaataatgctcaaacaaaagcaaaggacctgaagaaatcttcagacagatcaaagtatgatcatatatcggttaaattggtgatggctggaactggatgttctaatatcgctgcagttgaacaggtatgaattatacaacaaatcgactttcttgtattgcaactgcgagcctaggctgaccgtagcagccaatcagtcattatatattaatggtcaatgccacatcacataggttttgaaagacatggatggtgacattgatgctgctatagagtacatgttagctgagcaactaatactgggttctgatgatgcggatggagatccttatctggactatgcatgtgatggtaaacatttgattattctgaagtctaaagtggctgtccctatgaatgaatctcatccttatctttcttgaggacttcagcttatgacaattaatgaaatttatggtgaaatttggagtacttctgggattccatagattgagttttcattgtttaatcctattcatattcttgccaaacatgagctgcctcacctgagcaagcgtttcatgcacacccctcaattcagtagcataaatctagtaggtaaaacctatactgggtgttgtgctcatggcattttgggtttatgcctcactaatatgatatttaccatttactggttatttttaagatcatcaaaatatgataacagtaccaagaagcatgaacggtgttatagaaagctcaagtaagactacggccttgttggagagcttctagctactgcagcttctcccagaattttcagctctctcaaacaatccagattcttagctatagaatccagaaaatgaactagatgccggttaccaactagctgtttctcagaattttaagctcccaccaaacagcccataccagttgctgtgctgggtgttttccatgttcagttcctctgcaattgccaaaggtcaatatcataccctgtaggaggtatatctgtactaagagttagtgtgctatctaaccaccctgtaggaggtaacatttttgtttggctggttattgttggagaccactattttagaagcacaagtagttcattttgtaaactgagggcattaactgtttcaattaatatccaatttctcatacctgttcaagtaatatttgttttacattggccatgcactgaactcatttcctttattgtgtatattacctggatcagcagagtatgtacagaccatagaggatgagcttagcatgaagcaggatgagagtcaactggatgaacacaagaaagaagaaaaggactgttctagcaaagcgaaacagctcagaaacacaacagttcacattctaaaaaggtaactatcatgtggacgactcttaatagtttccaaacattgaattgccttgttaaaatactatgttggaaggaataaataggaattatccctttattcttttgcacagggaaagtcaaaaaccaaggaatgctcttgtggatctgctaggaagcacaagccttcttgtaatttagccacaactgtagcatcgagagaacctccaaaaacaactgcaccatcgagagaacctccaaagtatggctttataatggttttgctaaaaatatggcgccacatttttgacttgatttcagtcatttttttcccattcggattgctaccattcttttatactcctatgtaagtatgtttcgctctactatctcctctttcaagtaggtaattaattgttttcatcctaattctcttatatagtgtgtgctgcaaaaaatatggtgtaagtattgagatttggttttaatttttttttgttttttggtggaaaatgtggtgtcttaaatatagctaatcccctttataatgtttctgtccttttgtttgtcttttaccatattctattctacaactgaacttatgtcctgctgttcgcattgtaagcattctttcaaatggaatttttggggggtgaaatcaatatttccagcgtatttgcatagtgcattgctgctgttgtatctggcctatgaaaccttaacagtattgctgcaaaatatgcacttatcccatatgccttaaagtcaccgacctgattactatttcctttttcactagggaggttagttgcattgcatgtttaacacaatgctggaagtgttatgtactaatactatctgcttaatgtgctttactatcaggaccaaaggtggccaagggaaaggccagaaggggaagaagcaaaagaagaaagaacaagatgaaacaccagccatccgggatcacgattctaaagttgcaccagatctaggagctctttgcatatgaacatggtcgacgagggtgatgttctcctcagtgtgtagccgccaggaatgtgcggggcatcagttttgaagagagatgtctgcggtctaccttgcttggacgccatgatctagatggtgatttttctcttgcccagttgacggcttcacgtcactgccttctgctgactgactgttgttaagcctgtccaagtttcaggatgggatcatgggactgacggtgaggtggtgatctcagtgggcacagaaacatgaatgagctgttgatacatagcttcttttcttcatacatactttacctgtggatcaatgccatgtaaaacaatgatcagtcgtgcaaagcatattaattttgtgagaattatatcataatagagtattccctgtcctaacaaaacaaaaatacgctctattgtttgagatggagggatagtataatgggttcatcctggagtatatatagccagtcagtcacaattgccttcatgttctcgtgaaagtatctgttttaatataatactgttttctcgtgaagtatcttatctggtaagcagcttatctacttcaccagctacaagtccatacccccatgtgattacagaaaaagaaaatccataagacgaagctacagggttgttgcttagcaatcggtgaagctctcctgggtcagtcaggaagggaaagcatcttgcaatcagaaaaatggcaaaacgtggctcgcactaactcagagtcaaatgctttccttttgggactttgtgagagctccctttgggtcactgaaaaagcaatgtgcgagttgcgagataagaaagccattcgatgatgactcggataatcaaagtttaattgacatgtcattagtcgtgctggtgatagatattaaccccgtcagttgggtttggggttgtgcgttgcgtagggcaacaagctaatccttccaattaatcatagttgcactattcaaattattattgcgtgcatgaataattggtgcacgaggacggagcctactctaggatattgtcgataccatctgaattctcgtgggaaaaaaataataggagacgataagaggaatcgactggaatctgtgggagatgggctccggtcggcgcagtgtcctacagctattggatcacccatttttggctcttggctagctagtagacaccggccactagcaatgctcacaggcaaagatagattttttttaattgacatttagtaattctctttcaaaagaaaaagtagacaaatagacaatctgtagctgcctggacatatcttcggctcttcgatgagcaaaacgatgctactgtgcgttcattgggtcagcagggcacaccaggacaccggcgagactggaaggcgtgagatgtggccatcaaccaacaaggtggggagatagtacgcaacagacgcgtgttgcgcgagccgcgctgacgctgcacatacagcgcggacatgccacaggccacagcagcaagcggagcggagaagtggccgctcaagccaagcaactgcaggatcggaggcgaaatcgcggaagcaaacctcccccgagtgggcaaaagaaattcacgcggagttggccacactgccgactgcccgcgtctcgggcaaaatttgccgacctcgccgcccgccgcccggtaaacctcgcggcagattgcacgttggatttccctggtatccatcggtgaaaagcggcaactactacagtagcgcttcgtacaccagtgccgatgattctagtacggcactatcccgtcagtgtgtgcggccgattaacacgtgatctactcactggtccccggtggtgcacataaacaagcatggagtaatcaaccactgatctgcagcacgttgcgcatttcgggctgcgaagggaagggacggaccccagccacgttcccgtcatgttcagacgttgtgatgctcatgttcgcgcatggggctccggttcccaaggagatcggataggatttcagacacccggtcaccggccaccgctaacaccggccggcgagcggccgcgaacatgcatggcgtctcgtctgtcgtctcccgatcgaccgtgttcgtgtacgctaccgtggtgaccaaccagccgctctctgtgcagtgcatgggcgagttgtgtctcctcccaactctttttccttatcgggtaagcaaacggccgtgattgggggaccaactgccccggtgtcgtggtacgtatcaagtacacctccgtcttaaaatatactaattattttgtagcagagtagcaagtcaaaaaatttaaccaccgcaaaaaaagtcaaaaaatttaaactttaattattaatagtaaaaaaatttaaaaaagatcaatcatgtaaaattgatggtattagatttatcattaaacaaactattataatatgtaatttttttaccttaaaatactagttttacaatactagttttacagatattggtagtcaaactaatattttatattttagagaccttattatagtttaaaatcattatattttgggaggtagcgagtaccgcggtaggacgcgccaccacggagcgaaaggaacacgagattcgtccgaccgccgcctcgcgctcgccggcagttggccatcgttgacgcctcgctcgggcgcccggaaatggtgtctcgccacgtgtggatattatgggtaccccatacccatacggcatggttatccgactagtcataggggataacttatatctatggaatatgtaatagatcatgactcgggtattacgtttccttatatattacggaacagcctaaagtcctggtttgataagattgtaaagtagaccgataccgtgttggttaaggtttctatcttgtaatcctgccccccatcataaggtgggcaggaagccctctagggggcatgagacaacctgatcgtcagattaatacacactcggcggattcaaatccccaaacaggagtagggtattacctctcattgagagggcctgaacctgtctaaatcctttgtctccgcatccatccacttttaggtctcgtgcgctaccccttttattattgccgaattcatgtttcgacagttggcgcgccaggtaggggctgcgtcgagttttccgtcgagaagtgcgatggaactttgtgctggcatcatcggtgctactcttgtctttggccgtgatcctctcaacaaaagggcagggtcttcgtcgccaaaaattctatctggatctggtcaatcaaccaggagattaatcaccgatcgaatcgatctacaaccagcttgttaccgtcaattttacctccgtcagtgagatcaaatccgtcgctacaatgctgccatatctgttggtccgtcggtttcgtcaccagggcatgatttgaagcaatcagcaagcagccgccgccaaaatcatgcgaagatcaccgttggttgagcctgtacatcaccaagtcaatactactcggatacgtacggcaagacacaaagtccaggatacaaattaaatatacctggtcaaatctgtggtcaaggaaattaatccatacacaaatcagctattacatgcacaaagtggtctccaaactaatccgtgcatgtgctaccgacgattacatgtctacacggctgcatgacacggctgcatgctacggttcatccattgacaggcctcgaatcaaagttggatcacaaaccaggtttatcgttctaaattttcttatataaattagaattaattcacagatcactaattattatttgatctattattttatacatgtaccgccggccgccttcgtcgctgccgattggtttcatcgcctccacggttgtgtgcgccgctgccgttgctgatggcgatatcttctgcttcaccggcctgcctccgtcgccgccgactggtgtcctcgcctatacggtcggttggtcacaccaccgttgatgggcatcgtcatctacaccgccggcctgcctccgtcgccgccgagtggtgtccccgcctatacggtcggttggtcacaccaccgttgatgggcatcgtcatcttcaccgccggcctgcctccgtcgccgccgactggtgtccccgcctatacggtcggttggtcacaccgccgctgatgggcatcgtcatcttcaccgccggccagcctccgtcgccgccgattggtgcctccgcctacacggctggcctattatgccgacgctgttgggcgtctacgacttcaccgccggcctgcctccgtcgccgccgagtggtgcctccgcctacacggctggcctattatgccgccgctgttgggcgtctacgacttcaccgccggcctgcctccgtcgccgccgagtggtgcctccgcctacacggctggcctattatgccgccgctgttgggcgtctacgacttcaccgccggcctgcctccgtcgccgccgagtggtgcctccgcctacacggctggcctattatgccgccgctgttgggcgtctacgacttcaccgccggcctgcctccgtcgccgccgagtggtgcctccgcctacacggctgacctattatgccgccgttgttggacgtctacgtcctcaccgttggctcaccttcgttgccgtcgactggtgtttccgcttacacggctgacctattatgccgccattagtgggcatcttcgctttcaccgtcgaccgccttcgtcgccgccgactggtgtcttcattgttattgatggacgactttgttcccacattggccacttctgccatcaccaaggggaatattacaaaggatccagatccagatatgcataaaagggattcatggctttaagcttatctcttacgctccaggaatggatcagtcagaacgtcaccaccggctcgcctcgaccgccgccgactggtgtttccgcctgcacggctggcctattatgctgccgttgttgggcgtctacgtcttcaccgaccggccgcctcgtccactgccgactggtgtttccgcctgcacggctggcctttatgccgccgttgttgggcgtctacgtcttcaccgaccggccgcctcgaccgccgccgactggtgtttccgcctgcacggctggcctttatgctgccgttgttgggcgtctacgtcttcaccgaccggccgcctcgtccgctgccgactggtgtttccgcctgcacggctggcctttatgctgccgttgttgggcgtctacgtcttcaccgaccggccgcctcgtccgctgcccactggtgtttccgcctgcacgg

SEQ ID NO: 5404 - DNA, 10802 bp, Oryza sativa
cgagctgtacccctcgccgccatcgccgccggacagcgctaacccgcgaccccgagcagcctccgccaccgttcatcgccatcccgccgccccaagctgcgtccgccaccggcgccgtccaacaccctcctcggcgccgcccgctgccggcacatcacgcgacgccctcgtcggcgctacccgtccctgcgcgccgctgcccacgcccgtcgccatcccgcccccccaagctgtgaccgcccccggcgccgtctaatgccctcctcggcgccacccaccgccgccgcatcacgcgacgcccttgtcggcgccgcctgtccccgcgcgccatcgcccacgcccgtccccacgcgccgccgtcttccgcgtgtgcccgcacgtcgccacccatcgcccacgcccgtccccacgcgccgccgtcttccgcgtgtgcccgcacgtcgccacccatcgcccacgcccgtccccacgcgccgccgtcttccgcgtgtgcccgcacgtcgccacccatcgcccacgcccgtccccacgcgcctccgtcttccgcgtgtgcctgcatgccgccgtccatcgcccacgcccatccccatgcgccgccgtcttccgcgtgtgcccgcacgccgccgcccatcgcccacgcgccaccacccacgcccgtccccacgcgccgctgcaacgcctcagtagcgacctcactgttaaaggaggaagagagaggaagagaaaaggagatgagggcaatttggtcatgccatgtaaaaagtaggccccttctcgcttagtcagcacaaaaatattaatttaatgaatgcagtgtcccctgataaataaccacattttgagagtgtctttccccaaaagtgacttcgtgcgatgtcctacagctaaaaccacaaagtcgctatgtcctgtagcaaaatttgcctagtttgtatcatgtactagtttcatgtatatattaatttattttttaaaattgtggtacaacatctttaacacacaccgataatatgaaagccagcgattgatcagtggtctcgttgaaatcctattgataacgcaacgccacggacttcaaaaaattttggcatagacatgttaattctttgacttgatccttccgtttagtgtttcttatgattcaatttttatacgtagtaaatgttttttaggattcaaattctatacacaatatatgtatttctagagtatcctatcaatcatctgtcgattaaatttctctctgtcataaatcaccctccctcctcgaaccacacctcatttaattaggaacactatagtaactttttctcagatctaatcttcactaaacaacctagaaatgtttatagatgagaagttgagaacggagtgagcaattgtttatttaatttctaatagtccttctttagccaaatgttttagaacgctgtcatagcaagatatttgcggctcacaaatcatcactttatgagaccgttatttctaacttaaagtatatattgcctagtgctttgcctttttatattggagttgcaaagattccggagaaaagttgtctttttatcacggtggctgaataaattatatgttaacacggaagcctattttgtctttttttacggtcaactataatttttctgacttggacatcatctgttctttttcttgagagtagcattttcaccattttcaaagtagcataaaaccatcatgaccggctaccactaagctgcgcctgtctacttgtcaagctctacaaaaccggtcacagtttttttatgtatatctcttctttccagaaaacttgctctcactgacaagtgggacaagccactacaccctccttctgggcccacctgtaagtgacccattcgagaatatttacgcgagggatctggtacgcctaacgataataccccaacggctacagttcccattcgtgattccacaaaagacagccagattcggagattcccctcgggaccacgtgccgaggcggcccatccggcccggtccggacgcatccgcgccgtccaaccgaattcacccccgcatccggccgtccactcgccgacggctgagatgcgtcccccgcctcgcttgatccgtttcgtaggccgacactttgcccgccaaatggcacgccaccgtaattaaccccgaactccgggggccaaatatctacaaaaacaaagggtatgggcgtgaagcctagaggtaggggggctactcgtagcctccgttttaagtacaaagactccgaaccaaaactccacgcgatttgtttagatcaaacgggttcgtaaaaaaaaagttttattctcgggttcgttgggttttatctatataggcggcgagcgagaccatctcattcagttttattccgcgcgcctcctaaatcgcgcttaatccggcgcatcctgattcagagagtggtttggattcgttggattcgaggtgaacgaacagggcgtggaattttcgaggactctctcctctcgcagaatcccgcgcgcctcctgattcggagagcggtttggatttggattcgaggcgaggaattttcgaggactttggcagcggcggcgggggctggtgagcttctgctgcggcttggagtctgcccccaccattgcgtggggaggtggaggtggaggcggtggtggcggcgggggcggcggaggacgatccttccgcggcttcggtggcaggtgagttcgccgggttgggttcggatttcgtctggatttgtgggggactcagttatgggtggtggttgcttgcggtggttgtggtggcttggtcgtgttgaggtgtggggtctccttcctggtcatctcccagggcctctcgatcggatcctcctcgggagtcgggaatgcgaagctgagtgtgacgcgtgcacgactctcgagggaggaattcccttggtgatcgtgctggagttcgtgggattcgtcgagcttttcgatcctctgctgaaaaaaaaaagtcgttctctgtcagttactcgtttcgtttcaattgggtgagatttttttcctggctcgatttgtgcaggtttgatccaaattgagcgccctgaggatttggggcgtgtttatggaggattagatcgagaattttggttgtttctgtgagatggccgccgattccagcatgggattccatcaggggatcacggcctcgatgtacaaccatcacatgctctccttccaatctaacagcgacttgggcggtggcgccggcgctgcggccggtatggtgatggccccgaggagcatgaacgggactagtagcagcgctgggctgttcgtctctccgaacaccggtgtgctgggcaacgcatcggtggccggcccgtcgaggagctcgtcgggggatgcgttcagtagcacggtggcgcccaagtacaagttcgtcactggttcgccttcagattggaatgaccgtgagctgaacacactgaaggaagggcttgtgaggtagcaaatccctattccccttttgctttctgaattgctattgcctgtgctgtgctagtgtgacttgttgcttgtgcggttgtggctgatggaattttggttgtgcaacaagccgttttttctcccctcttatgtttaatggagcatcaatccggaacaggaaatctggagctggattcattcaattgaaccctgttaccttttgagttgagagcaatatcaatgaatgttctatagcacttttgtgattatttagcgtacttgtagaatcattgttcttaaccatagaacgtctttttcaccgggccagcgaaaccataaaacgtcttggtagccacacttgagtaccttacgactatatgtttgcactatagctgattaataaagtcactatccggtttgtcaatcttatctggggaccagaccatttcttttcagttcctcataatttcttcaatcttactggcagatatgctcgcgaaccgaatatcatgaagtacataaaaatagcagctatgctacccaacaggactgtcagggatgttgcattgcggtgttggtgggctacagttaagttactcttttcaaatgtcacattatctcttctgtttccttgttaacatatatgttgattctggtcatgtgcaaattgggtagaagaacttcttaacttcgctaaaaattaagtcagatgtacactgaagaccaaaattgacaccacctagcaccctcaccacattgctcttttgactttttgatagaggtgcttaagcgcttcatatatttaattttactttttataatcctttatttccttttgtgactgatgtgataatttgccatctgccaattacattctagatgtaggctgactttagtcccaaactttttcttcaaacttccaacttttccatcacatcaaaacttccctacacacacaaacttccaacttttccgtcatatcattccaatttcaatcaaactttcaattttggcgtgaactaaacacacccgtattgtaacttggagtatacagcttttaaagttctagcaaacgatcaattccaacaggcatatcaagtatacacagcatttaaggccataataatgacctgccctggctgaaatagacactttgtttgtttgttttattcttaatacaaagctgttcattgtggtttcagactggaaatagatactttgtttgtttactcccgttaataccaaaatgtacaaagcttttgtgcctcccgtaaaatttggaaatagccaccatgatgcatgtagttgatatttagctgttgctgcatgcattgttttctcttacattgctcctccaacaggttatttgtttactggcttgcattagtatagcagctcatgcactgtattctgctcacattcgtttactgttacagagtaaagatagaaggaagaaacctgatggattttatacagggaaaaagataagagacatgaaggtagttttctatttgtaacttgtttggtgtacctcatttcttttgcttgtatcagccatgttcttttgagtttaatttctcaacagccaatccaggacaagatggttgcatctgcctccatggctaattttcacctggcacctgcaaacactgtgacccctttctcaatatcgatgcaacatacaaatcagcaatgtcaggttcctaaggaaggcaagaccacagcaataacattaacatctatatgtttgctttcttctgttcagctgttttagttcatctttattctgtactacaagtttgaggtttgacccacagtgtgttctaaaattgtgaaaactttaggtctgttagatagtgaggtaaacatcaaaacttaagacccatgttaaaaaaacaacttgagactcagtgtttccctctgtttaatttcatcatagaaacgtggttcacacacttacattgttgggctaacattaagtgtgtgtgtgtgtatatatatatatatatatatatatatatatatatatatatatatatatatatatatatatacatatacataccatatgagtagattttaatgctcttccaagaattcctaacaaactcaaattgcttgtgttcttgaggctgcttactacatttgtagtcagtagaagcatcctctggaagcaaacttcagatgcctttatgtggtgcgcatgctgtattaagattgtgtcacctatagatccccgtgcaaatacaagaaagatctaggacaaaacacaagcaagtagcagtgtttccaatttccatgctaagcaatcttttatatatgattatgaatccttggtaacatctttagaaactgtttttttcttgtgaaataccttggaaaatagcaattgttagctttactattatttcgtgatacaagcttactgatatcatcggatgctagaaatccacaactgcaaaagaatgggggttgctgtatttgatgatcatgtagttttgtccgtttataggtctatgatggaggaaaggttcatacatcccatagtaaaggaaaagggtgttgcgttgcaccctcctgtttatattctttgtgtttgcctttcatcctttcattatctttcaccgtaaactttaggaacataatgtaataaaacaccttgggtttcattatcattttagatacctacaactatctcatgcaatgcaactgcatgcatcttatgatgtcttatttctcccaaaacactcatctggttccattatgtagaagttcctgtcgtggatagtgcaacacagcatctcctggaagaaaacaatcatttactcaaccaaatcgccacaaatatcgaaacattcaaggtttgtatgtccataaacttctcgcattttaattctaaagttgttgcttttgaagttaatgagtgcccttacgttagaaaaaaaagttaatgagtgccggtcaaggagcatatgatgcttgccaaacatcttaatttcattacaatagttggtttaaaagtcggtttatctattgaaaatgctgtcgtaatatgtgatcaactagtccttgccctgaaaatatatgcccctttaactgttatatttacggggcatcgtgtgaaaccaataatgtcatctgccatcaattactagatatggggaaacacttaatataagttggaacctgtcactctcaggctttatgaatattaaaaataaggcaggacaactggacaggtgtgggttaccatttgttttctttttaattttattatgcctgaatcctgagtttcttgcagacgggagagaacacggatctcttttttcggacaaacaacaacttcaaaaatattttaagcaggtaaagcgtcatttatgtgcccgccatgtatcttgttctttatatattgctttgaggacgatttttactcttcatgtccaaacactgccatgccatccattattatgttccaaattagataggagcccctagttaactataccatccattatcatgttccattatcattatcaaagcctgtaccatcttttatcattttgggattgcttcctgttaactggtgtttcttgttctaggcagtattcaatattcatgttcgtagaaacaaaatataatattttttccttttgtgctgcagaatgagcgagacgcctggtatcatgggccagatgccccaattgccagtgcaagtaaacgaagaccatctgagttcacttcttcagctggacagaatggtaagaggggacccgtaatcacaagagattcaaacatgtacgcagtatttttcagcacgttcatcaccatttacttcattttcttccctttgctcttaaagtagtcgatacataggatgttaacagcaggatcttgtaatctacatgccttaaccacaatgatcgacacccactgctaggttccttcgtatggcgtaacgcaaacctctcatatgaagcaagaaccgcgaagctagtataaacatacacgaaaacaaggacttgaaaaggaaaaaaaagagcagatggctggagctccgccgcccaagtttcgtgtaccatgaagaaggctaagttgccgcaccgagtgagcgagcgccaggaacagtcccggcgtttctttcttccagcgagattgttttccagtgatctgattgtctgcccgcctgcctacctgcccgagttgaaagctgttgaaagcaccggaaattgaggcctgcagctgcttgcgggggtatgcgcaacgggcgagcgagttgctgttgttgtacctggttgggtatccagcgaaatgaatacaccagacacttgattcgggagtgagtaacacgcacacaagtgactgtaaatatttggatggctggaggtgttcccctgtcctgttttgttctctctgattggtcgtcaatatatttttcggaagggtaccttgtatgtttttccactttggagagttaggagggcaccttatgtattattgcatagttggaagatcgtgttgataaaaccaacaaaaagatggctttaggttttgaatagaatgcccattgcatttatacttcgttctgtgatcgcccttattactccctcaggtcgttttgaacttcgtttatagtcaaacttcttaaaagtttgatcaagtttatagaaaattataatatttatggcaccaaaatctaacattcaatatattttaaaagtttttattgctaaattttaatataaacttaatcaaaactaaaaaaattgaattagaaaacgttcaaatgatttctatatgaaacggaggcagtatgagtaaccggccgcacgtactgcgctgacaactgcatccgtcctccgccaaccacatctgatcttctactctcttccccttttttttctccaataacagttagattaagattaagattttcgtggcacgcttttcaaactactaaacggtgcgtttcgtgtgaaaactttctatataaaagttgttctaaaatatcatattaatctatttttcaagtttgtaataattaaaaattaatcaatcatatgttaataccacctcgttttacgtaaaaaacttaatcttcatcttcatctatgttccaaaatactctagtagttcaaactttgttctaaagttccaagtaccatgggtaaaagtttacagtgatgaaatatctaaaatacatctcacctctaccggccaggacaattaataaaggcatttctacacttttccttcgcctccataaagaactcaagaaataattactattactatactatattttaagatggagggagaactaggatggacgccctatgggctagtttaggcaaaacacactaatcctgtgtgctagctcagggcacaattttgggaagttccatagtcaaacacgataaataatgtgtcagcaacatgttccaaattttcagcaggctattatgttgatagcaacatgttccaaactaacaggttattatgaacagaaaccaatgttgcgtgttgttgacatagtaaatactgcaactgtacaacaaaaattataatccattattaaaaagccgaaaatgacccctcatcgcacctcaaatagtactactgtacaatcatatacactccagaaaagaaaaatgcaagaacacccctttaatcaagatctgttactggacttgaaaaatgagccttgccccgtgcccgaaacacaaggaaaacatcctatctagcactaccagtgaaaaccactatcctgcaacatgcatatgctatgtagcaagcacaaaacattggaagtttggaacagaagctgtgtgctttctgagcaacgagcagtgcagcaaactataaaaccaccgtgagccatttaaaagccctccatgaacaaatacatatgcagttactttacaaaagatcaactggcaggatgatcaatacttgccttctccacggtaccttctgcaggtagttcttcaatagcaggtgtgctactggcaacaggactctctgcagctaattcttcaactgctggtaagttgttggcaataggactttctgcaggtagttcttcggcagatggtaagttagtagcaacagaactttccgcaggtaattcttcaaccgtgggtaagtctttcacgatagggctgccggcacctgagtttgcaaggtttgcaccggcgtggccaatgctgccatcggaatgagaaataggagtctccttaccaggagataccatttcatgctcatcatgctgccgtggtccattgagggcattacagtgcgggcagtaatatgtaatgaatgcaaagtcctctttccttgcaagacctgcaacagtgaatggtttattatatagaatctgtatgaaatattgggaagatagttatcactttcataccattatgcatatggcagttgccacatattaacgcatagcactgagttggatcttcccctacaagcagagcagctgctcgtgcgagccatcccccatcattaccagctggacctctgaagtggtcaacagtcctctgatttggagtggtgacaccttcattaccatcataggcatatgaaccgcctaatgactcagggccgtatgtccttccagtgctgttgctcaagtgtcctggttttctttgcctcggtccagtagtttgggcatcattacttttactcaatgttgcatccctattcgactcatctcccaagaagactctcaatccagaatcagcacccagtttagatgccaaaacagttgctgcagcagcttttgcagcaggatcaagatcatatctctgcatgaccaaaacgaagtttcagcaatagttagaagatgtaaacctttcaaaggggaagagtaaaaaaatagcacacttgggtggccataacatagagcaagtaggcaacaagcccacctgtataagttgttgagtagtgtagtaattcgttctctccttcaactcatcaatcttagcctgtctttcagcacggaggttttcaagagtatgttgatctctgttgtcaactgcaagatagaatcagtattgcagtttaggcataaaggatagggtgtattaattggagcagtttactagacgtaactcggttgttccacaaaaccattcggcaaatgacaaaaaaataaagtgtggaagtaacatggtcaactcaaaaacatctggagaatctggcaggaaacatggcagtctcatagtttttttttgtctccctgacttctagggataggaaaaatagctactccctttgtcccataatataagggattttggagggatgtgacatttcctaggacta

SEQ ID NO: 5405 - DNA, 42297 bp, Oryza sativa
tctataaatgacaccactaagcaactagtagtggtaaataattaattaggttctgcaaaggaaaataagtcatctcagcaatacgcgaagaatcttacatgctccaacctgaggcatccacaaatggatgccacagcccatgttgataaagcagtcgattcctcctcggcaaatagcgcattgcgcatctgaaaaggagtggacaaagcttagacatagtattcatgtatatacatagcaaatagcttatgacaccagagtggacaatgataaatgcataatattgcaacacatcagtatatctcacctcagccacctctaaacttgtatcacatgaccgcagatcaatagtagaaccagcaatatgaagaactgtttcacctggccggtgaaaccttagaggatgaaggtgatccaacgggtgaaaagtaagggatgaacccctggcaggacactgcagctgatagtactgagaaacaacttgcagagatccatatttttttgcctgaagaaaacaataagttaccaaatataccaacaaaaaagagagagacagatgagcaaaaatttgtgtcattttatgcaaatagcaccttagcccattgcgatatattgttgtggccaactaagtctccatgaccaattgatgatggctcctccaaatccgattcatggctatcgcttctgaaatttatgccttcagaaggagagtcctgggaactgcagtaaatagtgctaactactttattattttattcagctagtgatgcacaaaattaagaagtaacaagacgatttcaagtgagaatatcagaattcaagaaacataggaataggttatgtaaaataacatactagtgccttaattatgtggaggataacataccctggagataattcagaaccttcacaaaggcgagagcgcatgagaggtagaatagtatcattaacaaagatgtcaagctgttcatcgttcacatcatcctgtaaagaatagccacaattttctgtggtatcagattccttcaggataactggtacagaatccagttcatgaagctcaatcccagattgatcggcagttgtatcttctgataaacaattgtcaggcctttcaagagtatcacactgaggagctgttcctgttacaagatcatcctgtactacacattcctgttgaacttctttgcagtttaagtccaattggttatctctacattcagaactgctgtcagtgtcagacagctcctttgaacaaactcccacacttgattcagaggatttttccagatctactgcatgaccatcgaaatattgtttttctgttgcaagttcagttccttcgcagacaacatcatcctcacaggtttcctcaggtgataatgatgtaagcaagctaaccccatcagtgagccattcgagacgctcttccataagaatactgtttgtgaaagtcatatgcaaaagaagtggcatcaaggagaatatcaatattgcgtatagatctggatagcatgaaagacactcatacaacaatgtttaacaaagagcaaattgagcagagacaatcgcaggaactttggatgcaatctaaaatattatttatgccataaatagaaatcctgaacttacatccccatcctgagatcttgaagcattttgtgttcaagctcacaaggaaacaaattaaccattggatacacataataaagcagataattgactccaatgttaagttaaaagcattactagaaaactagaacactgtgccaattgtggaaaatataagggagcaagtgattgaattcatggttttaaaccccaaaccttcttagttgcttattctagtattcttgtctaagatatcgatgcttattctagttgctgtgatgtaaaaatgttacttgcagaagcaaaagaagcaacaaacttgtatatgttttccgaaactagcagcgcaattgaaaatgtaaaagctctttatggctaataaggaccaaaagcagccgatgaatattttttacgcaagaactagtgatcaaaattagaacatacaaatggtacacaaggatgaggcttccacttctgctgagtgcagaccggaaaggtggcaaagcaaaagactgccaaaaataatgaatatttacaattcagcaagataacaagcgataattgcgatcactataccgtacctctgtagcaccccaaagtgcagttcaaagaatgggagcctggaaaagatgcaatagcatcgcggtgtagttattacataacgactccggcgtggaaagacaggtttttcacttgtgagcatagaaaccagcttcgaaggtctctgtacaatctcttcaactaacacgcagcatccatatagtgtagagtcatcagcaacctgcagtctttcgataatcagcaacctattgaagtagagtgatatattggagaaagaaatacatttacctgtaaacggaacacgaaagactggttgctttctttaagttgctcctgaaatgggcaacttactatataagattatggataaaaaaaatcatgacacaggactatattacacaggctgtaaatccttagagagcatcaccattatatggtgttgaaaaagacaaaattagcacggagaaacagtcacctgtcctaggaggatttcattcagctcactgaatgagggggtccgttcaaccgcatggacctaatacaaacataaacataggtaaattgttttgagggtatacagtgcatgatctgacaaaactacagatggaggattggatgttaagcaatcaatgcatatgtgttttcattcagaagaaacaaagaatatcagctgtggttgcagcctgcagcaaaaacaagaaggtaaacactattagcagtatgtagcccaaatgtaacagacctgtacacctccaggaagacagaacgagaggatatccttgtacttgagtggtagaggcctctctggagggtatgcaaaaagaacctaaggagtaagcaggcaaaagtaatcagcaaaagtttcaagtgcatgaaagaagacacaaagcggatgaggtgagctataacctgaggttccaaatttgacaatgcatgaacttggtggtgattgttaccgaatatatttctcggtttctttacatcttcctcattgctccctagtgcaatgttttctagctcatggatatctgcctgaggagggagtccaacaatcacaatgctctcgaaaagatgtgatggttctctgatgcacctattaccctggtccagaaaagaattttgacagttttgagcaagaccagaacgggtacaaccacagaagaacagaaatgagaaatacaacgtcacactcttcaaagtactttccagaaacaactctacagcggcttgcatgctgaagcaaagtgactcgcaataatcatctatgaaaaacaaagtgtatataattctaaagtgtttgccacaatttaccagtcttattaacttaaaaaagctaggttacaacacagtggtatttaaattcatctgttgcactcaaataattactcggaaacatggtgaacacacataaaagtgtgcaagtaaatgagttgctctggtgcttatgaggtgttaggtatgaccgtatgaagtttgccacaatttaccgatcttaccagtttaaaaacgctaggcctttcaatggtgtggtatccaaatattattgggttctttttttttttttgaagtggagagagagcctctcccgtttccattaatagaaacgatagtagttcattacaagatataaactgaaagcagaacagcagaaaagataaagctgaactgactgctcacaaatggcgccatcccaccattttgatgcatcagcagcaacaacttttgcactttggccctacaaagtctaagaaagctgtaccaacaaagacaaaggtagacgagaaacaaagctaccctattgagttcttactgtacatggctattgcactggaataagtactcagaattcagaggcacttgtgaacaagtacataagaatataacaaaatggatatttttgttatgatgctcaggttatttcaaccattacagaacaaaggtaactgctatttataatctatagagtgtgaaactgtccagagatgactagtataaatgtaatcataactgttgagtaaaccttcctaaatagtttcaaataattcagcaaaatgctgataagtcaccactcactacacaagtacacatgatagatacatgagcaaggtgaaagaaccaaagtaaaactttcatgcaaatcaaactcaatgtgtgatagatcattgagcctgacaagcgatattaaatgagttctggtattttctataagtaaaactccaagacaaaaaatgttgatcaaaaaatacacatagttcgtgtaaatggaacaacatagacgttgaagcgactgttatcttgtcttgtgaccatgctatgacctgtataggttgtaatgggaaagaattaagactaacatccctaagatgaactgcaagtttgaatattatgcttgaaaaacaactgccaatgaagacacactattgaacaactagtgaaaaaaatagcatatttagctctgttttgtgcactactgtactctgtcatagcagttaaaggatacaggtcactcataaattaaagctctgaattaaagaccgaagttaatctgcaaaagtatgtccaccaacatatagattgaaaatgcgatacataccagcgactttagttggaacctggaccactggcgcttttgtgttgtgagaacctccgggttgtaagatccagacacttcaggtgacgttgaaaaccctttcaggatcttcgaaaattgttgttgcagcttctgcattgggctgccactctcttctctggaagagtacaccacagatggtcgtgttgactgtacagtggctgcagaagctgcagcaataaatgctctcgctacctcttcagttgtttgcatcaggtgtgatgtgttgaatttgagcccttcagatccatcgttcttgtccaccattctaaatgcttcctattcatgcaagcaaggagattgtcactccagtagtgtgattgagcatgcgcatatccgtcagacaacatcaggacacaggacacatatcatggaaatacgtagggtaacaaacaaaacttgagcattacaccatgatcatgatccagtggtagcatctatcgtacaagtaaatcatcttctcggctttgaaccacttaaattaaattcgacagaacctatggcctacacaacctacagtcctgggaacgtaaatttgtgaaatctacctcatacagaacaataaatcagcttgtacctcactctgatatccaaccagaagccacctaacagcaaaccgtgtgcactttacctacctaaaaagcggtccacttgaataatcatcgaacttttccaaaattaatcactgagtgcatggttgaatccaaaagggcaaaaggtgacaacaaatcgaacaataccacataatccgatactactatgatcgatttatatacttcgaaagtaagaaaatgcattatcagcgaccgaagcattctatattaaaaaaaaaactagcaaaatcgtacagagcaaccactcgatcttagtgttatgacctaaaattcgcgaaaataccacatccaacagactgtttgactactccaaatccatcatacaggcgacagtaacctcaaagtgccaaatcgatagggaaatcgcaccctccaaccagagtcagatgctctcagaatttaacagtagaaaacccatacccccactacggtcgacgaaacatccccgaaaagaatctcaaaacacacacacacacagagaaaaaaaataatagggaaaagcgctccgaatcggctcacctcacctgacgcggcggcggaggggagggctttgaagcttcaccccgcgaagatctcctcgcctcggctctcctctccccgctgcgcgcgcgcgcgccgccgccgccgtcgaaatggacccgccgaactagcaacgaatgggatggcggcctcctccccttcccctctcctcctcctcctcctcctctcctttttttttccccttcggatttgtggtttaatgcgtcgatccgttcgattaaaaccagaggcgattcgtcgcggaaaaaaaattaagtggcgtgatttggttcggcgcttgggctggactggacgaggggggaggagagattttgagaaggcgagtttttcgtggacgagtgggagtctgctggaactggggggcgatctgtctctctgctcgtggggcccgtgcaaaggagggtgcctgagttgacccgagccgtgtggccctccgtgtggccgggtgcctcgcttgccgctacgccatccgacgcgtggctgcttctggctggagccaacagggagtacgtttttttttcctttccgagggaaaaaatgcagtagaagtacacgacagcaggcatgcagaacaggcctttgtatgctcgcgctattaaatagctctatgaaatcttgctatttaggattattaaatatagattattgataaaaccgattctataatctctaggttattttgcgagacgaatctaataatatatattaatccatagttagcggttgattactgtagcatcactgtagcaaatcatggattaatatacctcgttaaatttgtctcgcaaaatagcttaggagttatggaatgggttttgtcggtaatctacatttaatactcttaaatagcaagattccggagggctatttaatagccctccggattcaaacagggcgtagtagaaagggagtgtttagaactttagatcaggctataaaggtttgacgtgtcatatcgcatattatatagagtttctcactgagtgttcgggcactaataaaagactaattacagactccgtcagtaaactgcgagatgaattattaagcctaattaattcatcattagcaaatatttactgtagtactacattaatggagcagttaggtttaaaagaattgtcttgcaaattagtcgtaatctgtacaattagttttttagattatatttaatacttcatgtagatatttaaacgttcgatgtgtcagtgtgtaaaaattttggcaaagatctaaaggcctaaatcaaacgttttcttttaagatgaataaatcaaacgttttgcaacaataattgtacggtttttaagctgtttagggataaatgatactaggacgacttaaaaaccagtggtactagtactcaggaagagtccaacaagtttagtctcggcaatcaactttttctttctctcaattaagttgttttgaatattgattcagtcgttttctgcttggttgctaccgagcattacaccctgtgttgtttttgtattttttggacaactagttgtggatatgctcgataagaatataagatactccaagctcatatcttcgggactttgtttattcttcagaccctttttactttgattggaaaatctctgctcctaaaaaattgcaagtaacaggagtgtgaccaatgaaactggtagagagatgagtatataggaatggtatcctcagatttatacgtgagtcacttaactgcatttgtgattacttcctccgttttaagttataaaactttatagtattacacatttgtatagatattaatgaatcttaatacattaatatatatatgaatattggtaatgttataaagttttataattaaaacggaggtagtaagtcggagtgtgtaaaaggcaagaagctgaggctcaaactccagaatccagatgtcaaagcctctagtagaacaattctgaaggtacgagcagtacgacacatgtacagtgatgacgttttaaagccggtatccatagccatcaatgaagtggttccaccgtttggcagcagttgaaaaaaaattatgtggacacattgtacctacctaagtactcttagggagcgttgcgttcgttctggtgagttagggtgagaaagcacatcgtagtccgcgcacacgctttctaaactattaaacgatgtgtttttggcaaaaaaaatttctataggaaagttgcttttaaaaattatattaatccatttttgaaatttaaaatggtttatactcaattaatcatgcgttaatggctcacctcgttttacgtatctttccaatcttctcaatcccctatccctcaaactcacccttaggctctgttcgttctggggagataggggagaatgagtctcgttttccgcgtgcacgcttttcaaactactaaacggtgtgttttttgcaaaaaaaatctatagaaaagttgcttttaaaaatcatattaattcatttttaaaatttaaaatagttaatactcaattaatcatgagctaatgactcacttcgttttgcgtatctttccaatcccctcctcaaacaaacccttagctatgcaaagtacagtaccattctttcgctcttccatttgtagctgtactctcgtgtttgcagaagttaaactcgctaccaagatttaaaaaaccacgtggttattacgtgtgatatccttttaaattttcgaaaccacgatataactcatgataactatgtggtttcgtggtaaccacacggtttccgtgataaccattaaaccttgagccgtgaggtgatggtaatctcgtccaaaatagtttggtaaaccctgcatgctacccttgttgattttaacgctttgctcctgcgagcaacgatttttgacgttaatgagtactatcaagctgaatactagctgatcatcccattgccgcataagatcagtgagtgctacagcgacacgaactcgcccgctgatctccatctttttctctgtctgggccacgctcaagcgtggcgagaaagccgcctgggcccattgctcggaaatcaatcaatcatttcatttcattgtgaactactccctccgtaaaaaaaaaacaaaccctaaatttctatgtccaactttaactgtccgtcttatatgaaaattttttataattcgtattttcattgatgtttgatgataaaacatgattaatattttatgtgtgacttgtctttttaatttttttttcataatttttttaaataagacggacggtcaaatgttgaacatggaaactatggcttgtctttttatttggacggagggagtaaggcatgatctagttcccaactttttcttcaaacttctaactttttcatcacatcaaaactttcctacacacaaatttttaacttttccgtcacatcgtttcaattttaatcaaacttacaattttggcgtgaactaaacgcacctgaacccatgccatgccacccctttcagctttaaccatggtttccaatgcagcattcagctctgccgtttacttttatacagcagaattttcgcagaaatttctctacctgaatacggctgtgttcagtgcagtgtaaagtttagattttggttgaaattagagatgatgtcactgaaaagttgtgtgtgtatgatagattgatgtgatgaaaaaggactgaagtttagatccaaactttaaatctaaacatagcctacctgaactttcgtagagtcttgagatcgggtcattgcgaaagtccatttgttgcattttggtctggaaattgttcggcgaaaaatctcggaatgcattggtggatatgtcaattgcatcagcccatgcctgcatggtggggagctggacatgggaattgtagcacgcaagaaaacgacgggtgattgagcagataggctgtgtgcactattctgaatttctgattccaattcctggtctggtagcatgccagcccagctctctgcattgctagcctttctcaggctcagaatctgaacttcgtttgatggaggatttgggtttactctgacggaacatcctgcagcttcaccaaagtaattaaggccgagtttagttccaaattttttcttcaaacttttaacttttttattacatcaaaactttcctacacacataagctttcaacttttccgtcacatcgtttcaatttcaaccaaacttctaattttgatacgaactaaacacaccataaataaaaaagttagaagtttgaaaaaaaaatttagaactaaacacagtctaaaacatgagatgaacaaaaccaaaggtgagggatgtatactctactagcattggcaagtgtgacgatgcataaagaaagaatgttcttccattacgtggtgcccatacacgtcgatgcaattaattccgtgatagatgaagaggatggagagatgacacgacctcgcgagcctaatccgaattggatagatttagtgatccggctttacgattgctatccaaatgagagagaaaaaaaatatttttagggggctttctttcctcttgaaaaggaccacatttctttatccacgagctgttagcatcagtgcatcacgccgtcgccaatgaaagaaagaaagagaaagggaggaaaggttagcatcatgattattgagaacctgtcatagctgtcaagcagagttgctgatcgatttgtagactcagataattatatgtcattttgggccctgccaatcagccgttgcctcatcaacagatcactagactgatgaagagtgccgcgtcatccttcgtctgatggcatcattagcccatatgctgctagatgcaagaactcgatcgaggacatgaacatttcgggcttgtttggtttgaatcaaatttttgccataccaaaatcttaatagtgccaaaaccttggtaagttttggtactattaaattaggtggtattgaatttgaactattatgacaaaaaattggtagcaaaccaaacatgtatttgctactattgaagtagccaaaaaattagtagggcaataagttggttgcaaaccaaacaggcccttccttgcatatatctaacacaattactatggatgtgtttagttcacaccaaactccaaacttttccatcacattatatcacatccaaaacttttctacttacattaactcctaactttttttccaaattaccaattttccccaaacttctccttaaacttcggaactaaacacagcctatatggcaaaggccacttgctgacagatctagcaaacgccacctgctctgctgcagaaccccttgctggtaggtaaacagagtgcaggttgtgcatagaaaaaactactagttccctctgtatgcaaaaatgtttgcacttaggccttgtttagttcctaacttcttttcttcaacaagtttttccgtcacattaaacttttctacacataaattttcaaattttccatcacatcgttttaattttttcaaacttacaattttaacgtggaactaaacacagtaaacacaatacacaactgactggcctggtgttggcctggtattaccttgcccgacttctatgtcagagacattgacattgatgctctaccaaaccagccaaattatcaaaagtatcaaacccttcctctttataagaagttgttgaatagctgacgcattcttcaccactagttgccggttgaacactggcgttgcttttatctgaacaatactagcacttccacttgcattgcataagaccccctgaccttgtgttgtctcttgtggcttcaggccttgaacgtccaacaacttcaggagggtaggagagccaaaaaaaacggtctgttgagtatcattggtgtctgactgaaataatgcgtaaatgcagtaggtgagatcatagtggatatggccggaccgccggacagttcgatggatacagaagagataggctccgtgagactttctgtttcgctagcagacaggagctgagcgactaaaccggggagtactgccaacaaaacgtaaggcagatagccagatatggaacttctggactaatctgatgcaaattttccattttttagtccacgactccacatatcatctgatagcaagggcttgttcagtttgctaccattttaaaccttaccaagttttgatattgccaaattttagtaaagttgtcaaaattttggcaaggttaacaaattttgacaagatttcatatgtactttctaaaatttagtaacaaactaaacgtagctaaaattttaactactttaataaaaaaaatatggttgaaaatgacatcaagttaaacaggccccaagtttgtgaatatgaagctaacagttgtactgagccactaaacacttctcgaggaagaaaagaaaaaaaagacagatgtgcaagaccagtttaatgcagtgttggcccatgagtcatgctgaccacaagggctcgtttcgatgggcctaaatgaggcccacttacatgtatgggctagacacgatgcctactcatactgaaccgatacatcatattatcgtggaataagtccattttacgttcatcatttcatcaaatttaaattgcacccgaaaccataatacctgaaatcttcgcaccctcaaattgtaaaaccaggttaaattacgtcctttagtattatagatggttggtttcactgacgtggtaagttgactcagtcccgtcctgactagatgtttacgtggcaaaaacaagagtggaccacatgtcatgcttactctcctcccctcttctctccccctcctctcttccctacaaaaaatggcctcggagacaactaggaaccgggtagcgaacgtcaacaagcatgaccacctcaatcccatacgtccacgtcggcctgaacacgccgcaatagcttcctcctccactctcgccaccttctcttcctatcgacgccagcaccctcctcctccgcgcacctcaatgatttgtgcaccgaacaccaacattgtgtgcccctcgtacgcaaccggcccacctcccccttctccacccactccgcggtggagaccgcttcatcttactcatttggctccatcctagccaccccctagtcattctcaatcttagctcgagagccataggggatgggaggtcaagcaggaactcctagtcatgacgatgccgaattgggagatatgtgcagtgagctcagagatgatgtagaaggtcgaggatggggcggtagagggtgcgggaatctatgccaacgatgaagctcagcctccccctccaacgacggacgggaaatgggatcaccagccgcctccctcgctgccaatcgctgaatggtgtgcgtggttgggaaaaagagaagaaaaaagtggacattgatatgtgggttcatatatattttttattttcttcttcccactcaccccatccgtcccaaaaaaaaatccaattatagctatgaatctggatatatgcgtgtccaggttcgtagctaggatttaccttttttctgagacagtagtacatgcagggctcatatgttttttaattactttttgctgactaggataccatgttagtgaaatcagccatccatattaccattagatctaatttaactcggtttgcaatttagagttaagattttgggtatgacgatttagagacgtgatttaaactcgatggaaaaatgagggacctgaagtggaccttttctattctcgtcgtaaaaagatgcccaaattcactcgattccgtcggccattggcaactaatcacctccaggctccagcccagcccaaatcgttctcctcctccagaataagcccatccgccgcgcggcatgcaactcgcgcaaaagaacaccggagagcgagagcaccgtgcacgacgccgatggccaacgttgcagaagatgccgctgggcgctggcctactagtacgcgctcagccgcacacgcacacgcccgaatgctcgatcggatcagtctcctgcctgcgggttgccatgtgcgcgcgtgtgcaatgcgctgcgctcccacggcgaagcccccacggagacgcgcaccggcgcaacaagcgaaaagatgggcaaacgcttggagcccatcttgctgccgcccagtgcccccacgaaccccatgcctcgttactgctcgtcgcgtcgccctgcttgcttgctactagtccgctgccgcttggccgtttcttgcttgcctcatggctcgtcggctcgtgatcgtacctgtgccgcgagacggcgagaccgcgtgtcacactgcctcgtggcttgccgtatgcgtaacgcaggtatgggcaggccaaagaaggaacagtcccattgtttaacatattcgaggaaaaggtaaaacgctacttgaaaaataatgtcaataaaatttttatatactttgtttttaataatttagaagtaaagactgaaaaataaactataatgaaaataatataaaatttaactttaaatttaaatttaaggttgattttattttctgataagtataaacgtaaacgaaaagataaggctgtaagtagttcatcagcccatcatcccatcgaaaagccgctgcagagtttagcagctcagcatgctttgaacctcttgctacttctctttcatcgcatcctctctgggctgtttggacggcgtagaagttttgtctgtggagcgaggcagctataattaacagtggatcatcggattcagattagtcaatactcggctactcgcaggtactgtacgcaccaggcgacgttgttaatggggttgttacttgttagtgtacttctttctgtgaattaaaggagatctgaccggaatcttgaccacgtacatgctgatgagttcattcgtaatccgtttaattctacgaggacatttgactgtacaacaagtattttgtgcgtctgtactggacagtttgtagaccgggatctagttgctgtacttgatgggacaagaggtcgctcacgtagatactgcagatcgtgtagaacatctgtagtctgtagtcttcagttgaactgcgtgcatgcatgttgcacgatattgtagtatgtacctattcatctataacatctataacgcatcaaatcatctgtttctataggacttctttactgtacacagcaagtagaaacgatgaagttcttcagcctggggccggaaaaaacaagaggccaagagggcaacgcgcgacctcgtggtttctctttcaaagttgagcttttcaattcaaatggagttgataggagtgcgtgttagaggacacggtttaggccatcatcgagggtgaattgacaaacaatatttaaccagcaaaacacagctcgaaagcttatatatcacgccccctgtccaggatgcagcctttcgagcttcagctttgaggatcatacggctcaagaatcgccatcattaacccgtggaagatttgcacggcgagtcttttaaagatcgtggagctgttaagcagtgcaagcgttttcgcaatcaaacctgctgatcaaaaggctgcctcattcgttggccaaagaagcatgacggctcgttagtgccttcacatcccgtcctttttgtgtttttgttgttgttcacttacgtagtactccctccgtattttaatgtatgatgtcattaactttttaatcaacgtttgaccattcgttttatttaatttttttgtgtaaatataaaaatatttatatcatgcttaaagaatatttgatgatgaatcaagtcacaataaaataaatgataattacataaattttttaaataagacgaatggtcagacgttgaataaaaagtcaacggcgtcatatatattaaaatatagaggtaatactatttatacatgtgtctctgattgctggtagaatactactacttgatactcaaagagcaagattaatctttggctagtatcacctttgcagttgcaggctacatcagccgtggtgttaaaacagcaaaataatgtagtactatatttatcctaaaatatatctatcttagatgagacttgttctagactgctacttttgaaacggatatagtagcattttattttacatagcgggtacattggcctttatttcaacagaaactataacaacgtaacataactatatatgtttgcatcacacaagtccacagaatcgatgcccagtttcagaatgccaatgtaccaactgcttgtgcatagggaaacaaatgaatctgtttgttcgtagtcgtagacgcatcggcggcaaatggtgcagacctgcgagagtttcttcttttctgttttcatttccggccacacggtgtgccacaggagttgtgccgcggagaatcaccgattcgctttcggcccaggccgaagggatctgctgcgcttgtgctcaagatggatgggattttgtcagagaggtggacgtggaatgggccctgcgctgcagctgggccttgttaccattggcctgtataattaatgccacctttcggaagcatttgagggctggcccacaatgcatgatatactagattttttttgcacgtagtactgaactttattttatgcacacaaatcgctctagattttgagatttttggcagccgaaatcccattggaagaatattcttgtaatgaaaaaaacataattgagctaacttaaaagagtaattatttttataaaaaattatcaatttactatatattaaaaaaatacggcaattgtatatatactccctccttccctaaatgtttgacgctattgactttttttaaatatgtttgaccattcgtattattcaaaaacttttgtgaaatatgtaaaactatatgtatacataaaagtatatctaacaataaatcaaatgataggaaaagaattaataattacttaaattttttgaataaaacgaacggtcaaacatatttaaaaaagtcaacggcgtcaaatattttgggatgcagggagtactttttatcagaaaactatagctttattttgacaggttctagactctctcatcatatacacatgaaatacttatatcggtgtaagtttaccccacatattgtgcacccgtagtagataaaattataattttgtaaaaaatcaattgttattgttgttgttatgtgaaaatacccatctaaagttgtgacaaatgatttggaaaaataaagttttaacataataattgcacgaaatggttgatgcattgaccattatatcactaagcaagtcatcctcaaaattcaaaacgattgcaatacagcaaagcgagcatagctcaactgatttgattcattacggtgcgtagaacccatacatttgggttgaagtgctaaacttggcacgtgtactcacatttacgattaattactcttttagcaatatgcgatgtactgcttgacataagaacgcttgtggtgactttatcaatcctatgatatatcagcccaatatacaaaggtgtctatatgggtaatatggcaacccaatctatcatagggtacaaggccctgatgtgtgcgcgggtgtatttagagaggcactatatggtgactttataaatcttaagatacgccaacaaaatatatagaggtgtgttcattgtggtgaatgtggtgagtttatcaatatctcatgggatagggtatataggtgtgtacggtgactttatcaatctcaagatgtgcaacccaatatatagatgtactcatagagttagattacgtgtcatctgtttataggagagtgtgtgacttcggtaatactaagatatgcagatatggtctttataggtgctcatagaggtaaaatgcgcatgcatattcatagagctgagtatgtgcatttgtttatatatgtgagtgtgacttcgataatatcaagatgcgtcaatccattcgttgtagttgatcataaagataaagcgtgcgcgtttgtatgtctactcaggagcggagctagagtatatgaggggaacccgataagaatttttttaagctatatatcacctattttcactatgtgtgcactcttctcaatacaaacttagatatctaaatcatcttaaactctatctaaaatagagtaaaataagcaaatgatatattctccatttcgttatagctctaccctgtacctactctgtataccatgttgagaaagaaaaagagatgccaatgtaagcggattaaaactccacattttcagcgaagtggatgtaaaacccagaagatccaaacatgccagaaagggggaacaagtacagtcgtaccataacaaccacgagagcgaaagttgcagtcatccacatggacgtgccccctgttcgtcacccacaagacacaccaccaccaccatcaccttcacgccaaagcctccctctcccatctctccctctctctccctcccctgcgcccatagctcgcagctttgcagcagccaagccaagaagccaactcaacccatcagaacggcagaaaccccagccgcggcgttggttaaaccacagcaaagcgtcgttgatgcccccgcgcggacgcctcgcctcggcgccatgacgacgaccaccaccactcgcctcctcctcgctgccattctcctcgcggtggccgccgccgacgatgacggtgggtggccgcgtgccgttcccttttgctctgctcgcctgcgtgcgttggcgagggagggagggagagggaaggatgatggattatagtggggagggagggggttgggtttgggtggcttcgtgttttggtgtttttttagtgctgcgagtgcgcgccttttggtctttgtttatgtcttgctccctattggccggcgccgcctaagaatggcctaatactagattaatcccagcctcctgttcgtagcatctcttcttctgttcttcttccctatccaggggacagttgctgtactttttttttgttttgttttttaaatgcggctttatttttgaactatttttttttctgttttgtttcgttcatggataaggtttctatattgttcttggagatcaaatgctcatttctgaaatgccgccgctgtttgtggaagtttagggagtgttttttttttgtgtggggtttttggttatcgagttttggatccggaaatggttttaaattattttggaagttattctccgattcctcctccgaaaccagattcctgtttcctcgcgatgtttggtacttcgattctgctgtttatcaatctggtttgctcttgcgtgttttccaggacaaacgctactggagatcaagaagtccttccgcaatgtggacaacgtgctgtacgattgggccggcgatggcgcgccgcggcgctactgctcgtggcgcggcgtgctctgcgacaacgtcaccttcgccgtcgcggcgctgtgagtttcctgccaacctattgcttggcttgcctggctgcagtgcccgtggttactgacgtgttttcttgcggtggaatgcagcaacctctcggggctcaatcttgggggcgaaatctccccggccatcgggaatctgaaaagcgtcgagtcgatgtacggtggcacgttgtctcctggaatgaaatgtttctttcattcagctgcttaattagtgtgctcaactcgttctccctgtttgtttgattacatatatgcagcgacttgaagtcgaatgaactttctgggcagatccctgatgagattggcgattgcacgtcgcttaaaactctgtaagtgagattcagttttggttcgcagtgttgttttgaggatgtagaacagtagaagtaatgcgtgccgcaaccctcccctgttcttttattcaagggacctgtcctctaacaatctaggaggagatataccattttccatatctaagctgaagcaccttgagaacttgtaagatttaccctgctgaaacttggtggaggagaagtattttgcagcatttctttcatcgtaagcactgctgttacttgaatatataggatcttgaagaacaaccagctggtggggatgatcccgtcgacactctctcagctaccaaatttgaagattttgtaagttgcggctgaactgttctgagggcttaatttggatcaattctaatgtgatatatgccccagggacttggctcaaaacaagctaaatggtgagattccgaggttaatctactggaatgaggttcttcagtacttgtgagtactaagtagtcgatgattctgttccctactttaaaaaacttcttttttttgtttcagtacttaaactgcagacaatatgtaggagctattagtgctaatcagatttagtttgtgtaaattataggcggttgaacatatgtaatgtagggcaaatagttcggtaagatcatattgtcatatccaattgtgctaatctgattttcatatgacaggggattacggagcaataatttagaaggaagcctctctcctgagatgtgccagttgactggcctgtggtacttgtgagtgtattgcttccttttgtttattattagctctacatgtttgttttctttgttcctttcacaaacttgattttgtttgacttagtgatgtgaagaacaatagcttaacgggtataataccagatactattgggaactgtacgagctttcaggtcttgtatgtacataccttctactccttctgaattatgtgtccccctttctttgacatgtcaatcattcctgaccttatggtatttttagggatctgtcttacaaccggctcacgggagaaatcccattcaacattggcttcctacaagtggctacattgtatgtggtagtcattttactaacaaaaagagtatccaacctgtcgtaattaatgaaaccaactacttgaactgctatgcactattttgtaccaggtctttgcaagggaacaatttctctggccctattccatcagtaattggccttatgcaggcgctcgcagtgctgtaagtccaatgataattgatgtgcttgtcttaatttatgggctgagagtgagaggtattaccatagcccttgaatgcaagttttcacctgtaccttctatttgttgatacagtgatctgagtttcaaccaattgtctgggccaataccatcaatacttggcaacttaacatacactgagaaactgtaagcctgcccttgtgtgtgtgttttcctagcctttgagaaatataatattcttaattatgtcaagaagttaacatcatagtatcttgttttcttaggtacctccaaggcaataggctaactggatcaataccacccgagcttggtaatatgtcgacacttcattacttgtaagcctctacctttaaaattttgttgcttcttgattgttaattgattagcgcactaccctcttttgagacaatatctggtttcagagaactgaatgacaatcagctgaccgggttcattccgcctgagcttggaaagttgacgggcttatttgatctgtataactctactcatcctttatcaattgatgcttacctggaatgctaaatcagtcagtggaccatatcatttgtttttcacaggaacctggcaaacaacaaccttgaaggaccaatccctgataatataagctcatgcatgaatctcattagcttgtaagtttcatttgttctcctgaagttctatatcctctccgatggcagggcacttaactttagctttgtaacagcaatgcttatggcaataaattaaatgggaccgttccacgttcattgcacaaacttgagagtataacttatttgtaagtgttattggttttaggtgatttttcttcaagcctgctataaatttagttctgttcatagtgtctaatgatttttgttttcatcctaacttctaggaatctatcatcaaactatcttagtggagccattcccattgaactagcaaaaatgaaaaacttggacacattgtaagtaccagaagttaatctgcaattgcttttgaataagtgattctcatgatatgacgtgtttgctggatatatttgaagggacttatcctgtaacatggttgctggtccaattccctcggcaattgggagcttagagcatcttttgagactgtaagttctataatattactccttgttataaaaaaataaaataaaatacttgtatcatgtcatgacagcattctcttattcctaaagaaattttagcaataataatttggttggatacatccctgctgagtttggaaacttgaggagtatcatggagatgtaagtaccttctcacctaaatgcgttgtctgctctgtacctttgggagtaatgcagattcctcttcctctgttttagtgatttgtctagtaatcaccttggtggtttgattccacaagaggttggcatgctgcaaaacctgatattgctgtaagtctatgttttaccctctatcctataaagtagtattgcatggtttcaaaaggctgtttgcattggactgcatattaatttgagtattctgtttctcattactgcatattgatttacgtgaatttttttttgtcttttttcagaaaactggaaagtaataatataactggggatgtttcttcacttattaactgcttcagtctcaatgtcttgtaagttatacacttgaaaagcaatatgaaatgatttcacacaattttttttggccatgaacctgtaagcttcatactgatagtgtgttactgcagaaacgtatcatacaacaacctggctggcattgtaccaacagacaataatttttcacgattttcaccggacaggtattttccttggggattaatcgatcgcttgaaaaagaactcgtaatacttaggcatctcaggcctcatcaataatctgatctttaattcagcttcttgggtaatcctggactctgtggctattggcttggttcttcgtgctactccaccagtcatgtgcagagatgtcagtaaaatgttacagctgttgcgttgctccgaagtgtaacttcacactgataaactttctaattttatatcctggatttttatgcagcctctgtctcaaggtctgcaattcttgggattgctgtagctgggcttgttatcctgctgatgatcctagctgctgcttgctggccacactgggcacaagttcccaaagatgtgtctttatgtaaaccaggtgatgcatctgcagaggtcccagtccattgattttacccatcaatttcggtagctgtttggcaagtgtcctctcgtcacactcaaccttgcaaatgatctattacatgtctcagactattgcatatgttcgccctctacttgatagatgcatttggttgttaacagagtgatattattattttcctgtgatagatatccatgcactaccatcaagtaatgttcctccaaagcttgtaatccttcacatgaacatggcattccttgtgtacgaagatataatgaggatgactgaaaatttgagcgagaagtacattatcgggtatggggcatcaagcacagtgtacaaatgtgtactgaagaactgcaagccggttgcaataaaaaaattgtatgctcactacccacagagcctgaaggaattcgagactgagcttgagactgttggaagtatcaagcaccggaatcttgtcagccttcaagggtattccctatcacctgctgggaatcttctcttctacgactacttggaaaatggcagtctctgggatgttttacatggtaagtgaattttacatggcaaacaaatacataggaactgtaagcagaatagttggtatttagaacgattgttcttctggtttgtatagccgttgcctgttcatctgtcaacaagcaccacctgatcactttcatatcaacttgtttgatggtttaatattatttggattaggatattttcatggaacataaacagctgataagatttctgcaactatagcctaattagcaatttctttattattttagcaggctcatccaagaagcaaaaactagattgggaggctaggctccggattgctcttggtgcggcacaaggtctggcttatcttcatcatgactgcaacccacggataattcatagggatgtgaagtcgaagaatatccttctagacaaggactatgaagcacatcttgccgactttggtattgccaagagcttgtgcacctcaaagacacacacatcaacctatgtgatgggtactataggctacattgaccctgagtacgcatgcacatcccgcctcaacgagaaatcggatgtctacagctatggcattgtcctcctggagctacttacaggcaaaaagccagtcgataatgagtgcaatctccatcacttggtaactatttttccattcgcttgctactgtttatttgaaaacttgttcctttccttcaccatatactcttgcatttgaggttcaataagtgcacaatcatgggcattatcaggtctgtgttccttcaaggggaccacgcatgaatcctaccatgtgagtagatctatatacactgtggcggacctggtagtgtgtgattcattgtatggctggtgaaagctctatcataacttgccagtgtcccataaagcctgccatatttgtcccccgccttcaatcatgtgggtgaacatttacaggcaacacacacctgtcaaaaactgtagctaactatgactgtactagttattttgatcactgacatgctggtaacttatcggaagaatttaccctgtcaatcctgaacatctctttttgaaagaaaacggcaaaaggtgaattaaaatttgtatttctaccagcccacaggtccagtacggaatagtgcaactgtaaacagtcgattttagcgatgaacttcctggtttgcatgaatgctgtttatgctcattggttgcttctctgcagatcctatccaaagccgcagacaacacggtcatggagatggtcgacccagacatcgccgatacgtgcaaagatcttggcgaggtcaagaaggtgttccagttggcgctcctttgcagcaagaggcagccttctgatcgaccgacgatgcacgaggtcgtgcgtgtcctggactgcctcgtctaccccgacccgccctcaaagccggcactgccaccggcattgccacagtcgtccacggttccgagctatgtcaacgagtacgtgagcctacgaggcggcagcacgctctcctgtgaaaattcgtcgagcgcgtcagatgcggagctcttcctgaagttcggcgaggtgatatcacagaacacagagtagagtgactatctgaatatcctgatggctttgtgctttgtggcgttggcgttctagctaagttaccagcttttgtgtccttcctggaataagaagggacaccgacgaagggctggctattcgctgctgtaaatatgctgtcttctggtttgttaggccttcggaaagctatttggccttcctgttttgatcagtttttcttcttatcattattagttagtggggtttggatgaggtgaactgtattaaggcctcctgggagtatgaattttgtaagcacgggtcagttaaaaatatcgcagtgatcgggaaaaatccgcctcttataaaattggttttgttggataatcgcggatttttcagtacagtaaacgatgttaagaaccgctggcttgtaaagctgggagcctgggacatcccagaggcaaaaatgggtgctggtaatgatcatccgtgtggatgcatagtctgctcgatcagaatgctgtttataggtctcaggaatcattctcggtgataggctgtgttgcagagctttgtccagcgctgtcgatgtatggcacagtttatgtcactgtgattcgctggtgactagtactagtaacagtaacagtactagtaagggcctgtttggcacagctccagctccaactctacccctcctggagctggagctcagccaaaaagtttcagctccaccaaaaactgagagtagagttgggtggagctctctcacaaaatatactagagttgtagagctgggtttaggcagctccacaactccactccagactcaactcctggagttatatttaggagttggagctgtaccaaacaggccctaagagtagttagttaatggtcagtgacccactttttttttttgctgtgttcaatactctccctctcatcctgccatttgtttcagtattgaagtgtgtttgagtagaaggagactgaggagattgaaaagatacgcaaaacgaggtgagccattagctcatgattaattaagtattaactattttaaattttaaaaatggattaatatgatttttaaagcaactttcttatagatttttttttacaaaaaacacatcgtttagtagtttaaaaagcgtgcgcaccgaaaaggagactcaatctcccctatcactctgaatgaacgaggccgaatggctacccggccatgtctatcacaattcacaagtagtagggggcatggagtacaaatttactgccctttgtagtacaaatttactgccctttgtagggcccctctccccctgacggatgattgatggtatagcaagcgatgtcattcaagcacggctccatgccatggggccaaaaaaaagccagccaggcgcggcgagctcctcgtgatatgcggggctcgtggagtaatggcgctgcgcgcgcggcgcgaacgcaaatgggatgccctttccgttcccgtccggtttagtacatgctgccgcggccgcgaccgcgacgcaacacgccctgcggtgcggggtcggcgccgcgacgcgctcggatgggatgcggcttttgacagggcccgtggcccttcttcttcgtccgtccccttctcctgggccggaagaaggcccatcacaggacatcagtgtgcctctgctggttgggctgatgcggaacttttgttgggccaggaccgcaggacaccggtaagggtctgttcggcgtccctggttcccgaccgacgcacagaaaacgcagtcttaattaagtattagctaatttttttaaaaaaatagattagtttgtttttttaagcaactttcgtacagaaattttttcacaaaaaacactgtttagccgtttgaaaaatgtgagcatggaaaacaagtgagaggagttgggaaaaaggggtgccaaacaggcaaacacagcctgttgtgttcttaccctatttctcaaacccacctcttttgttttccgcgcgcacgcttttcaaactactaaatgatatgatttatgaaaataaaaagaaaactttatatatgaaagttattttaaaaaatcatactaatctatttttaaaaatataataattaatatttaattaatcatgcaataatatcagctttgttttttcgtccggggaacccatcctcacgaaaacactcaaaacagcctagtagtaacgtggtgtgccgtgtaccattgattggaccggagagtatcggacacgacccatgttacgtactagtatgttcggtgtagaggacgagagatcacctcagcaatttttcctaagccttctggacctctgtgcaaatagtaactcattacgacatcatccttgttcggtgttgaaggccatcatccggctgacggttcgtcggcggcggcggcagtatgtggaggcggggaaggggtctggcggcagggaaggaggagtccggttgcgggcgcgccgtcgacggcgagaacaactgtgggcggtggccttggccgaatcgctgaagggacaatgctgttgaccgacgacgatccttcttgtgcggattggtggtgtgggtttggacaaagaatcgcgggcgaaagctttgccgagccatttggctggctgacaacggcaacgccgtttggcgtcgttcccatccttataggcgttgttttagcatacccctttcctttccctatcatattctccgggtgaaaaccttgcttcggttacgaacgagcggtggcggcgatccacgtcgcatcctccttgggagcaccgctttggagaaacctctttgtgcaaagatattgtcattggtctatgcattggcttcgaacttcagtcttaggccttgacgaggccttctagctccacattttgttttgcttttctcagtttggatcatctcttctcttgtttggtgtgttcaacttgtcttgaagaactatattctcttctggagtggatctttataataattagttatagttctttttatcaaatgtcgggatattatatttcattatctaaaaaattacgacatcatcaatccattcgtccacgcttcacacggtagtatggtactcgtagtcgtaggctcgtagtacgcacatggtttcagaggggaaaaaaataaaggaacaattgctgaaaagaacagtttttgttaccgtggagaggacggttcccagaactccacggaaaatacagggagttacccgcaagtgaagaaaacgaaaggcgtagccagaaaagaaaaggaaggaaaaaaaaaggttttccttggcgtgcacagcttctccaaaaaaaaactgtccctcccctgcacggctgcacattgaacgcaaagctcgcgacaccaatcgcacgtgccacgtggcgggcatcttgaacggtgggacccgatgtcagtggcaggatggcagtctcctcgtcctacgtggcctcgcccgctcgtgggacgaccaaccgtctttaagaaattggtctcaagggcaagacggtaaacttcgtgactggtactggtagtagagaaattaattaactgtcgtatttcgaaaacctcaagagcacactgggcatcgtgacttggagcgaaacccggcgggtttggtgggtccggttcttcctttgaacgcacttgggccgtcggatcaaagtggtcgtgttaggaccgacggttagggacaggggcgtgctgttttcgtgcagaaaaagggtaatcctaggttttataattctggagttttgcagggtttatttgcctggtccatagtttgtgatcttttcatctaggagtatataggatttaattggttttttccgtgtttaattttcatccaaatctattcacgttccatcggactaatttttagcaaagtgtttgtttatgagttgcactattggacttcacctctagctcgagttgaatttacatcctagctacgctgggacgagcccaacctagttgatataacctatagcgaatccacgttaaaagatactactacatccgtttcaaattataagactttctaacattgcacatattcgtatagatgttaatgaatctaggcacacactacaacaaaaacctcgtatagaggcacttttgtagaggcgttttgcaaattgcttccaaaattagaagttttatagcgtagagacactttatagaggcactttaaaaattgcctagaaaacttttactctagagacatttttagatcagtttgttagattttatctcgtagaggcattctttcggcactataaaatacgtctaatatgtaaaggcattttgttgatacattttaaactatgtagagacactttttagaatgataatgtgtactaaaggactaaatataagtaactaaaggaacaagcatataagtaatgacatggagttgagttggttagtgtattgaagattaaaatgatttaacgaagagattatgagttcaagacttgtcaaaagcaaggaaactattttattctcttttttggactggttttatatttttgcggtacaatttaatgtctctagaaaatgcatctaccatcttatagacattttataaaatgtctattcgtttgtagagacaattcaccataagacacttattagacattttttaaaatgcctctacattgttgtaaaggcatttaataagtgactctacagtactagaaaaatgtctctacaaagcatttttcttgtagtgacatatatgtctatattcattaacatatatataaatgtgggcaatactagaaaatcttataatatgaaacggaggaagtacgagctaaattagctactcaagtgtccaaaatagacaattttgatctgacaatattatttgggtaggcttttgaaacaaggtgaaacaatggaaaatttggagttatttatgcaaatttgctttgatacattgtagtgcatgaagctcgttcaaccaggttttcctgttctcgtgtatctaggccatgagggaagcacattttggtagaattatgagaattttgttgtacatatatagctcttgatacgatgctcaattcaacaatatgttttcagttattgtactgatttcgtgaggatttcttatgctatattaagttgttcaagtttagtaatataaaagtgccatttcgttgtataaataaactgggttacaacaataattcatgatgatgtccaactattcctgattctccaataggcggtccctctggcatcctcaaatattagttcaataaaactcaaaatctctctgagggtgcaaagatggtggacttttacaaggagatggagaatgcgataatccgtggttgtttgaatgagccagaggaggccgtaatggtgaggttggtgagatatctcaaaggtttggattattgtatttgaatgcatcgttgaatttaagtctcacaacactgttattagttgctataagaaaatcaccaatggatatagtcgtgccattaaaaaaatggacccttagctactggtactacatgatctggtccaagaagctaaagatattttggttgcgttaaaaacatatttcaagaccaatttaagcacaacaagttatatatttaatagcgaggcaaaactggtagctcgctaagtttgcatggggaatgtcttagttctctgttatttttctgcatgtgattttcgtgccgagcgttctgcatactaagcttcttaatttgaagttcgtgttgatgataaaactcctccgggattagatggaaattgagttgtagggaaattctttgtggtactctgaatgccaaaaactaataagaagaccttatgttacaaactagctctagcttatactcatataaaagggaaaccaccatgtgtccatgttactctaaacatatcaaagtcccttgttgtaaacgatttcttgatgcctctgacctcaactagtgaatatagaacagatcagggacctaagtcagagaaagcagcccatgtggccatgcattcaaagtttcaagttggccagatcggcaaaatttcaacggacccgccaccctcgtccgcgcctgcagcgccccgccgtccccggccaccatagccgtcgccgtctcgtacgcccatcccaccccttctcccgcgcccatcccaccccttcctccgcagccgccgccttcgtccgcgttctccgtggctgccgtcgtcgccgccgccgtctccctcgcccccggccgcagccgtgcgttggctgggacactgccggactgccccgtcctcacatggaagaaaaaaaagctgaaagggaaggatgggagcaagaaagggaatagagggatggtgggcggacaaaataaaaaaatatttatgttgcagtaattataatatgtctattatatcagttggctataatgtttatagagggatggtgggcgcacaaattaaaaaaaatatttatgttgcagtaagtataatatgtctattgtatcagttgactataatgcttactacagatgatgtgtccatctattgtagccgatagctggctatgttattgttattgatctcgctcttaccgatcaaccgatgggtccacgtgatttctcccccacacccagaaaaagacgcctctgccctcctggccccacgcgccccacgccaccttgatactcgcgggcccaccactgccacgcgggcggaaatgacgccttcacccctcgaccgttcaaattccgttgccacgtcggcgtgaggattttgatttttgcaatcaccaccccgcgcggcgcaaacatttcgcccctcgcggccacgttttactttccttttttttttggccattagaaaaagtgcacgtgagaagaagcgccaagccacagccaaaatttcggccatgagtcgacaactccaagcagcggccgccgcctcgctctaaccggagtcccccactctctcggtctgccaccgccgcgcgggccaccggcggcgcgccaacccgccgcgcgcgcgcgtctctcgtgctcggctccgccgccgggggggaacccggcgggggctagggtttcggcgagatgagctaccggaaggggttgaaggtgtgggtggaggagaaaggggaggggtgggtggaggcggaggtggtggaggtgaaggaccgggccgtcttcgtgctcacaagccagcggaagaaggtgcggcaatccccctcattccgtgcggtttaagtttgtgttgtactgtttgggatttttcgtgggggcggggtgtgagcagagacagggcgttccatatgagtttgcttcgagtattattcgagacgattgggacagaggcttgttttgttattagtttgatcatgggttgacatcagtgaactgaggcagttcaaaattctactaatacagtatatattttttgagttgctctggtgtaaactttgcgcgtcagagtacagggagaaacaactgattcgaaatggtggaagttgttgttacagatgtttaatttgaatctatcgctaatttacacaacaaattcgacctggttctggtggggcaccagttcgctaaaggggagtatttgaagtgtaaatggtagcattcctggggtactttaatttggattaaaattttgaaatcctttgccagttggttttagattttgtcagcttgtttgtaattttgcagaaccagtttgaagcttcagtcagagtacttctatatagttgtatgaacctgtaacttcacttgtgctctgcaatttacctggattgtatgagccgtgaaacataaatgcattgacatcaataactgaggacgattatcaacattttttttgtttacttggaaatcgctgtgctattagttaaaatttaactagttttagatgtatctgtattatgctatcctttttggtttgcaatgcactgctttaccaggattagtctcccttcggctgttgattttgtagttgtcctggcattctttataattttgtatggcaggtggaaatttgttttatcaatgaattctgatccactctgtttacacccaatggtctatttgggttctgcacttgatttctggatttcacgccgtcctcggtgaaaacattgaagtaatttcatgttgcaaccaaattatctatacttaataaaagagagtagtgttggtggttctgccaccacccctaccaccaactcccaacttttctttacaaaaatggacgtgtggtgctagagggcccagatgtcaaccactcccaccaagtcctttaccttgtgtgagaaagaaaaaagtacagtgtgggaccaaaaggtccacatgcgagtaacaaatatatacagcaatcaagagatgataataataggttaatgataattttttaattaattaatacaacagtaaaacacatgtcaatattctgcttgctctttgtactttgttaggctgtaggccgtaatctataggaggagaggacattgggatttgggtgagtctgtatgtactttgtgggctggaactcttgaattttccaagcatgtcattttttttctttttgttctttataagacgatagatcctgtttcaaccaattaaaaacaattcttttcaacaaggactttattttgctattttcaatatccgttgcaacacacgggcatttgtctagtgttgatataaccagtatttatttctgtacagaaaaaaatgaatttatagtttttttaaacataattattaacaatttatttgtttttactattaaaatttaatgtagttagtttattcttcctcttctggttttcagattacagttttggcagagaagttgctgcctagggacacagatgaagatctaggtggggggcatgtcgatgacatgaccaaactaacttatcttaatgaaccaggtgttctatacaatttgaagagaagatatgcattgaatgagatatatgtaagttgttcactggctctgttgtttttatttgtcgagtgacttgtctacaatgaaaacatattttgttctgtgaatcatcgactcgttgtcggaatttctttgtaaagatacacttcacttgcaattctctatttatcataatttgtgaccatcaacatactatatgtgccagtgttactttctcataagacaagttcactttggctgtccctatgattagacttattaatgatgattttctttcaacatgtgttgtcttagtaaatacatcttcttttgttttgctgctagcttctctttgtgacagccttttcatttttcttcttgagatagacatacactggaagcatcttgattgctgttaatccattcacgaggcttcctcacctgtacaatgagtacatgatggagcaatacaagggtgtccggctaggggagttgagtccacatgtttttgcagtggctgatgcatcatacaggtttggattacattttgattcagtttaagtgcccttagcctctgtttgcatgtacaatctgttttcatgacatttattgagttaatgtagggctatggtgaatgattcccggagccagtcaatcctggttagtggtgaaagtggtgctggcaagactgagacaacgaagcttatcatgcagtatcttacgtacgttggtggtagagctgccattgacgatcgaactgttgaacagcaggttcttgaagtaagttttacctcctgttttcttccactataataaatggatactaagagttgtgcatattttagtcgtcgaaaatatttctggttggtacttttcaaggcattttctcataactcataagtcttttgtttcttcttactagtctaaccctcttctggaggcatttggcaatgcaaaaacagttagaaatgacaactcaaggtgagtatcactcataaggtgacttgggaaatgttgttacaattatatgcaatagttagggatatattcctcaacagtacacatggttctccctctggcccaaaatatggcaacttctagcgttcaaaacttgtcccagaatatattaacttctacacctactctctcatctcaaccaatcacaaccatttctcattgagtttttccacctatttcctcaattaatcacaaccatcccccatttaattccacctcctttgggacggagggagtataaacgatatttcccagaatatactatggctttaccaattcataggactcaacctttctcaatgttttctttgcatagtcttaatttacaacactttttggttgcagccggtttggcaaatttgttgagatacaatttgatgcaaatggtagaatatctggagctgctattaggacctatcttttggaaaggtcccgtgttgtgcagattaatgatcctgaaagaaattttcattgcttttatcagttatgtgcgtctggaaaggtacctctaccaaccattgctattccatatttggctcactattatgtgcataattgtgtgagttccattactgcacggtttgattatgggctatctgtgaagtcagcattgaatgttgaagaatatgcttagagttaaattatactgataccctgttggcccgttccaatgtagacctcattcatttcgcccatttgagcagttattggttcagctgggatgtgattacgatgacacccatttctgttatataacttataagaatttgggcctgcaatttattactgaaattagttttattgtcaaaatattttgcatatcagagaagaaattgtgaaagatgtattcattgctgcaagacaataatatatccatttgaacttagttttaaagacaagcactaattgtttttaattgctgttaatgagattatcgtaatccacctcattatcaaagccttagttaagcatggagaacatagtattctagaggttgtataatctgtttcaattcagtctattctatctaattgtacagttgattccatgcagttctgagttttttttttttggttttggttttgaattttgcatatgtttgttcatgtaggatgcagaactgtacaagcttggtcacccaaggagtttccattacttgaataaaagtaagacatatgaattggaaggaacaaataatgaagacgagtactggaagacgaaaagggcaatggatattgtcggaattagcagaaatgatcaggtttctacagaatgtgaacatacttagatgttacatggaaaaagaatacctaaagaaaaccagtgcatattatgcatacttttccttttcttatcccagaaatgaatgtgtatattgtactttgttcaggatgctatatttcggatactggcagccattcttcatcttggcaacattgagttttctcctggaaaggaaattgattcttcaaaaattaaggatccaacatcaaattttcaccttcgaatggcagccaaactattcatgtatgaattttatttacatatatgattgtgacccctttttccgctcatcgtcctcatttatccataacaatgactcaaaaattgtatcaagttccaaactcttgattcttgaagcgtttagtttttaatgctccagggcattgaggttatggacgtagatgatttgacctttgatttcttacagacgtgtcacaagaaaagaatacactttccaccctatgttaatgacttactgtaaatgtggattacaacctatggttgataataataaaaaatgacatgtttacgctcctatacatgctatatgcatatgtggatattataattgaatctttttagatattttatttgagtttgtcttgatgaattttgattgcctgattagcaaagtttacaattttgaactgtccgcatttactgttttgacatgcatttctggaaacgggtcatggaataaccaccaaattaagtgagcatgttgataatgtactttaaggataatgcatgcatggataatatcttgttatgcctaaaatgtccttggtcactatgaatcatatattttccatgtagcagaaattatttaatgctctgggaacggaagtagctttccacagctttatttgttccttatcgcttcattttttctatttgaattaggtgtgatccagatctgttgatctcaactctatgtacccgctccattaacactctcgaaggagcaattataaaagcattggactgttctgcagcagcagctaatcgtgatgctctagcaaagactgtatatgcaagactatttgactggtattttcacatgccttcttttttcaaggatactgtgcatttttgtaagttaacattctttaattgtttccaggcttgtcgagaatattaacaaatctattggtcaagatgttgattccaaagtacaaattggtgtcttggatatttatggttttgagagctttaaaaacaacaggtaattaagtattctgtcatttagtttaactcactcactgcaattttatagcattccataatttagtttaactcactcactgcaattttattatatttgatttgtgaatatactattatcaaataaaaggtgtcatgttttatgtcagcatttctgttcacaatgcaccaatttacagtaattttgtgcctttttttcttgcttggttaggctggccttttaaatgtccacaagccgacaagctatttagtatgttgaaattactgtttgtgctgccaactaggcaaaattgtgggaaaagtatgggatgtttaactgctgcattttcgtctgtttcccttttcctgatgaatcatcctttatttattgctgcagttttgagcagttctgcatcaacttcgccaatgaaaagcttcagcaacatttcaatgaggtatagtgcatcatttgctctttaatggaaacacaatattaatttgtacttaaatatttatgtaacttttgtttcttatcattaaatactgcaaatctgtttcttcagcatgtattcaagatggagcaggaggagtacaaaagcgaaaaaatcgattggagctacattgaatttattgataatcaagatgttttggatttgatcgaaaaggttgtcttggcgaacttatttaccaagttcaatatggacaaatcactttatgcttagtaatttgttttaatattgtaatagctaccttcttttttttttctctgtatcaacttgtttcttcgtatgccattttatattggtcagattgccaacttgcatttgcatataatgacacctttacaatttagttacttatgtcttagagctggtattatgtttccctttgtgctagtgttggtggaattagttactgatgacattagctgtagttgttgagtgtttgacacgttcgtccattactagcaccaacctgaccacagtactagcatgccacatcccgctaaagcgttatcacatattgtcatcttttatagtattataccgggttctaagcacacaacaatgatgttaaagcttttgcgatgtattagaagaaacttcagctaggcttgacagatcttatttattcatgccattactcctaacagttcaaacttccataattgaataactagaaacacatagacttgaatgaccagaacaaacattcaagatggcttggattgtagaatgcattaatgcatacaactgttgcacttgcaaaatgtccgcaagcccaaagagccaaaacagcacgttggtgatttcaatataattatgcgatgatactattttgtaaaaatcttgacaaaatatgcttatcgtggcaaacataatttgcttctgcaagctttaatatctactgcatcgaaagtgtccggtgcggtaactataaaatttatggttattagtgttcagattatatctatgttatgtttgggactggtgcatgcttgtgtgagacagtttgctgtgcagtaatttttgattggtgtcgcttttgaaatgctattttgctgttggaccagcacttataacatatttttggcagcccaatgctaattcaattgtatgtacttgcagaaaccgattggaattattgcactgctggatgaagcttggtaaatcgcaatttttatttttgctggaaaacagctgtttttattaacaaatagataaccattctaatatatgttttttattttccagtatgttcccaaaatctactcatgagaccttcgcaacaaagatgttcagaaatttctcttctcatcataggcttgagaagacaaaattctcagagacagattttgttatctcccattatgctgggaaggtatgttaagtaattttaattattttttcctgtatcaggtatcaacaataacaaagtcgaccttttgcaggtgacgtatcaaacagaatcgtttctggagaagaatcgagattatattgttgcagagcactgcaatcttttatcttcatcaagatgccctttagtttctggactttttggttcattaccagaagaatctttgagatcgtcatacaagttctcatcagttgcttccagatttaaggtatcagcaaaaatttctttgcttcttggtctttgaaatttgtctgcttacatggtttatttggtcacatgtgccataagatattatttactctagaaaataatgtggttaaatgcatctacttccaaattatgatctaggtagtgatgaatagtgtggcagatgtaaggaaaggaacaaaaagaaaaatctctctccactatcccacctttgcaagggattttcatgtaaaggggattgaacttgttagaagctatttttgttgtatcatagcaatattttgcatgtgtttttcctccaaatattgctgtttccttaaaaataaaaaaaattacagtacatatgctcattgttgatttatataggctgatcttcacttttggaaattatatgtttccttgaattccatttgcagttgcagcacatgcagaagtttgaaccgtaattgtactagctttgattgttttattcatttcctttcattcctgtataatggttgtaattaaggcactgacttgctatattttcatttctcattgattgccttggattgtattgaaaccataacatataaccttcctaactgcggtattatattcattctctctgaagcaacaacttcaagccctcatggaaaccctcaactcgacagagcctcactacgtacgctgcgtgaagcctaactctgttaatcggcctcagatgtttgaaaatcagagtgtcctgcatcaactgcgctgtggagtaagaacatacgccttaaacattaaacacaaaagcaatagtatctgtttcttctgcataaatctcttgaaaagcacatctgcccatacatcacgtcatcacctcttgagcagcacatctgccttaaacattaaacctcagtttgctgttggcagtatggcactatgaatgtcgaaatgctaatgttcattgtgggtgcttcaagttatacctttgtgcaatagatgagtaaagctttttttggtcctatgccaactttcccaattcattgtgcaacagatgagcaattcctttgttaattgttggcactagcggatgatttgttggccatatgccaacttacccaattcattgtcttggttcatgctgtactgtttggacaggaagctatcatgtgacttgagtaggctatagtcacatgcaatccacgcttttgtgatcatgtatatggagccacattcataaaatcacttaataagatgtttactctttcgtaactgtatattggtattatacatcgtggtatgcttttgctttattgaactatctctagcaatacaccagaaaactccttaaattgtgtgactatttatctcaagctattcatcacttttgaagttttaattccatttgttgcttcatgcatgaactggtcaatgttccttgaagattgtaacttggtcatttgtcagggtgttttagaggctgttcgcatcagtcttgctggctatcctaccagaagaacttacgctgaatttgttgaccggtttggcgttctagttcccgagttgatgcttggaaggtatgcaatttatacttcattaagttaattttgagtttgtgcttcacattgtaagttgcaatggcaactttcttcttttctttttacggttttggcgatcttaattacagctgcaaatcattccatttgttgttggtgcagtctatagctgattcatgttccatctgttttggcctaaacagttagtaggtttgttagatctgatataaatgttctccaacaaacaacacttttttgctcaacatcgtggagctgatatctcttgtttgtacagcaacttgtatgtgtgttaccgataatgatattttagccattcatggtgctactttgatccagcattcccctcatcaattagagtaggccaaaccaaccaatggatttttatggcattttatgtaatcccgttattagttaatgggttcagcgctagcctagcagtttgaattaacatacacaattctggagcaactcaaacacacaatatcttttcaaatggttgccaactttttgcctattcgatgctaaattcctacatttactaccctctttcctatcctggaatggcaatctgactataagctttaaattgttaggttttgcgtgaaagtttggagggaatttatcaagggccattgggaaaaaggagctgcttatttgtttgtttttgattgcattaccttatgtgatgttatgtttaactgtgcagttatgatgagagggcattgacaaagggaattcttgaaaagatgaagcttgaaaattttcaagtaatctactcaacagattttatattactgtcattccctaatatttcttgtttatataaagagtaaatttcacaaaactacatgttttatggttcaagttgtagaaaaccacacacattttgatacttagcacttaagtacatatattttggtagtttagtttcacaaaaccacacta

SEQ ID NO: 5406 - DNA, 24541 bp, Oryza sativa
  unsure (1)..(24541): unsure at all n locations
tagacaccataggtcatggcactcatacttcttccactacagtcatgctgtcccgaatgccaacctctttggtttggccaatgggattgccaagggcacggccccaggtgtgcgtatagccatgtacaaggtatgttgggaatattacatacccgaatgcattaccactgacatccttgcggccttagatgagacgattgctgatggcgttgatgtcatctccatctcacttggtaggcccggctaaattttatctctatatttatttaacaaacgtgatgattaggagagacgatatatccgaagatattgagaaattttcacctgataataatgcagccactaggctcaagtaatcactgctagtgtactactcacggtcacatacatgggcaataacacacgacaactcgtctctttggccagttcatgtcgttgtttcttcgcgtcaggggagcaaaaagtcattagctgttcacgttcaaaatactcgaacaagcgagtgccatggatttttcgttggttcgttgtcagttcgaaaggattacaacgagtagaggcgcgcacattcgtgccttcatttttcgttggcttttactgtagcaacagagatagattgacaagcacgtaaaattaattctgatgcgcgagtccatttcaattctaacttagggcgactcgttttcacacgagtaattaacttagggccagatatcctcgtccctgcgagtcaatttcatcgtatcgcgcactgtagattgtaccgaggattgcaaccacagcgaccaatggagggctgcgtagcattttccatctgcaattgacacgcatgaaaaatcccactatcagatcatcaatccgacgggtccagtaataccaacctgcctgtcagctagctatgaatgattattattccaagcacgtgtttatttgcgtcatatcgcatcaaataatattagtgaatgattgaatttggcgatgcggatgggggaatatcaaaaagaaaaaaaaatgctaaatatctgctacctccgtaccataaaaaacgaatctaaaatcggatgtgacatatcctagtactataaatctaaacatatgtatgtccagattcgtattattaagatatgtcacattcaatactatgttggttttttatgggacggagggaatagctgtagaattttcccattaagagtttgtaacatgacgacctataaatctacatgctccctggttaatctacaatgagattgtgaacaatgacatactcccatgtcgtatttctcggtgatctgggaagcaaaggcacgtctcccccacctcatcagcgcggctcgcctgcctcgccaccgccgacaacgctgccccctgcggtggtggccggcggctgcatcgtcccctccttcctcccctttcctccctctctcttcctttccccttcttccttccctatctttctcatttcctctttttctccagatttgaggtgactcatgtggacgtcggtcctgagcttggctctcctccccacgtccgacgccaacggcctcccatcccgggctagcggctgcgttgaagatggtgggggggacggtcagatctggccaccctaggtctagatctggcgtctctctgatgggatctaggtttctctctggtgcgagaggccagatcccctgttgcgatgatggccagcggtgctagtgatggcagtgagggggacagttcgatctggtccctctccaggtctggcacgtcccagggtcgggtgaggccgtctgtttagccatgtatttgtaatataatagattgtaacgtgtactaaccacgaagataacgagttgtgtgcaatgtaccatgtttgattggaacactaatgtggccttctgccatcatcgtgcataggagcggatctaataagacataacatgtgggactgaacaaacttgaaaaactttagcccggtccttttctatggatgtatgacaaaaggaagatagggcttatatggaggctcttatagtcccaacgtcaaaagtaagggctcgagcccctctgtccctatgatagatccgtccctgttgtgcacctcaagcgtcggaatgccatcgatggtgaattctagtcatcctttggagtaaaggatttttacgggaattgactgatttgtatgagaataatacaaaattgatgtgttgcaaagaagccctccacctttgaagacggacgtgattgatggctagatcaaatttcacaatgttttttaatagtataacaaaagcagataatataaggtcaagggaatacctaagcctttagcatcaagtcttggaacaaaaaatatttgaacggttctatttgaggcaccaatttagaatgtataatagaagatattgccatccaaattaaaagaaagtctaaatacacccgtgaattgcaggtaatgtcctgctttttgtcaattctgctttagggcattcccaacccaatgactaggatgatgtccatagcattaaataagttaccacctaggataaaaaataatgtggcaagtgaataaatgaggaaagagaaggaaatcatgtcttgcatgagacatggtttctacacaatatccaagacatcatgtgagataaatagcattaaattgaagtatggaatagtggtgtttgcattggaagagtagtgtctagtactagtttcttgatgatgtggagtttatgaaaaccatgtctagtgttatgggttgggattgcccttagccttactccctcctttccaaaagataagctgcccacaattttagaaaaaataacatttgtaactattaactaatagtaagctaataatatgtatatgtagaaacatgcatatcatatctttagattcatattttaaaatagtttcatataatgttaatattaattatcgataatatattgtgaaagaaattaacgtttaaaatataatataaaaaatacgcatgtcttgtagtttggaacgaaggtgaagggagtacaaacaactctgtggactaagcacattacacacaccaccgtcattacttgtcttactagccagaggccttccaaggccggtaagatgtataaatttgcttggccctcgcctcccactgatctccacacacaagaactcactaaaccgcttaattactaccaacatttgcatcactgcatgatcaccccaatggccaaaccaccagcaacaacaacgctcgtcctatgctgccatctcgccgtggctgccgcagcagcagcgacatggataggacatgacgatcagcaagacgacgacgtgtccacctacatcgtgcacgtcatgcccgcgcacgcgccacgcctcgccacgcaccgcatcgcccgcgaccactacgcccccttcctccgcgagctcctcctccccccgcacgtcgcccgcccgccgccgcgcctcctctactcctacgcgcacgccgcgacggggttcgcggcgcggctgacggcgcggcaggccgcgcacctcgaggcgcacccctgcgtcgccgccgtggtccgcgacgaggcctacgagctccacaccaccctctcctcctcgttcctccgcctctcgccgtcttccgggctacaggcggagtcgaacagtgccaccgatgcggtgatcgctgtcatcaacagtaccatgcgtccttcgtatcagacccgtctttgtccccaacaccgcctcctacctttcgtggcgaatgtgtgtcgactccagagtttgatgctagcatctactgtaacaacaagcttgtgggtgcaaagatgttctacgaggggtacgagcgtgcgagtgggaaaccgatcaacgagacggaggattccaagtcgccactagacacgacgggtcatggcacccacagcgctgccattgcagctggctctcctgtgtcggatgccaacctctttggccttgccaatggcgttgccaagggcacggctcccggtgcacgcatcgccgtctacaaagtgtgctggaaaatggggtgcttcggctccgacgtcgtcgccggcatggacgaggcgatcgccgacggcgtcgacgtcatctccctctcgctggctgtcaaccgcaaaagaacttttgctcaagatcccacggccattagcggcttcaatgctgtccgtaagggcatagttgttgttgcatccgctggtagcggcggtccaaaggaatcaaccgtcaccaacacggcgccatggttgttgacagtcggtgcatcgagcatgaaccgccaattccagacgatcgttgtgctcggcgatggccagacattttctggcacatcgctctatctcggcgatacagatggctccatgaaatcgcttgtctttggtggtttcgccggctcagccgcttgtgaaatcgggaaacttgatgctaccaaagtcgctggcaagattgtcctgtgcgaggcggacaggtcttggatgcggagaaaggagtcgccgttgctcaggctggtggattcggtgtcatcgtgtctagtcgtagtagttaggtgagtatgctaaggccactgcccatctcaacccaggcaccacggtgcctaacgctgccgcattggagatcttgcgatacatggccaggacaccatatccagttggtaagatcctcttctttggcacggtgctcagctcgtcgccgaggatcgcgtccttctccgcccgtggcccgagcctcgccgcgccggagatcctcaagcccgaccttgtcgcccccggcgtcagcatcctcgccgcgtggtccggcctcgtctcgccaaccgaactcgacgtcgacacgaggcgcgtcaagttcaacatcttgtccggtacatccgccgcgtgcccgcacgtgagcggcgtcgctgcgctgcgcaagatggcacggccaagctggatccctgcgatgatcatgtcggccctgacgacgacggcgtacgtccaggacagctccggcaatgccatcgctgacatggccacgggcaagccggccgggccgttcgagctcgggccggccatgtcgacccgaacagcggccttgacccggggctcgtctacgacgccggcgtcgacgactacctcgacgtcctgtgcgcgctcggctactccgacgaggatatcgtcggtatcttcttgagggacggaacgatcaccaactgttcgacgcgggcgagcaccaccgtggcggacctgaaccgcgcgtccatctcggtggcggtcaaggcgtacggcgacgatatcacggtgcgacgcaccgtgcgcaacgtcggcggcagcgtcgacgccgtgtacaccgtcggcggggtgccaccgccgggcacgcagctccgcatcaggccgtcgaagctggtgttcgacgcggagcaccagacgaggacgtacgacgtcgtcatccgcacggtgtcctccggcagcttcgacgagtacacgcacggttccatcgtctggagcgacggcgcgcacaaggtgaggagccccatcgccgtcacctggccgccgtctcagagcgccgccgtcgcggccatttgatcgagcagctgctctaaccctctcgatcaatacgcatgcatgatctggctacgatgtccatctagtttacagctttgctttgcagtgtgtaatgtttttttccgaataagcagcttgctgcttcctcgctagtacaataatcccggtgtggtgtaatcctacacttttgtatcgtgcatgcatgataaataaaatcgagaatatatatcaataaatcaatggagtattcagccgaattatactgttcaagtaactattccaacactttgtttgcttagttacgttattacaactttgcaaaaatcaagcatgaaagcaatttttttttaaaaaaaagcgtacgttctgaaaatgcgggtaccagctcaatgtcttgcaagcataaaagagttaaaagacaataaactgaacccaagaaataaatgcatggtaccatatggtccagcctagaagcaacacagataatggcagcctacccaacatttatttgctagtaatacactatttctcccaccgtttcaaattattgcattctagttttatcttgaatcgatcatttgtatatctgtccatcaattgttaataaattgatagtttaccgcgagaataactttcatattatttatattttgcatgttgttgaattcgacaaatttatattgtcaatgataaaaatgtttgtgtcgtgacccaaggtcatggacaagattagggatagacgggaaaacacccttttcccgcctatcctgagaaatgagcccgaatacaaaataaacacacacttttactgacaagatttttagtattccaatatgtcctgtctgctacaggtttttttgtcagccttatatagttcatagatttacatatgagattacaattgtgcccttcgttgggcccacatgaaattacaatcgtgcccatgccatatgagcaaactctaagggcattttggtacattataggggtcattatagtttttggtgccagctagatggagtggttgagtggttcccaggaatattctcttggcatctttattgtccaagttgccttcttcatgaccaagagtcttttccatcaccatgggtcttctccacgaccgagggtcttttccaccaccatgggttttctccacgaccgagggtcttttccaccaccatgggtcttttccatggcatgtagtcttttccatctcgatcatcctttccgatttacctggtagctgacctgttattaacttaggaaatacccaaaacggataatgagacttagtgagaagaactcactcgaacggtattttccgactcgaacagtgttttccaactcgaatggcattttaccgttttccctattcgaatgaccctttgccactaggatacttatgataaaaactcaatcttacccaatctcttcctctatagtgttttgggccgaatatggagggacggtggtgaccccttgctacaacagtttgatttatggtaaaactagaatgacaagtaatttgaaatgaagggaattacatcttattcagtacacctatctgatgaaatgaagtctaataacttctagcatgggaatccaggtaatttagcataaataaaattattcaccactccaatccagtgagttacacatgtgcatagcgatgaacaggcaaccgatcccttccatgaagccatgggagcactaagcttcatggaaggatttggtctcatgcgtggagatctctgtccaagaaggacctatacaagctgtccccattgccaccaaaccagaagacacccaaatttccaacactactctacatggatgctgctcggccgttcgacggccatgtcacggcgatggggctagtgacgtcgtgcacgccgtcgctccaggtgaccgacccgaaggtgtactcggtgtcgacgatcaccgggttacccgacgcggcgatggtgatgtcgtaggacaggctctggtggctctcgtcgaacaccagcttgcttgggctcaccgtgacatccacaccggacgggctgtcgatcttggcttcgtagacggcattggcgttgctgccgacgttgcgcaccaccctgtggtaggtgactgaatctttgtaggaggataggacgacggcgaaggcggggtagttgaggtccccggtgcgggggaatttcgtcgaacagttggcgacggagccgtctgttgtgaagagggagatgatggagggggagtagccgagcgtgcagaggaaggagacgtagtcttcggtcccggcgtcgtacacgaggccagggtcgagcgcgcggttggggtcgacgtggccggcgccacggacgaacggcgtcgactcggtcccggtagccaggtccttgatgaccgcgctggagttgtccacgttgtacgccgtggtcatgagcgccgacttgatcgccgccgggctccagtccggttgcgcctggcggagcagcgcggcgaggccgctgacgtgcgggcacgacatggacgtgccggagatgatgttgaactccacgcgcctcgggtcgatgtcgaggtcggtgggcgcagactcgccggtccacgccgcgaggatgttgacgccgggggcaatgacgtccggcttgaggatctccggcgcgcggtagttggggccccggctcgagaacgccgcgacgcgcggcgcggacggcgacttcccgatgaccgtgccccggaacacgatggtcgccgtcggcgacggatcgctctggacgtagtacttgatcttgtcgccgaatttctgccccaccattgtcgccgggacgaggtgggagtcggcaaccagctcctcgccgctctccgccgtgttcaccagaatcatgccggcaccgccggccaccttcactgccccgcctttcgccacacgggcgttgctcccacgctcacacagaacgatcttgccggaaaccttcgctggatcgagctcgccgattatgcaaagccgagacccgcagtcgccggcgtacaccaccgggagcagtgtggagttcaggggttcgccggagtacagggacacgccgccgtagacctgaccgttgcctagaaccacatcagccgggaattcgcggtcgatggtagatgcgccgacggtcagtatccatggcgcgatgttcgtcgcggtgtactcgccggggccggagttgccggcggacgcggacaccacgatgcccttgctaacggcgtggaaggagccgatggcgatggagtcgcggaagaagctcggggcgtagccgccggcgccgacggagagggatatgacgtcgacgccgtccgcgacggcctcgtccatggcggcgaggatgtcggagtcgtagcaaccggacttccagcagatcttgtacgcggcgatgtgcgccgcgggggacatgcccaccgcctggccacgcgcgtagtcgaagaacccggcgccggtcaccggcgaccctgcggcggtggaggcggtgtgggtcccgtggccctcggtgtccagtggcgacttggactcctccgtctcatcgatggcgtggccgagagcagcctcgtatcccttgtagaagaactttgcgccgatgagcttgttgttgcagtaggcggaggcgttgaaggaggcggtggagacgcatccgccggagaaggacgcgggcggcgggccgagcccgtcggtgggcgcgaaggagccgcggccgatggggtagatcccggtgtcgagcaccccgacgatgggtgacgacgcgccaccggaggcggcggcgggcaggagcccggaagcctgggtaaggtggaggaacgccggggtatgggtggtgtgcagctggcgcgcctggtcggggtggacggcgagcaccccaggctgcgcctcgacgtgcgccgcctgttcgggggtgaggcgcgccgcgacccccgtcgctgcgtgcgcgtaggagtagagcaaccgtggccgcggtgcgcgcagatggcgcgggaggcgaaggaggcggccgaggaacacggcgccgccgccgccgccgacgcgcgtggccctgagcgccgggtgctcgggcgcgaggtggaggatgtacgtcgactgctctctcgcggccgccgccgccggcgacgcggcggcgaagaggatgaggagcacggcggcgagatggcggagggtagccatggcgcaccgggggagcggattggattggtcgatgactcgacgccaatgcggcctggagaactaaataagtggtgggccctttcaccgggtctggatctggattggccaatggcgatgccggcgtgggctcgtgggattctttacccgttcggtcgtcgggttacttttgcggcatcggattggacacgtcgggcctcacaagtctaagtatctcatttttatcgattttttctccggtttatccgtgactgctgctccagtttaggaccagtttcgtgctcgttttcatcaggatgtactctcactccgtccatagaaactccattttcagtctttgatataacgtttgagtttttgttttatttaaacgttttaaaattagtatttttgttattattagataataaaatataaatagtattttgcgcgtgactaatttttctaattttcttataaatttttaaaataaaatagacggtcaaatgttaaactcacaaacctacaagtggggtttttgtgagtagtactccctatgtctcaaaaagaaaatctaggattggatgtgacacaccgtagtactattaatttctaccccctccgttccataatatataaacttagaaccgaatgggacacttcatagtacaacgaatccaaacatgttgtccagattcgttgtgctatgaattttctcatccggtcttaggtttctatattagagcaagtttaatagtatagtccactactacctccaattcatctatagccgatttaatagctatttcatacaataattgcttactatactattaatgtatgaccccacctgtcatacacactctgcttcttggagtccgtgctgcagctagctacatatctatagcccgctgctcttctctctcattttttatctcattaaaatatgtttatagttggctaatagtatgctattgtacctgctcttatgggacggatggagtattaatttagacagatatactttcagatttatagtattgatatgtgccacatttgatattagtttggttttatatgtccgttacatagaaaattacttaaagtgaatgggacaccatacaatgtatctggacatatgtccattttcatgtccactgcaagcaacggcaacaaattcagtggtgacagcggcgacggatttttctccttgtcactatgccaccttgttgtcaccggcaatctaccgcgatctatcatcaatagtccaggcgtagttgggaagaaacaccggatgtcgagttcaggcaatagcgtttctgctcttcccaagcgacatccgtgctgcacgatcttcacacgcagaagcgttgctgcgccacatgcttcgtcgccgtatatcttctccgcaagcgcaccaagttttagaatttttttattaaaatatttacaaaaatagtttttagttttgaaaatttacaaatttaatcgcctgccgccttttgggatttttaaaaatcgcccttccaaaaggcggcaagggatctaaatgtaaatttttcagcacaacttgttagctctatgattttacaatttaaaattatattatataaagtcagatgaaataaaactttatatcaaaattatagatctcaatgagatctacaactttttagttaacaaatttttcatttaagatgttttagatatccaaatattcgttacaaaatataaaacacatttaaaaaaatctcagatctacatttcaaacgacattggatggagataaactttatataaaagttgtagatcttgatgagatctataactttgtaatttatcactttttcatttaaaatcatttagagtatcgaataagcattattagtttttaagcaattaaaaccggtagaaagggtttgaacacaaataaaaattttgcatttaggtcccttgccgccagggcggcaggtgattagatttgtaaattttcgaaaaaaaattatttttgtaaatattttaataaaaaaatgtataaataaaaaaaatcccaagttttatagcatctggcccatcaagctagcccgccgggaggctgatcgatccactcggcccagtaatggaagtatgaaacgccaacaaattgggtcggaacgggatccccgcttacgtagttacgggccgttattagttgggccggccgggaagggattacagcaacgaactttagcaaaagaaatgcgccttgagactaatacgcacgtaaaacggtacgataaattaactcaggaataatttagtattagttaaaaacttaaaagtgaattaatatagtttttaaagtaacttttgtatataatttttttttaaaaaatactccttttaacaatttgagttgagaaaatcaacaaaccaattcagcttgagtgtcttgattacttgtatcacttggcagtcttgggctgatgcttttttcggtggtccaattaacgattttatacgaattgattgtaccacagtatccccgacgtcaaatcaagaaaacactacacgaattcttgatttttgctccataaaacaatacagcatgtgtttcttaattatttatgtgctccaaatataataaaacctgtgattctctggagacgaatggccaatattataagcacaagtgcgaatcgtagtagcatgcaaattgaaaatcttccatgccggctgaggtaagctctgacgcatactttgcctataatttctttatatcaattattttttccgtgctgatagctctaagatgagtcaggacacgagtacaaagcagatggcagcggaatctcatctctcccatatccatcagtaataagctttgacctctgcgtgcttttttttgctcacgtagccgtgcagttacgccattttggaacaattgaatcgactatctaagtattttgctagtagaacttttgcagaaatttaaggagtatgtaaaattaaatgatataaattatgataagtcgaaaagaaaatagataaagaatatctgcattgtacgacggaggaagtaaataggagcccatgtacaattccaaagtactcactcgtacgatatcatttcctaaatttatcaattgtatctattattatcagtatgtggtgatcatgaatggtcggtaaaatataatcaagtatagctgtttgtcactgtcagtatgtcagtccctcaaacggttataggggtggctaggattgaaccaacataaattggcgcccatgcttttttagcgtatagaattttatcatccacaaacccgtcacaatccgtgaacgaacaaacttgaaaaatgaaatgctaaacatattcatcttcccttttccacacggaagaacagcagcacaataagtgaaacagtgatgcatcattgcatctgtgcatttaaagatatactcctgagtagactgaaaattctctcttcttgacgacagtaaaaacttttttagcttaacctccatgacaggttactgattaactaagcaagggtgtctcgtagtagtactgtactgtgtagcttaatatagcacgtcagcttctcagctctaacctctcaccattttcccaagagatatcgccatcacgatctcccgtaatcacttcttatataaaaagcaagcaagatgctacgagctaaacaatttctttagttagtcttcactaatcacgggcttaaacgcatcttgttacattctcatcggcaagcaaagagcaagagagaagagagaggagatggtggatgtgaagcacacggccggccacgccggcgcgaggagagtcaagctgttccgggtgccgcggcggccggccagggcggcggaggaggcgggggcgccgctggtaccggctggcgagaggaggaagaggaagatggcggtggcgaggctcggcggcggcgccggcgggcggaggcggctgttcggtgcgttccggcggctgcgggtgcggtggctggcggcgctgtaccgccgctcgctgcggcggctgcgcgcgtactacgccaaggcggtccaggacctcctcgagggcgcggcggccatgagcacgctgcgctcgcaggccgccgccgactgctcgttcggcactgcgttcgcgccggtggtcgccgtcggctactgatgagcgcgtgcatgtctgcagcaccgttctggcctgtgcatgaagaacatgaagccatggagcagtagcacccctgtgtatagacgtggttaactgtccatgatgaattccagtgctgatcttttttctctcttcattttatggatctcgagttctcgacaatgatcagtgttcatcctgttcgtaattagctagcatgtaagtgacacactttaccgagatactgagaaaaaaataacttatattagtggttaaacgaaagagagcaagattaggtaagaagaaaacaaatatgattcggcgttgagttgcatcagangtcagttcgtgtgtcgaatgaagtaattagtactttatgtaggctggtcttccgaattttactccttgcacatgtcttacagtagagttcagatcaatctgggcatctgtcccaatttgtcatcgaataattagtctgtcgagattctgttccctcctcacgtctcaactctcaactgccgtctgctggaactaagataagcgctaatcgtagttggcttgcatatataataacgagtactccctccgtttcataatgtaagtcattatagcattttccatgtttatattgatattaataaatctagacatatatatctatatatattcattcgtatcaatatgaatatgaaaaatgctagaataagttacattgtaaaacggatgaagtaacagtctgtcacttcccttttcgtagccagcagtaatacgcaatagtaactcactgaagctattgcaaatagtaggcttaaggatggacacaaggacaaaatttcagtctaagatgattcccatcagagcagacatcctaccgtacgttcaggcgttaataaagtccaactgcgcctcaagatttgcatgtgttttgttgcttttgtttatgttctgatctggtatagtggtatactctctggactgatgctaagtaaaatcccgatcaaatcctactggagcctggaggacaacgaagcgagacagccctgagcccaatatatcacaatcaattcatggcgtgtttacggccccgtgaggccgtgactggctcagttacagaaaagggcctgggccgtcgttacaccgccagcccagccaacaattttcgagctgggcctccactgctgcgttccgttgttttggttggatcatccggccaaccagcgtcaacaccgggatcggccggccgcgtgtctgacggaaatggcaaattcaaagtttaagcagatttaaatcagtaattaggtagctggaaggagcatgaacgcacgattcatgcacagctgctcggtgcttcaactacacctgacctcacgagtcacacctgcacagtacgtgctacaccaactgctactagctgacgcgagttctatacttctatcagcatgacacatctcgacgatctcgtagaccaactcatacggagatcacgcttaaatactactcgtaagtcgtcgcagctgcaggtggacacgcggctaggcgaccaagcacaagcagcaaattaacaagcgtttcaacaagctggagatcacgagtccggagcagatggacggccacgtcgctgtggcgccgcggcgagacgctgcgttccgcgcgacgacgcggcggactctgacgattctgcacggaagctgcagggtgaggaggaggaagatggcggtggtgcggctcggcgacggcagcaggaggccgcggcggtttatgggggcgctccggaggctgcggctgcggtgggtggtggcggcgatgtacaggcgggcgctgcggcggctgcgcgcgtgctacgccaaggccatcagggacgtcctcgagggctccgcgctcgtcggcgccgcgcgcgcggacgccggggtttgagttttgcactttcacacatctcctttagggcttgtttggttgattgggaattaatccccaagggatcctaggattgagtgaatccctcccaattcccatctcactcaaaccctgtggggatgattccctttgcctctcctaatccctctcctaaaacctgtgttcggttttggctgggaattaacccatggagaagtccaatcaagcaagaaactactgaagcggctgaatactccaataaatagcgcattaaatttgacttatgcaaaaatcatacacagaagttgttgatgtcatgaaaaatactgctaacactgaagataacagtgtatgcgtctatttcttcaagcaagaagcacatcacaaacatgtcttgtcagcagacaaatggtaataatactgttaagaaactttgggcttggcccatgaaggcctggcccaaatacacttattgggcctatcatcaaaccttccatatattggaatgcactatataaagagaggagggggctactcatttgtacagttgattggatgattgaatagtgaaagagagtctcacccctaaactttgtgtctccacttttatacgattatgggaccctcttagactacttcgtgtagtaggagggttgcgtaataaatacaattattttcactttccaaatatctcacatagcaaactcaaaacaggctgcactagctaagtctaaatacacaacaaaacccaaacttctcccaggatctcccaaaatgagagtttaagtacttcatgaagctgctaccatcacattttaattacataaaatccaacatcagtgattgctccaaatgacgaactatagccttctgtgactgaaaaggataaccaatagttaataagatggcactactagctccatagtaaacaagtattcacagtaaacaagtatgcaaaagcgcagtggataacaaccaaattttcccttctgtacaacatctatgaaagcattgtagcaaaaactagacaggaaagttgtaggtacagattcaacaagcaagtccaagaagagatgcttatatactaatatcaagcagttgtccttatatcaattataaaaacttcaaaaggaacagacacctcaattgccaattgatcatcagaatttaacagtaacaaaaaagagagggcatggaaccagggagatgataagcaatggtgattgcagtgaatgctgtaaattcattgcagtacacaagaagccctaagctccatctctacttctcatcatacacagatgcatatgtctctgcaacaagtctgtcacttcatgttatgcttttcaacaagacagttattttaaattggacaaggatcaccagttggtactttatatgtaccagtgcattacatctagtgagaggaatattatgcttggaacaacaataaagaaattagtgcagtacaacccaacctgtcttcacactctaagaattggcaaattagtccaaattaaccaattttcggatcaaggtaaagcaataagatgttataggcatcacattttaattactgaagcggttctattatgccaaatgtcaagtttagtagtgaagcttggtgtgaaaaattctataggctcagtaattttaaatgaaaatagatattgaaatgaaagtgactctgcttgtaagatgacaaaaactgctcaaatagaagcatcacatgatgtccttcagcatcaactgctgcatatcaggagatccactagattttcacttcagctagctgtaactgcctagctcccgctttgcagcctcaattacaagcatattatatggtattgaatcttttttcacctatcctaaagccaaattgtgaacttgcaatggcagtaccatatgcagtactacttaaaatgcttgcacccaaataatcaaaattttggaatcctaaactaggataaatagatcatcatgcttaacagagaaaagatgcacaaatggatggacggtttccaggagaagcttaacagcggggcaaatttcctggaggagatgaacagcgtagtgagtttagtgaagaagcagcggatcaacgaccccagcatgatgaactggtcgctgcagctcaaggacgctatcgacgaggtggagtttacaagaacagcaagaacaacaagaatagtcaaagaatcgccttgtgctctcctccgcctcttcttctccgagggcgccacggcggtggcgcagtgggcgagggcgatgggcggcggcggcggcagagtggatgcgccgacgctatgctgcgaccgggagcggtgttcgacgggatggcggcgacgacaggaaagggagaagagaaggaaaccctaaccctagatttggaagaggaggggagaggaggaaaggcagcgtgctcaccggaaagaaggtggcggccggatgagagagccgtgctgtcgccgtcgccgtcgccttcgggtcgcgccgcccgccgcgcgccgcgtcttcgttgcgccgccgcctcctctcgaggtttttttccacgcctcgggagtagatgatttattcccgggccggggcgcagggaaaacaccgggatgggccgggttaaaatccagactgggcttaaccgaaaacatatttttctgtgggccggtatcctttccatgccgggattatccgtggggaataagttcatctgagggcgcacaacgggtttccgtcacacaacgggtcactcaactatcaaaaccggtgtagaataggtccctcgacgattttgagggcggttttggctgacgtggcgcctacgtggctaatttgactcagtattcatctgacgtggcgcttacgtagcaattcgatccgaaaaaataataagacccgtgggacccacatgtcagtctcacacagaaaataataaaaaatggtgggacccacatgggccccacatgtcagtccaactcacccctcttcttcatcctctctcccccatctcccctctcttcatctctctctcctctcctctcctctgtcatcaggcgacggagaggcagcagcgatgcgcccggacaacggtgcctatgcggaggagctcgcctgagcgacgccggcgccgatgcggcggggcgcggctgagtggaggctcggcgcgagcgtggccgtgcggtggtgccggccccggtgagggcacagcgcgggtcgcgccctcgggggtgcggccgggcagcggtgccgatgcggaggagctcgaccgagcgacgacagcgccgatgcggtggggcgcggttggaaagaacaacacggaatcaatcgacaccaaatttttatcgtatttcttttacgctgtttttccttctcttcgttttgctcctcccgatctattgcaggcagctgtcatcgtcatcgtcgtccctccggccggctggtggtgacgctgcgtcggagcagctgctggctgctgctgcgtgtgcatctccgcagcagcgttgccgcatgagttagacgcagcagcaggtgaatttttgtgttgctttcctgggataaattttggtggcaacattttcttcttctttcctcggttctcttcttcttcctatggcgccggtcgccgtggagtggcgctcgcggctgctcgggcggcgcggctcctccggccatgcgccccaccgcatcggcgccgccgtcgctcggccgagctcctccacatcggcaccgttgcccttccgcaccattgaggccgcgacccgcgctgtgcccgcgccggggccggcgccgccgcacggccacgctcgcaccaagccgccgctcagccgcgccccgctgcaccggcgccgccgtcgctcgtcggagctcctccgcataggcaccactgtccgaccgcaccgccaccgtgtgccgctgcctctccgtcgcctgaggagaggagaggagaggagatgggaggtggggagtgaggaggaagaagaggaggggtgagttggactgacatgtggggcccactattttttttattattttctgtgtgagactgatatgtgggtcccacgggttttattattttttgggatcgaattgccacgtaagcaccacgtcagtgccacgtcggatgaagaccgagtcaattagccacgtaggcgtcacgtcagccaaaaccgccctcaaaaccgccgagggacccgttgtgtctggttttctggatgagggacggaaatcggattcgttgacaagttaagggacctcatatgaacttattcctatctgtggggattgggccccgatcccggccgttcccggcccaaccgaacaagcacttaatttgcatcaaaaccctcctgcaatccttgcatgcattctgcgtgtcgaaagaatgattctgtgcatggcaaacgtgaacaaattaagcaaacaaatttgacagcaatttcgcttcagagttcagatgctttatttatgagataatctattctaaatcattaagtttgttcgagtacaacgatttgacattgacattgtctctttctataatatatcggtgactttatcaattgttttataatacgctattgggttaggcattcttttcaaaaatacccaaaatatccttatgaacatactaggttaacaattgatttatctcccaaaatatccttatgtggcctccttacgcaacatggaaatttgtacaggagtttcaagttttttacatttctttttttaaaaaatttataacttatcttttatatggtatataaaagtatttattattattattttttaatataaatcatctttcacatactaaattagatatttttatgctatcactcttgtataagcaaattttctctcgtatgccacgaaaaaatattttttttttaaaaaaataaatataccaaaaaaattaaaatttgtatacaaactttcatgttgtataaggaggccacatacaaaaatcatattttttttgaagcttctaataagataaatcaattgtttattttgtatgtctctaaggatatttttgaaaataaggtccagccctggcatatcgtagaacaattgttaaagtcgccggtatattatagaaaaagacaatgtcaatagcaaatcgttgaactcgaacaaattcagtggtatagaatagattatacagcaactacgcttgtgctatatcaggaggaaacatacgtctcgggttccccccgagtgcacccatactgccatccaatagttcggtttacaacagacaagtatacaacgtacgaaccatctgaaaagagggaggtcttctctatttgtggagaacggaaaacatgggattagggtctgaaaatttctgggagctggtttggatatttgttggatccatttttcgcttgagaaaccccaaaatttgaaattggaaatagtataggggaactctgggtgatgcttaggcttggtccttttttaaaccattccgagacatactagaacgtgggaaggtttaggattgcaagatcaaaccttttatatataggggtttggccggtttaattggaaaaaaaaacaaccaacaacataacatccaattaaccattgaatcgtttgttcagttttacatctattttccctcagcttttaccctagttcatccattatcgtcagtattacgatgtaagccgtccatcttcatcgcgagagttttgaatcttcttatagatttatcgcaaaaatcttccgttcatcttataagatggttggtcacttgtctaatccagcccgctagtcggctttgatttggaaattcattctgattgggagcttttcaagatcaatgtggataccgcaatgttttaggtgaatcacgtggtgatgaaaaaaaaacgtgaatgcgttgtattttgttcagacgacgcatgtagcacgccaattcattgccagtggacggcgacggctactcgacatcaatttccatcatggagactaatcaagcaggtgaccgagaatcactaacaagaagcttagaagttgccattgtaattatggatacggtcataagcatccatataaatagatgataccccgcactttgctacgggatatatgttagatattgatgaaatgatttagattaaaatattatgaaaataattttagaatgatgatttagcatatgtatgtttagttatatgtatgtttagttttagaatgaaacaaattatatgtataattactacttgcatgcttacatgttgagctttacatatttagtgtgcattagctctatagtgaagggatatgcagggatcatccattaatcctctgttttctttgttttattctgcttaattatcatataattccagcctttgttggattttttttaaaaaaaacccttgcgtagtgtttaattgcacggacctaatagttgggagttgggaacaaccgagtcaaaagaacaaaaacaaggaagccatagtttggcttattttaagcataagcgaaactgcatatttaaaaaaaataataatttatgaataaaacttttatatacgtgttcttagcgatctaaaagcaaaagctaaaaaaataaattttgataaaaaaacttcaaaattaattttaaatttaaggttgaaaatttaaattttaactgataagtataagcataagcgaaaaagataagtccgcaaaactataacactgccgattgatcggaatatcttcttaaaattgttgcatggcacgcgaacatgttaagcgacaaataaatttcagaacaattcgaccgcttcaaatctatctatctatctatctatctatctatctatctatctatctatctatctatctatctatctattatatactaaaagtccattaaacttcctacaaacgctctcaagccaccacgtgtcacttctacaatcgctcctagaccgccatgtggcaatatataatctcaccgttgattttcacttaaatcggtggacccgataatttagaccattagattagattagttgtattgacaccctaataaatcagaaaaaatccttaaaaactaaactcccatcgcccaacccttctggctggccccacacgtgcctaagtacgtagcaggtacgtttgcctccatgtgcacaatccaattcctcccccccaatctctatttttttttctaaatccacatcataatttctattctattttttctattattattattattattattattattattattattattattattattattattattatataaaagtctattaaacttcctacaaacactctcatgccgtcacgtggtgctctaaaaacactctcaagctgccacatagcactctaataaaataggtaaaatcttagaaattctgaaaaaaacccctcaacctcgattttcatttaagttggtagagtattagtttacaccgttagaatagatccattataaatagtaatatatccctcctaacttaccatgtaatacttactaaaaaatattggcggaaataagccaagaaggcatacgtgcgtacgagttaaccactataaacgataaaagaagaaatgatatacagaataaaagaaaaaaaacatactgcatatatacgtactacgtactactggaaaaaaaacattgctttttaaactggattttcacttcctaaaaacattgctttttatataaactggattttcacttcctctgtattttttatgacggcgttaaatatttagttaaactaccgaaagaaaacaatgatttaaattagattttctattatacttcctttggattttttttaattttagtgaaggtggtagtataagaaaaatatattacttcataaaacatgcacacccaaaaatagatctagaatataatataaaatatcaaataaacgtatcatttcacactacaattgttgagtatagatagattctatttgcatcaatgggcctacatttatagttaaagatgaaataatgagtaattaaaatattactcaggacatttgtcataaacacatataaaaaatgtattgtttaaaaatatatcacatttttctcgcaaaataaagtcaggattttagccgttaatgacccaatctacgctttgatttgtacatattttttaagtgtacaagtaataaatgtaaggttgacttctaaagtacttattagattggctctccctcatttatcttgagtatgttctccgaaccattaaagtgttggtgttttacaaatactttctatacatacatacatacacacacacaaacacacacacatatatatatatatatagagaagttaatgttcatatctaaacatttaaaaaatattcatactcattcaaattgggtatatactcaatttaaatcttggagcccatactccatgtagcaccagttaatttacctatatatgtatatatatgtatgtatgtatgtatgtatgtatatatgtatgtatgttatatgtatgtgtgtgtgtgtgtatatatatatatatgtatatatatatatgtatatatatgtatatgtatgtatatatatgtatgtatatgtatgtatatgtatgtatgtatatgtatgtatatatatgtatgtatatgtatatatatatgtatatatatatatatgtatatatatatatatgtatatatatatatatatgtatatatatatatatatatatatatacatatatgtgtgtgtgcgtgtgtgtatatatgtacctatacagggatgcgctaaaccgcgcctgggtgtgcaataactaaactactcccctcacagcacccca

SEQ ID NO: 5407 - DNA, 10387 bp, Oryza sativa
  unsure (1)..(10387): unsure at all n locations
ccctcccccgcgcgcagacagctggcgagcccctcccctgcgggcggacggccggcgagcccctcccccgtgtgcggacggccggcgagcccctccccgcgcgcggacggccggcgagccccaccccgctcgcggacggccggcgagcgcctcccccgtgcgctatcgtcgtcgccgcgccacgacgcctcggcgcatggccgcctcccccgtgagttcctctactgggccgccttctcgttgccatcgtcgtcgaccccccactccctccgcacctactgcctcctcgtccacctcctctcccgcaccgccgccgccggatgccaacgccgctcattctcattgtcccagcacgccaccggccgaaggggaagaaggggagagaaagagagagaagggagagagggaggaggaagaaagtctgacatgtgggccccacatgtcagtaggcccacatttctttttgtgtgaatgactaatgggtcccacgcatatttttatttctaccgccacgtaggtgccacgtcaacgccacgtgtaacaaagactcggtcaatattgccacgtaggcgccacgtggcgccacgccagcaaaaccgcctcccaaaaccgctccgggagtcaaattgtaccggttttaggagtttgggggtcgagatatctggttttgtagtttagggttatggtttagatttcgatcacttttgagggtcatgaagtgaacttattccaaggaaaaatggccttaggatcgaaagcggcacaaggacaaggagagatttatttttaaatttttcattttaattaactctaaatttggtttttgttgttttaaaattatttctggtgctttgaaaattcaagtaaaaaatttagggacccatttaaagcatggaggatttaataaaaatactccaagccacttttgaatttttcttgcacgtattttagtgtttgagatttcttttagacttttaataatttatattactcattttagaaagtgatttttaacttgggatgaatttatcaggatatgaaaatgttacccccgaaggtgaattccctgttgtcatctttattttgactgtttcatgaagtatgaagtatgtacgactatcgttagacgaactctagtccctccgctctaaaattaaatcaacataatacgagatataattagatttgtttattttaagacggatgaagtataatttatcaacagtagtcgcacatacttaataattcgtgaatatcccatactatattagtttattttataacggaagatattatatattagtttattttggtacggacaggaaagggtagatagatagatagatagatagatagatagatagatagatagatagatagatagaaatagttgcgcttgctacatgtgagggagattgaagagtggacgtggactgaccgtttgaaaaggttgattgacaagaaatagtctcttcttgacaagaaatagtctcttcttggctttatatttcgtggtgttaggataatgtcgtatttttatattagattggtttttttttgacagagagagtaggatagatagatagatataattaagtcgcacctgctacagttttttaaacactgtttgaaacaattgagtgaccagcaatagtttatttctgtctttcttcctaaaataaggatgtaatatagcttaacactataaatctagatgaagagatgtccagatttatagtatatgatgtgtcaagtctacaaaggatggattagatatctcttgctcggacgatagagatagatgtctgtcctttttcttttggcaagaacaaactttaagtcgggtgactccgttaggatttattaacagcataaatggcattgcatattttgtatactaaatgatgtcccgtgctttgttgcggccggatatatgttagatattggagaaatgatgaaatgatttggattgaaatattatgaaaatgatttgagaatgatgatttagcgtgtgtatgtttagttttaaaatgaaataaatagtagatataactattatatgcttgtatgttgtgttttgtatactaatgggttgatgtgacatacttgtgcaatatgtaggtttttaggagtgataataaatactatgcttgtatcttgagttttaagtgtttggtgggtattagctttctatagaagaaggaatgacacatttgatatttttaatcagtccgacaattttaagattttttttcaaatagactagataaacatttttttcctttttaccgaattgaacgtagactcgttttatgcatgtcaactataaagtcataaaaaatctttaaaaatggaaatatatattaacttgtgatatttcgatctataaatatataaatttaaatttgatttataaaggtagaaaaaataatatatcttaatttgatttatatttgtaatttgtgtttctattgtgtatatgtcgaatttgaatatgtatataggaagcccattataggcccataactatttaaccctaaattctctcatcttttaatttctccatgctgactggtgttactgtccacctttttagttttaatctacctgtgaatattcgattgaaatatgatgcatgattatattttgcatctgatctgttattctgagctatatctaatctggtctgatcagcaaggtcatgacgctagcttgcagccttcaacacggactcagttattcttcttgtggaacttatggtgattttattatgaaatgaagccaggttaccaagtaaacgtacttcattgttcaaccacagtataattcatgattaaatagtcaatgctttcatattcagatactacttaggcatatttgaaaagtatagaaatgtttggtctttgaaaagtataatctatttttacaatatatatatatatatatatatatatatatatatatatatatatatatacactcgctgtatcgacgtattagtgtttttgaaaatttccgtatcgccgtatccgtatccccgtaccagtatcgcgtatccgtgcaatataggtgttcactagcctaaaaaaaaagaactttggttgtttagaagttcccccctttgtgaatacactacaatcatgacttaacttcaatctgaaccaaagttttaggtatgctcatatgcgcaaaagacagaatcaaatattctattcaataaaaaagttaagaaataaactactgcatgtcactatgcgctttttagcattaccaactgccccaacagataacataaatagatcactattcttgtaattttattgtcattggcatttttttttttccacaacttacgaaatctgtttgcgaagccacaatgaaataaacttacagacaactccagtgtttccatgaaaggagcaatcttcaggatataagcataatcaagggcatcagtctttctgatatttccatggccacagagagctaattccaacctcaaattccgaagataagtaaatttgaaaggcccttctggtacgatagttctctgcaacagaaatgaaaaaaaaaattggtgaatttgatcttatagtgatatatgcacaaaatatggccacaaaggacgacatatcacgaacctcacgttctccacaatgtaaggtcagagtctcgagccttggcaaagtactggggaatccagtaatgatataggaaatagcagattggtaattgatgaatacaatactaatatttgtcagcctggatgttgaagcaaatatcaaaggaaccatggtgccactgtacttaagtgttgttggactacaattcagttctatctcttgcagattagggcagatatccactaccaaatgcttaagccggtccaatggatgaagcattcgtatgctagtaaccatttcgcaatatgaaatctccaaaaactccagaagattgcatttggatagcatacgctgaacatcttcatctgtaatgctcatatctactaagctaagaatcttgaggtccagaaatcctttgaaatcagcaggcagctgcagagacacggtcgtaagctcgagacaccgcaagtatgaaccataattgaggccaagaagctgtggaggcaaattatatggtggttctttgattatccgtatgcaattgctatgtgtcaaatctgtgaaaaatgagcccttatcctgacctgataaatcaacaaccaattcctttgtttttgatgcaattgcaaagttcacccatctatcaatatggtctgcgtgcttactatgcaaccgaaacttaatttccatacgttgaacccccattccactgtgctgacgcaggaccgcatcaacccttgtaataaattcgtagtccctgagccatcgccatcgatatggagtcaaggtcttgacataaggtttcctcattgtacctttattaagagtaagattggtgtggctgcaccaaaaatatttccattttcttgacaatacacttgtccttatagcgtcatttattggcaactgcgacaagatctttgctaaaatatcctacatcaggaaacaacagcattataataatttaagtatttgacataaacagctaaatagataccatcgctgtacaagattcatcatattaatacgtgaaaacacattgtcttacacttaatttctgtatgaactcacataccattgggagattgctaagtgaaattttttgtacttctcttcttttgacaattcccccatgcaggccttgttctgaattcctcatcatgctctggttgtggctgaactcttttcagtaaagaagagccgtcctactgttcagtacatacaagaacatcaagcactagaaaaaaataatttcatggaattgataatcttaaggtaacgactcagatgagtatttcaactttgttacatgataggaaaaaaagagtctgtcagggcatgtacgatgtacccttattactttgtaaaggagaacatagtttgaaagatgttttctcttatataaaagaatttcagtgttttatgtcaactctgtttttttgtatgtttctttttatatgtataaaagcttatcgatacaggaccataaccaacatggctaaactactttttgagcccttattccaatgtgatgaatggactataatgatagttgattggctgcttgaattgtagttagatgatatattgtggatgaattgaagaacagcagcacattattgtgtctcggatgggctagctaaaataagagccccccaacccccattggattggatgggtgcactccattggaagggcatctcaccttatagggtggtgtacatacaagaagtgaagggtaaaaacctagtggatgctcgtcgccggcgaaggtcccgaccaagacgtgcgaaagcggcgccggtcgcgctgtcgtcgtagcccacgccacgagacagagcaggtcaaggagggagaaagaaaagaggaggtgagaagtagagattagtattatgtactccgcttcctccacaacttcgcttccgattctgtttcctctccccgtgcgcgagggagagattctgttcccgattctgttttttttttaacgtcaagaatatagtctctgaatgagactacgagagatcaatgaacgagaaattgaggctacgagagatcaatgagctaggagattggttactcctacatataaatcctccggtacctgatgagattttttttttaaactgtagatggtcattggtgatactttctgacgcatactgcagcttcagggatttcagaaaagaaactgaacttgtaaacagtcagaattccgaaacccagcatgggtgctcttgccattgagctcgcctgtggccaccagaatatttcagggttagggacagtttgctctgtttattcaatccctcaacttgacaagtttcttaagcatagatctagcagagatcttaatgtaggaatttaacaaggatgaatagcggagcatgaattttaccgttgaacacaaccacacagacacaggagcagattaatttacattgttctttgaacaatggcgccacaatttagacgcagatggcctctcgcacaactaaaaaagggcacgactaaaaaaggtcccgcaaattcaaaccatatcaggaaacagataaaagcatgtgatatcaggtttggttagagtctgtacaaatgtggcatatcaggctatcagcagctactttgtcatgtaaggtatccggtggccaccatgagcagctcgggcatcgcaagccattgcaagatacctcaaattgatttaatggcgtatcaagccagccgtgtcgaaccttgtaaaattaacagagccagccatgtcgaaccttataaaattaacagcgccctgtgagctatcagccgatgaataagttgtctcttttgacaataatcatgtcaagtcccgtacagaagcctcacagattttccaagatccatcactctgtctcctcaatatgtactgaacttcatacatactgcaattgtaacagtataaagtatcagtaccgtgttactttagagcacaacaggaaagcgtgataaatagaaacattatcttctgaattacctgtaatagctaggcttcttgggctgggattcatcaacaagctcagccgcttcctcaagaacagcaccaatttctgcaacttcaccagtgccagactcatccaatagtatctccgctcgaacaacagagagatttaacaaaacaaatctccaatagcaggactgatcctttgctgacaatgccaactcttgccactgctcgacaagtaggtcttccattatggacaattcaaatatttaaacatggaagtctatatgtaagtacaccatggataaaaaggaaattaccttcgaaagcattgaaccgtcaagaatttcagggagcatatcaatttgataatcagggccaagagcttcagatttgatgtcttgccactgcttcacaagtgtttctgcttcttgaagagccatactttgcttgcatactgtagcagccactgcattagcaacagaagataggtcgctttcttcgcttcttgaataaagcctattgtttaaccaaagcatcttgggcagtttttcaaaatgtttcctgacgctgctagtaataaaagaaccttccaacgtcgattcttcattcagggactgtgtggcagcagaacccctacttgcggaggcaggtttcatgtgaccaaactgaagtctgagcagttttaatgtaccaaatagggcaaacccaatgagtgcactatatgcaagtttccctacaatatcaccagtaagaccccacgattccaaggttcttgcaggatgcgatacaagattgcgcttcaggggaacagatgttgtggttgaaccatttgctggcctatccattgaagaatggacccccaggttgtttggtgcaagttgctttacagcttcccccaaatggctggtagaatttaatcttggcgtctgctcccctaaagctctgttgcatggtgacacactagaagatggctgagaactcaaacggaccattcttgtggctcctaatttctgcttggaagtgctaaggatgcgcttaggagccccaaagaagttggcctgccgtaagagaataatgatatgaaattagtctgtagaaaaaaatattcatgggtttcattactgaaaatagtaagacacagaccaaagatggtgaacaatctcttgtatccgcaaaacgagaaagtgccatatccttcagccacaattcctgtaaagatacgctatttgccatgagaaaattttaacacaatggagaaatataatattcagtaatctacagtagcacaatttatttgctccaaaacatactacagtgaaatataacataccagagactgacagacagtaaccttgtcattgccgtctttctttttaggtaacccataatttcttgagttggaattcccattactttgaagctgctgaagcttttcaaaaacagtggtgccagattcctgagagcaaacatttagttatgataatgtaaactagtaaaatttttgcagttcaaatcagcttatcacctctccaaggagatacaaacaaaatgattcctcaaatttcaggtctgtgttttcagatgcaactaaacaatcgcaaatggttttggctttactgatctgcataaaggaactgtacgttaaataatgcataaatagcaaaaatgatagtttactactattgagaaggagaaggtaccaggtcagcctgccgggttgaaaaccctaacgcaaagtgagcaagcatcgctacatggaaacaattgaagtcaactactgcccgctggctctgggattccaacgattttttgtttttacgagttgtagccaaagtatcccaagaaagtagatccacaatttcagtggctaacaacttattcattgcttggcccaagaaacaaggccaatcatgaactctacaagaggattcaacgtcaagaccctgtctaagcagttcacagagagctgcaatagcaccctgcctgcgttcagcgttttcaggtgtctgaggtaagcttagaagctccagagtgcaagcaggtgcaagctcttcaagtgattcttcaatctagttcatccaatgaaataagttaagggcataattctacatgtagaagaatctgtagagcgataacaacaaaaattaacctgttcaagaaggggcaacttctccaaagacggttttctcctcaacaggtattgagcacgtgctagagcttcaaagccaagagacactttacttttctcanagctagcttttgcaatagaacactacaagaaaatgcatcaaatcattgcaaaatataccaatttgtagtcagttatttaaaattttgtgtgcttcttacttcagctagtgccattgcaagaagcacatcatgaacatatggcctagaatctgggcgtcgtagagccgcctgaccaatttccaaaactagcttctcttctccaacctgaaatgaatattgtagcatgtaatacaccatttcattatgataatggtacattcaattttaataaattcaagctgctaggtgtcttgtattcatgatcacttagaactcacaaacatcataatggtgactaacctgcatcccctgcattttacgctacccagtcctaagaaagggcaaagtttaaaacctacgcgctcctcaccacattcctaaggataatttaccctgaagttagcataaaagttttctttattagttaaacattattgatcctaaatcttcttgatccctttcaaatcattcagtgaattgagaatagtattctgacaaagaataaggcagacctataaagaaacataccgggcatggtcatggtgacgactatgactatgtcatgtaacataaaaggtgacaaacctaaaccaaacttggtggttttcctttatttgttcacaataataaggatgtctgtgttacacattacctcctgcaagacacaaagtgcagcaggcaaccaactcaaggtatatgaagagaggatctgggtggaagcttttcttttatgcttcctgcgtactcctgttcaaagagaagtttgtctctcacatctaccagcagagcctaccaaacatgaaagaaataagcaaagattaaccacatgaattctgcattccctacattaaacaaagcagtatatccaaatatatttccagaattccttgattcagcgagcaacctgtctgcaggtagacacctctgccatgtacccgtcttcaatttctgcatttttcagctccattgctgctttgacaatctcatctttctcagccttctctgtaacaccaagaatctgcattggccatttgaaacatgtcactccaaaaatcagggaggcgtgtcacgcgtgtgaactaccagtgcaaattacaataggcatcgtggtgcaaacactaaagttgaattatggtcaagaaacgactatctaatctgcaactgtatcattcgaacagagaccagccgagctaaactagatccatcgacgatataagaccacatttccaaaattcggatccataaacagtacgagtggccaaaaaaaaaaaaaacctgatagcaagtgacggggatctccaccatcggcgcggcgggggcctcctgcctgctcccctccgcggccaccggcggcgcctccgccaccctcgcgcgcgcaacccacgcggccgcccctcgccgtccgccagccaggcatccacccccggcgtgtgcggacgcattgccatttcccaccccaacacgccgcgtcgaggacccacatgcgaccccggggacaacc

SEQ ID NO: 5408 - DNA, 35075 bp, Oryza sativa
cagtttgggaagtgtgctcatgggaaacgagggggcatttcagcccatagcgcagtgccaaacaaacccttaagtgtggactgtctgatccaggattaataacagttatcttccttaggttggtgtgcagaacaagacatccgatgtacattccaggctagtgaacgccgtggttattgatgccaacaagaatcaggtgcctgttattgcattaacattccaacaattttactcttttgctggatattcaattatttgcggaattgtgaatacatgtaaatggatcagcaagtcttgttttttgagtcttatctttttattatgggacctcgtgatgaaaactatatgttccctgctatctattacaaaatttccaatagaaaatcacataataccgtgctatcactggtaaaagaatgatgtgagtcatgcaaccagctatttgctgatacatgtttttatcttgaaatgtagatcaagtctacttctgtcccgcaactcccgcagcagaaggagttgctttctgccctgcgtccataccattccagactagtgggagagagttttctagcaagaaagaggcccgtttatgaatgtacagatgcccaggtattttcttaatttgtttgattcttcatgttatcttgtatctcgtgatctgttcccaacttaggatgcatcctgatattgttgaacttatatttctttctcttttgctgatataattgttatagaatccataaatgtgctccactggtttcatggcacgcttatccttgctgttgcaacatggtctctgttagttgaagtccgatttttttttccgaactgatttttttttcctggttcaatatttttttcactggttaatgaactgtatgagctttcatatttagtcaaagccttgagggatattcaattttctcaaattgcaggtggaagctgccaaaggtttcttggcagtgcttagatcctaccttgattcgctgtgttccaacttgagatctcatacgattactaatgtgcaatccaacaatgacaaggtttgttgttaatatagtgtttgttctggttattctgtgtcccctttctttgtggacaaataaactagctgttatgtggtgcagataccagacaaaatgttctgtcagcatgtttacaagtgtagcatacaagttactaatgattgttttctgtattgcacaggtttccttgcttttaagagagagcttcatcggttctttcccgacccgtgagaggccctttatgaaggtataaactgtagtcttcccttttcttcttgtgttcaatggaatttctgagttttgatagtacagcttatacatgtacggatagtctagttctgtttctttgctactaaagtattgtaataatatacttggacaacactgaataggatacttcacttagcattttaagtcttcctatactgaatactatgtccatcccaaaataattgtaattcttggttgtttagcatatattaaggtttgagaagaaagtctatgatgcccctcattagatggtgtataggtaagagtggaagggtggttgagagtagaatagggagaaatttgaatgagaagtgattgattcgacaatcagtactctattgtgacaactattttgggacagagatagtacgtcttttttggacatgcaccatatcaaactttcaaaactttgcacatcaatcgttttaaatactaaactgtatacatgaaaaatcacattatggatgtctcaaaaatcactttcataccgttataattttgttggattttacaaatagattatagtagaaattagtggtcaaaattgtatttcagagaccatgtcgatacccaaaatgccatgttcttttcatggcctgtatactggtccatggactaatgtatgtggacttttctttttctgttggcagctctttgtggacacgcaattgttctcagtacatacagacctagttctctccttttatcagaaggactaagtctcttttaagaatttaaccatcttcagtgagctgatttgccaaggtacattctctccttttgttatggcaattctggcatggatattttctgaggcaataactgttaatgttactgctatacttagttcctgtgcacaagtctaaagtgatttgtatgtagaatcgaatggaaatcactttctctggcactatgatgcacctgactttgctaccctcctgatcattgtgtgggggaaggaaagtcctaaaagaaaatcatatgttgatgatttgcagagtccagcaaccaattcatgattattaggtgtgcagtgcaattaagtgcagtgcctaggtaccaattttgcctttatgtatcttgtgtgcaactgatctaatagcatggtgtcttatttcggatatctttccctccttgtgaaacagtgaagccgattagcatggtgtcttatttcggacatttttccctccttttgaaacagtgaagctaccaacagttacagcttgaaagttgaaacctaccgcaagttaaaaccgtgctcaaatgtccatgagataacattgcctttgatattaacactttatgaaatactctatccgtcccagaatatagcaacctaagaccggacttgactcaacctagtactatgaatttggacatgtcttctgtccagattcatagtgcataggttgagccccatctgatccaagattgctatattttcggacggagggagtatgtagccaagtatatttcgatccttaggtgtctactgcatgatgatttattctagtgctcattttaactctctctctctctctctctctctctctttgcattacagtgttagatcccgatctcaactgtacatattgatcttgaaaagatgagctgcctttttattacattggcagctcaacgttgggttaccaaactgtatgggtgttcatatgtggttccaaagaaaccatactgaaccagacaaagagtccagttcatggctatgttaaggtactggcacggctcccataaaaatgaatacggctggtttggacgaaaccaccgatgactgttggagaaatggtatattattgagatccagatatggataattagccaaaatgatgttctagtagttatacattaatttggcatggctgttgcacacagcttgccatttaagattttgtaggtagtagttgtcccataggaaaacctcccaggtctctcccttcaacagtgactactaaatatgttaattctgcgttgcaaaatgtctgtaatctgaagtgttcattttgcagctgtaatgtaatctgtatatgagggggaaacaaaaatacgtactgttatttgaagatcgggttctttgaacctcgatctgttgagtgatggcatagtgtagagaagagttcggtatgtccagtagctttggaatcttgacatgaatcttgacggaggatattgttatgctggacgctcatgcatttttccatgtttaatctagtgttaggtggttatattttgggagcgagtgagcgagaccttgtgtttgatggcaggtggcagcagacggtccaatcctggccagtggacatgagcatgataaattcattaaaagcaatgcatattccgatgccgtctcttgttggcggagtttaaattgtctgacagatcgtcgttatagcctttgcatattggactatatcggcgtcatttacccattggctcttagagcagctacaataatagcagactataagccagctgtaaacagataaatgaggagagagaagagcagcgggctatagatttgtagccagctgtagcacggactccaagacacagtgtgtatgataggtgggaccatgtattaatagtgtagtatgtaactattgtatgaatgagctattagattggatatagatgaattggagccagtagttggctatactattaaacttgctcttagccatcccagttacagctccttttttggctcttagccatcagttacagctgtgggacatagttttacctcctttttacttcctggatgaagaacgaagggctggtttagtttgtgacctaaattggtcttactaatttttgtcgatgctaaattttggtaaattttgacatggctaattttggcaaagcaaaagttgtgtttggattgaagctaaaatagcctaagttaactattgaaatggcctattttcttaagcatgtcaaaatttggcttcaaaccaaatagacactaaacactttgaaattgccaaatattggtaaggccaatttagacctcaaaccaaaccggcccgaagagcttcattgaccagcattccactattaacattttttatctgcctatcaaagtgaggaggcatagaaagaagagtttgacgaggaggcagcttggcaaggctaatatacctttgcttcatatcaagagatttgagctgtggatgatatgaggagtacactcaagttttgattactttcgaggcaaaagcccaactgcccaagcaagacctgactgtcgagcgtcaggccttcgcttctaaaaacagtggcttattacagcctaaagcctgttgtttcatcagctaggagcaatgtttcggtgcagtagtactcatcagtaccaagccgaaagcagcggtagacgtggactgtggttgcgaggaatgctacaggggcggtgtgcctgcgtgagtcgctgcgtgcgcagggagtgaaagggctccgctttgcccgtggggcggtagcagcagcagcagcagagcgcagtgaatgtgcctgccacaacgtaccacggaaaaagccttcgaccagtggtcgtcacactgccgccctcctcgccgctactactagctcgctgcatgtgccgccgcctgccgctacctacaacgtcgccccatggtacgacgcgtcgctgcgtcacccccacccccgtgtgtaccagtgtacgtacggtggctggccacgccacggccgtcggaaagacgctgctgccggagtttttaagctttttaggcagatgccgcaggaggaggacgaggaacggagcggagaccaccaggatcttctgtgtttgggatcgcatcagcagagtcgtcatctgttcacttccgtgccaacttggccatgatgcatcatgcatggtccctgcgtgcatgcatgcaggtagcttgggctacatagttaagctggccggcgtgtccaccggattaaacccccatggtgatcgagactattctcgctgccgaatcaaagcgtgatcgctgatcgggtggatgcatgttccctgctcctgggtcgccggcaagctagagagccccgctccactatgcatccacacaattcccgctgcacgatgcctggtccctagccccaagctgctgactgcactaactccaccaccactgggctcagtcactgcttcaatccatccatgcttgctcatgatcgaatccttcgccgataaggctactcttaccttctttccttcctggagactcttgcaacttttccttcccagtaatatgctttcctacctgcagcgtcccaaatagtattctgtagctactcctgctctgagtcccctgatccagtagtgcatattgtcgtattttctccggtgggagcatgaacacaaatacaaacagtagtgcatattgttgtattttggctgtgtttagttcagcgaaagtttggattttggttaaaattggagatgatgtgactgaaaaattatgtgtgtatgacaggttgatgtgatggaaaaggactgaagtttggatgcaaactttggatctccagtgggtgcatgaacacaaatacaacagctcgagagaccccaagcctgaaatagcaaaggtgaacttgcaaattcctatagctacacgtctacacccagtcgccggtgaaactgccgcgctagctacactccacaatatcctcctcccagtacgtacgtacgctgtcgtctctggcgccgctgcacgcgagcacgcatgtgcatgtgggtggggtcaaatcgacgccattttgcagcagcatctccgcatgcagccgcgccaccaccaccaccgccacctaccggggcatctcccatttaacgccgacgccgcagcgaaagctggggaacgctgacgagaagacgccactgtccctccctccctccgcccatccatccatccgcctgcttgcctgcctgcctgcctgcctgtacgcatgacaagcagcacactgcctgcctgctgccgaagcatgcatgcagcggggtgtcctgtccctgcatgctgctgctgcagacgcatcagagatgacacagagagagaaagagagagagaaggcagctgtctactccagcagggagcagcactgcacatatgccatgcatctgtgaatcagatgggaagccttacataagctgtgcaggctgtggcaggccaggcaatctgaccacttctttgactcatcatgtaggggagagaagggaccttcagctgaggtagtagctcgtcttcactgttctgagctctggacggacactcccagcttgcatgccttgggggacaaaacatgtgctatcagtgagtgagttgagtgagtgaggagtttgttttggttattcatttgctgatcaggttttgcaggaatattaatggcaatagaaatgttatttcccctcgtagtaggagtaagtggttgccatgggcttcatgatgcattcaggcatgctcgcatcatgcggtgacaaaagtacaaacgttctacgtaccccgtgtacttctcctacaaagtactaccggctgcatttccaacagaatgtagaagtagatttgttgtaacctacctgtactcccaaacatactgcattttccatgcatgtacttcttaccttttaaaagaacgacaaacgctacacattacccccttcggacatgtttagattatagccaaaataaatcttaccaagtttggtaggatttattatttattgaccaaatctagcaacaaactaaacgtagattttttttggcaactttaatttaaaaagatagtatggttgaaaatggtattaaaagtgaacatgtcttcgtctcaatataatctaatagaatgaatccgactagaaaatattgtattttattttaattttatttattttgggacggatggagtaattgataaattgatgggagtagtaagttcaatttttcagtatgaatgcgtggcacatagtcaaaggacacagggaaagactgaaagaaacctttgtggatccatggggtgatccgaaagagtgctctgcaagtctcaatccatgcatgcagcctgcagagctctgcagtgtcacaggttcacagccgaaagagaggccttcgtcagtcagcagtcaccacctccttagttcccttctcctggtgtggaggtggagccccatctatctgttcccctcactgctgcagaaaagagaaaacaaaaacgagctgcattggagacctccctcttaaaatgtagtagtactactctactagtagtaagggggtgtttgggactttagcccctctctcaaaacaccccctaagcatctcaaatactaggtttaaggagtttttgagatagtaaaagtaaataagagatgggttgaggggaaaatagtgtaaaacttaaatgagagatgattataattagatgaaatatagactgatgataaagttgttctaggataaattttgtatgtttattaaaagcggcatagtcaaaagccctatcattatgggatagaggtagtactatttccgtccaaaatattttaacctgagtaagaatgtgacacaatatagtaaaataaatctaaatgaatatcctctattcaaattcattgtactaaattatatcacatcctcatctagattggaagaattatatcttaagatagggggaggagtactgattactcctacgattgtctggtagaagaaaaactcttagttctactactttcttcgtcccataataattttatttgtagtttcttttatttgtcccaaaataagttagttttaaggtaatcattgcatcgaagtttatgaaaaattgtaatatttttattgggagtagataaagtgctgaatagttgtattgggatttaataaaatagatgtattctttaatcctttttattttgtattgttacatgtgggatgagtgaaaagtaaaattattttggaagagaggaggtaaccttccggtgaatcccagttagtaagagcatgataagaaaagaaaagcaaagccaaaacagagcccaataattctctcttatctctgatgggtcaagcacatcatcataaggaagagagtcgatactccaggactactagtagttgctgctcctctgagtgtgctgtctggtagccattgatcattgagccagtgggttggcttatctgagccccaattgctggcccacatggcaggcaggcccatgggcccattgtgttggtgtcagtgggcatgcctccctttctccctactttgaccaatcaagtaccgttgggggtgcaactgcgtttcatgtctgtactgtaattattgtgtgtgtgcgcctctgcagggatggaagaaagctcgcgtatctctctgctcatgtgcgtcttttgttttgcaaaaacagcaccttttcggcgtcatttccttttgatcattatgcctaagtaagagaataattctctatcattgatgcaaatggtaaagctataatttaatttacttctgcctatgctgaaagtttgctttctttttttgcatatgcataggaagtgaagtgaaacattacagaatctcagatggaagtgaagtgtttcaaatggagatgatgaaaagtttagcctagacgtctagggcgacatggccgccacatctggatgcagagaatgcccatgctggtgtttgttcgtttggccactgccaagatttggtcctcttttttgttacaggaaaaagaaacagcattctcaccatcgagcctatgagccctgagccatcacatcggtgtcggggaggggaaaaatactagtcgtaccactactactgtacgggagtaaaacttgttgcgtctttcacctggaggaacagtttaaaatatgcacaaaatcagagagaaacctgaaaagccagaggtatacagtactgtacgtattcccttctgcggttctgcctgcagtttgctgctttctgccttttctttatcacgcagatgctgctaatctcacaagacaatatgtaaacccattgtgctggtagcatatcatatggcagtatccagcatatgacaattaaaaccttgctagttcaggttcaagccattctgggaagtttccccagcaaaacacatgcctcctcgtaaatgcactggtgatgcccgggttgagaaagcgatcgattcattcattcattcattcattcacacgctctgcctctgcatggaaatgaaatgaaaccacccaaccaaccagcagtttacatggaagagttgaatgatggtcgtctctggttaggtttttcacatggaacaaaatggcatgcatatacatatcaacagtggcgaaaagcctgcagcgcgtgagagagtacactgggtatgtttagttcacgttaaaattgaaagtttagctgaaattagaacgatgtgaagaaagagttagaagtttatgtgtggaggaaagtttcaatgtgatagaaaagttgaacatttaaagaataagtttggagctaagggtttgtttactttgatgaaaaaaaaaaccttactaaattttggcatgatttcttatatgctctaaaatttgatagtaaactaaatatagccactttttgataactttaccaaaatttgataaggttaaaaataacattaaagtaaacatgccctaattaaacttggccattctcctgcaacgcggcaagctgcgcctctcgcgtcggctcgtcatctttacgtctcccacccctttcactctctcaccatcaccaacacctggttggtagctgcatgccgcgcagtacgcacatactcctaccactcaatcttctcgctgtcttcttttacgtttgcgactcgcttttggtcagccttgctgcctttgaatcgaacggacgaaacacacacatgtgtgcacagtggtgtgcgtcgtcgcaggggcagggcagggcaggggcggtgtgggagagaggcttctttgtttatgagtttccgtaaagctggcggtcagagacagcagcaacaaaaggcagaagagcacagcagccacgctgcagacttcacagatgggtgctgtcccccattcccctcctcaccctaccacaccctaacctaagctacctgtagccctagagagagaaacattacagtacagtactcatactctctctctagctctagagagagaaaccaccgtgcgattaggagatcagcagtatccttctttcattccttagagcagttacattagcagactattactacctccgtcccaaaatataataacttttgcttataagcatattttaacgagataaaagttaagagagaaaagtagcaagctatagatctgtagccagctgcaacacggactacatgacgcaatatgtgtatgatatgtgagaccatatattaatagcatagtgttaacaaccgaatttggtaacatcagcatcaggaaagaagattagatcgaagcaaaatcgaaggcggagatcgagttcgaaaacaaagcaggaatcggctggagtccaaatcggctacgattaggatcggctgggtctgagtcagactaggtaagccgatagagccgattccggcaacgcagcttgatgtatgatatcgggtaggattgaggtgcttcaaggtgattgctgcatatggatagagtcctcagaagtcaattatatctattaattaggatgttttatgtaatctccttagagatacgattgagcaaaagtctggagcaaagacttatgttatcttagagtttgttagagatagtagtcgtgtccgttatggacatatcttgtaattctcgggtataaatagacccgagccctatgtaacttttaacacatacgttcaatacaatctcggcgcatcgccacccttttgttttagttttatttcgacgagttcttacttttgggttgagctgcatcgttttcgatcttcaacaaagaggtaaaacttgttatgacgacttgtgttctcgggattagtgctgccatctttacgatgctctgacctcgtttatgtaattcgtcaagttatcatatatcttacaataccgctatctaatctataatcggctaacatctgtctgtagagggcagccgactaggttagatatcgatgttgacttagattatataaggtatctaccactctatgaaacttccaatggcttgattgtctagatattgcccttcttttcatacttatagctccatcagttgagtttgatcttataagtcgtgattagaatctcaatctctagcctgccttctggttgccgattagggtagcatcagagtttcagccgatcttatctgatttaactatatttgctctatatgcttcattgacatgttaaatctgccctttatgtcaagatattgccgtatctaagtatattaggcatttgtttgatatattatacctattttaatatcctgatatagagtagtatcggagtattagccgatacatgctagatctgtctgattggctatgctacaaacatatatagctctgttattaatatatatttcgatctaggtgatttatactgtctcggcatggtgaccgatctatcccaatcacttgatttaagtatatatcgatataagaactatatattggaaatatctacagccgatcgaatagatttaattctttactgtctatttacaactgccgatcgattcacatatgacatcggctcaaagataaatgatatgtcatcggcacctagccgatcggctatcatttatagatttaaccgcggtttctttgcctttatttcttattgattacacgatcaaatcatgtcacacccaaatctggcaccgccgtacaacggcacctgataggagcatgtcgtaggaaaaacggcgcgaaccgcttcctacgaaaccgcgatcacagtaccagtccagcgctggtacccacggtgacaaatatgaatcattgcaatccttaaaaataaaaagaagacttatttaccttaacttaggttgtagctcagaatagcctaagaatacaaccgacgacgcgcacgaggaaacaccaacaacaacagcagcagcggaaccaacggtctaacacccaacaccacaggcgacggctggaaaccaggacgaaaccctattcttcacttcacttcatcttcaacttcacgacgaaggaactatatatatttatatagagcaagggtgagtactttcgtactcagcaaatcacgggaatttaggtgtttgatgcaagcttggaagagaggcaaggttgttttgcaaatcttttgtttgaagtccattttgaaaccactaagtgatttatttctttctaagtttgggccgaaaagtgacttgcgtctcgattcgactttaagagatgtttttcaacaactcaatttgtaatgtaccgacctcccgggtcagatcattacttctcggctcacagagccatttcacttgattaagcggctcctagagccttattcatgttctcgaactcccagagtccagctgcccaacaacacaacgatccgcttccactcgggaagccaagtctatgatgcccgcagacatcctgaatcacacagattcgtttcttgaccactcaggtcatccatctgccacataggctgattctagtaacgattcccaatccacaacaatttttcacaaagcacaggcaaacaaatctacgctacaggaaacacctcgcatccgcccatgaccgtgggcacggctgttcgaacagtttaataacctctgcagagggggtacactttacccacacggcattactaacccggatcacccagcccgttcagaacggccacgtatggagaccttgaggctttcatgacaaggcaattcgaaagccgacacaggtttaccatatgccaacgagaggggtcccagaccaacacccggttaggtcccagaccatactatgccaggaagcccgagggttctccccgataccaccccgttgaatccacatgtctcttggcatcatggctcccctgattagctaccggggtcggcttgacccggtcttggccgagctgcccctttctctcgggccgcgccctagccgcccgagggaagtctgtttcccctccctctttcttttcttttcaaaagggtttaattaaatcctttttcctttagaacaaaaatccaataatcttagaaattcaatatcttctcaaccgtatgtccgtttgactccgttcaacttccaaaactcctcaaatctcgatatctatttaatggcacgtttagaggtcaataatagggctttatttttgccgtttgttgagctgtcccgtttcgcgtgtagtttcggagcccgaagacccgtagtgcgaggatttcgaggatcaagctcaagatttcgagcaaggcaagtcacctttgatcatcttgcacctataatttaaatctaagtatttcttttccgcaaatattgcatgaataagtttaacacaagtatttcggccgcggcttgcgagatagcttgccggccacaatcctaattgctgcaattaccctccttgaattattgaacacttagatctcctttgtcgactgttgtgcttcgatgcatgggccttcgggctcgagcatcggaacacttcccttgaaatttaaaatatccaacgatgggtaaaacttggggttttataaaagacttggaaaaacccgacacctgggtaggtgcttgcgaactaaataaatttccaaaatcgtagatcggggaatgtaccgggagtacggtttcccgctcttgcacttaaggaccgttttctttggaatttcatccaaacataaggcaaatgtgaccacataggtggaatgggacgcccctggctgagtaattagctaatcaggggagccatgatgccaagagacatgtggattcaacggggtggtgccggggagaaccctcgggcttcctggcacagtatggtctgggacctaacctgatgtcggtataggacccctctcgttggcatatggtgaacctgtgtcggctttcgaaatgccttgtcatgaaagtctcaaggtctccagacgttgccgttctacacgggctgggtgatccgggttagtaatatcgtgtgggtaaagtgtatcccctctgcagaggttattaaactgttcgaacagccgtgcccactgtcatgggcagatgtgaggtgattcctagcgtagttttgtttgactactgctggtgaaattactgttgtggaatgggttcgatgtttgaaaaatctgcggctgatgggatcagccaggcccgggtggccgtttgaaagctgttggacgggtgccaaccttgaatcaattcaaaaactgatacattgcacatactccgaccggacgagacacactgtctcatccgtgtcgtttgagaagcactcacttagttgtttcaaaaaggagtttaaataaaaccaattgcaaaaacaacagcctttcttttgaagcctgcattaaacacttaattcccatggcttgctgagtactcctgtactcacccttgctctatgtaaataatcccccccaagttgctgaagaggatgatgtggatcctgctgatgaggagttcttccaggagcaagtcggctacgatgagttttagggtttcggcctagttcccaagtcgcgcctgtgatgaatggtccaagtcttggcttccgctttcccttttgtaatgcagttgtgacctcgggatctgtccacagcccaacttgactgtactcctactctataataaagagacctctgttgctatgatattctgtcttcctgtgataccagcactgtttcctgagactggtatcgattaacaggttaatttggagcgtcacaggctagttccgttcggggctagttcggggcgtgacaaatcaactggcacgctagtacacccaaaggcgagctttggacctgcactggagttaagcaaatctcccaggcctcgtgttttctgtcactacatagtaagcaactattgtataaattaaccattagattggctatagataaattggagctagtagtgggctatactattaagctttctcagatattataagccaactataaatacatattgaggagataaaagaagagagagagtagcagcgggctacagatctgtaaccagctgcagtacggaatctaaaacacaacatgtgtataatagggaccatatattaatagtgtagtatatgtgatatgtttatagataactatcgtataaattgattattaaagtgatcgtaaatgatttaaagcaattagttaattagttagctacaccactagtacattaaacttgctctaatactagtagtagtgcaactaggactgtagtaggagtatgtaatcatgatgttgtacttgctatcctgattaggagttgtgactgacgcattcataggacgagacagtatgattaaacggaacaatgactgttcacttctaatgacacattaattcgaccaaaagggtgtgcatgctctcacctggagtggtagtagtacagcgaagagggatcctgattttttatacggtgggtatcgcccaactggtgaccaacagtacatatttctggtgtactctacacaaagaaattgcacagttttttttctgagtatatatatatatatatatatatatatagagagagagagagagagagatgagtgtgaggtgggtgtggggtgggtggctgcaggctatctgcgtggggtgtcagagtctgcctgtctccctctcactgctgctgccatctgcaacctgcaccgttgcagtcaataataataataaacaataacattcaagtggggcctctcgctactgcgcatggtggcaccgtggcagcatccacccgcagggctcctctgacaccgaccagcattgcccattaactatagaaacccatagtgccttctactgctacatgcaccaactaccattcgacgcccgaaagattttactactaccctagaaatactgttcttgcggtaatattcagaagaaagcccccaaaaaataataatataacttatctgaaaactaaattgtgctcaaaattatttgaaatgtataaaaataaaccacaaacatcagcgctaagcctggtaatgtcaaagtccaaaaacaccatatattttgacaccaccatgttgtcgttgcgtcctaaacgagttgttcaccgagactaggccagaagtttaagatatcaacgaggctgtggtggcgctacgttttatcctccgtcaccattttgtgctaggtgagttgtccgcaatattagctaggaatttcgaagcttgacgagaccacaccaacactgtatttgatagagctcgatgagggatagcaatggcaagctctaggtgtatcgtccttgcaaggttcctttgcactaaccacttatcaggtggatgagtagttctatgctaagatcatggtttattttttatatcaatgtctgatgtggttcatcgttgaaactaaatttttccacaaagatcgaaccgtcaaaaatttggatagaagaacaagctatacgccatgcaaagggccttattgtttggcttttttcatagtaagccaaaacggcttattagagaataaaaataatttgtagataaaagttttatatatgtgttctcggtgatttaaaagccaatgccgtaaaagaaactacgttaaaaatatctcaaaatcaatgtcaaaattaagtttaaaaattcaaattttgtttttttttctttagttgaataggctatccgatgggagccaaagtttcccggtgacagtctagactatagagacgacgaccaaagcgcttacgactacagtaaatacggcatcaagcggcggtggccagttgctcgcgtcgtcgccggggagaggggagacgcgaggaacctgtggagtttttgcgggtgagattcctacggctgcgcgcgcccacgaggggggcgcacagcagattctgcagcgcactctctgctctgcctctgcatcttgactgaatgacctatcttctgtacccgggacataaattatcggagttaaatatccggaaactattcaaacaggccatcgttcgcacgcctacgtttttcttttaagaaaaaaaaaatatgtcctctgcttcgctcacacgcacgtactactacgtgggctgcttggttgcaagcatccttttatgacaaatctgtactgtgcggtagggttattttccattcttcctactcctacggtttgttcttgacattttttttcacaaagaaaaggacggaaggagtataaagcatgtcgcttgtccaagcaaaagaacagtagccagtggcaaacaaagccctgtttaattcaccccaaacttcccccaactcctaactttctatcacatcacatcacatttaaaactttcctacacacacgtaaactcccaactttttttccaaactaccaactttccccaaacttctccccaatttcagaaactaaatacaaccatagtaccactggacaaacgagtcctgagaatgaaagtgattgactaaaaactattatggccgagtttagtttcaaagttttcttcaaacttccaactttttcatcacatcaaaacttttctacacacaaactttcaacttttccgtcacattgttacaatttcaactaaggctgtgtttagttcacaccaaaattagaagtttggttgaaatatgaacaatgtgatggaaaagttggaagttcgtgtgtaggaaagttttgatatgatggaaaagtcaaaagtttgaacaattattttcgaactaaacacggagtaaacttccaattttatcatgaactaaacacaccctatgtgtaaatgtctcactgttaatgagaagtgaaagatctataaatttctatccggcctagaaacagttgaagtaataacatcactaccttaactaaagatgttgggtttttttttaaaaaaaaacacattataaacgtacacccacctgtaaacatatacactcactttgcatattcggttatattccgacaatataaatggcaaaacttgaaaggtgccatgcatagggaaaaaaactgtcatgctaaacaggaaaatacatacttggtgtcaactacttcgtgggttattatattttgacgaacgcattagtgttaattcacactataatatatttgttgaaatacttttcactaaaaacaccctaatcgctgaagcggtaaaaaaagattagatcttatttggactatagggctcgtataatatgtttgatatgtcattttaaagtttaattaattagataattaccttctagtttacaaatgtctagaacttcaataacatatctggttcatatgatgtcacaataaaatgccagtccgagtgattttctttctaaccgtcgtctaagccgtacatacgtaaaatactccatttgtttctaaatatttgacaccgttgactttttagcacatatttgaccgtttgtctttttcaaaaacttttgtgaaatatgtaaaactatatgtatacatataagtatatttaacaataaatcaaatgatagaaaaagaattaataattacttaaattttttaaataatactaatggttaaacgtatttaaaaaaatcgatggcgtcaaatatttagaaacggagggagtatatataagttagactcatgataatccaactctatacgttaatattgcaattttaaaaggtaaaatatactttttatgcaggactaattgactgtattgaaagatagttgatgcatttacgtagtagtacagtaacgttttatagaattcacattcgtttaattaaaacccaccgtttattaattagaaaatgtattaataaatggccgaaacctgatatttttggcaggcaggagcgcatttcgcagtattaccctcgggttttcttctggatccggaaacagcctccggctcgcaagtcttaaatgcgcacggacgtcgcttcccaccctcaccccacccttccccgcccattacaaaaccccagccaccgagagctctcccgctccactcgccgcacaccaccaccctcacccctccccccatccgcgtgatctcccgagcagctagagcgcgcgcccgcggcgcctgtactgcgagaccgcttcgctcgcttccggtcggtgaagaggcggtcggtcgcagctgaagtagttgttgcagagatgatgatgatgagcggtcgcccgagcggcggcgccggcggaggtcggtacccgttcacggcgtcgcagtggcaggagctggagcaccaggcgctcatctacaagtacatggcgtccgggactcccatcccctccgacctcatcctccccctccgccgcagcttcctcctcgactccgccctcgccacctccccttccctcgccttccctccccaaccttcacgtacgttacacacatcctcctccacgtacgtacgtacgcgttgttgccgatgctaacaaagtccatattgtgattggtgttttctttggaatgcagtggggtggggttgctttggcatggggtttgggcggaaggcggaggacccggagccagggcgatgccggcgtacggacggcaagaagtggcggtgctccaaggaggcgtacccggactccaagtactgcgagaagcacatgcaccgtggcaagaaccgttcaagaaagcctgtggaaatgtccttggccacgccgccgccgccgtcctcctccgccacctccgccgcgtcgaacacctccgccggcgtcgcccccaccaccaccaccacctcctccccggcgccctcctacagccgcccggcgccgcacgacgcggcgccgtaccaggcgctctacggcgggccctacgccgcggccaccgcgcgcacccccgccgccgcggcgtaccacgcgcaggtgagcccgttccacctccagctcgacaccacccacccgcacccgccgccgtcctactactccatggaccacaaggagtacgcgtacgggcacgccaccaaggaggtgcacggcgagcacgccttcttctccgatggcaccgagagggagcaccaccacgccgccgccgggcacggccagtggcagttcaagcagctcggcatggagcccaagcagagcaccacgcctctcttcccgggcgccggctacggccacaccgcggcgtcgccgtacgccattgatctttcaaaagaggacgacgatgagaaagagaggcggcaacagcagcagcagcagcagcagcagcactgcttcctcctgggcgccgacctccgtctggagaagccggcgggccacgaccacgcggcggcggcgcagaaacctctccgccacttcttcgacgagtggccgcatgagaagaacagcaagggctcctggatggggctcgaaggcgagacgcagctgtccatgtccatccccatggccgccaacgacctcccgatcaccaccacctcccgctaccacaatggtgcgtagagtactaaccttcgtctccactgatcagaaccgtttcttgattcttatggcgagccgtgctgacgatgatccaacttgcttcctgtttggtcttgtgcaatctgcagatgattaatctcttgaagaagccaagaagtgatcaacacgcggaagaaatcaacagcttctttcacggcgtgcgagctgcatgctgatgctccaggatcgatcgatcgatcattgcatctccaaactaatcacgcttcgatctttcaggacttcatcaatgacaggccgaaacctcctacgagttctctgatgatattcttatttttttcccacttcttttcgttgagctttttgtaatgttgcttcgagtgttactcctacattttctccgaaatggcctcagaatgatgcggtcgggctgattaattaggttagactcttcctgaaccaactaggaatagattttctgcctggttcctgtcagtccttgtaatatctgcagcagcttgtgagacaagcgtgttcgcttttgtgaacgccctttttcttctttccgattcctctgcctgtgatagtactcgctccgaaaaaaaaaaaaaaagcaaaccgtggattcttgggtcaacgtgtccgttttatattgtccgttttatatgaaatttttttataattaaaatttctattgttgttagatgataaaacatgattaatatgtgacttattttttttatatattttttttaaataagacggacggtcgacacggttttttttttttttaagaaggagggagtaagtcacatctctggattctgctgaaaagctcactagcgccatcctgcttcagagaatactttatgctttctgacaagtcggtgtaggagtagtagtattgctaggtgtactccactcccctccttaagtacattaccagtgcaacgtaaaacagctttgctcctgagcaacggaaatgcttaataccgtactcttgcacttcgtcagttggttgagtacactgtgcaagtaccaaattggtcttcttaagtgttactactaggttgatcacttgttgaaccgtttaggctgtcgatcattagcattcagggttatcactgcaaagtcccaaacaaaaagattctcccagggtctattctcccctgaaccgttttcccattgaccggccaatgctgcaagaagctggatgcagagctaggagtagctgcagtgcccccactcctgcaccttcctgcagacactcagagagagggagagatggaggactgtgatgactgaccagcacccctgctttggtctccatggattcaatgccaactgcactgcaattgctgccggccccctgagacaatgtcaggcgctgtcagctctcgcgtccatgcgattgaatgatccattgctggcgtttggaccgtcgcctctcctcccctgcctcgcacacagtctgcagcgcatgcatgcatccatcatgtacagtgcagcattggacacaagcctctcctccttgcagctgcagccttcaaagcctgcacttgctgtctgccgcgagacggtgtctgccggccagcaccgtgacagtctccggctcaagtaccggtagctgtgccactgacgcgcgggggccacctgacttcgtccaaagcgtccacagcactactactggcactgcaccacagggattgccttccctgacacaagcctccacatggagtaattgttactgaagaaattcccagaaattacatgtcccgcgttacagctttcggttcatccaacagcagaaattaacctgagagagtgtttgggaattagtactaaactttagtttctcttctagagacttatgttttttagaaagaggctactcccagacaccccctcagttttcgtagtactggcacctgcctatatgtgctggttttcgacgcgtactctactaatctggagtttactccaaaacgaggaaaaactcagctgtcactgtatcatcttcatcaccgaatccagcggagcacgtactgtatgacgtatctgttctgacagcgaagttgaacaaatccacggcgcccagtattcccacgacagagcccacatgagcccgtctccagcacgtacgcgtacaataaaaaggctgtactactactctgtatacacatctgcggctctgcacccatctcgtcagcaaaacgaaacgcatgcatagagaggagaacgttcaaaaccattcattcatcaaccggaggatcagctgcacaagcaagccacagtgcagcatgcggtgaatcgcacgtggagaggctcaggtgaccccacgacttgcacggttttggctcgcaatatcgcgacgagacgaggccgtgacggcatgttattctgctcacactgtcttcgcctcccccactaccacgaccactcgcgtgttaagcccgcatgtgcttgcacctgatcccgtggcacgtactccctcggtcaaaaaaaaaaaaaagagaaagacaaacccagaccgtccgtcttatttaaaaaaattataaaaagaattaaaaagacaagtcacacataaaatattaatcatgttttatcatctaacaacaataaaaatacgaattataaaaaattttatataagacggatagtcaaagttggatacggaaaactaggatttgtcttttttttaggtggagggagtaatggagattttttttcccgttttggacgggttgttcagtcagtcatggctgggagaaaaggctgtggagatgagatttttagcagcggtgcacacatgcgtgcacgggcaacctagacagttgggattttactactgacaggaagaggttgaattaaactagtgtcgtcattcgcggcaactctgagttaggacagactgattgcccagattattcggtttttagtgtatcggcgagggcatctgacgccctcgggatatgaggccctgcaacgtggtggtcgcgggcgccggagttctctcccggttagtttacggagcaggaggaggtcggcgactacttctactacgctctcgttcagtttcagattcttaccgctgtatcgtggcgtttagtttaaaatccctcgcgcgtttggggtgaagggatccgatgtgttttttgcagggatgtggcctggttttccgtgtgtaggggagggagatgtcacggcgcgcgacagcatttctcgtgacagccgcttaactaaacgcctcaatctgagagctggtcgtcagggatcagcatctgtcaggaggccgcaaccagtggttcagctgcaagtgttaagaacagtaaatgatcagctggtggtggtagtagtgctgctgctgctacttgcagtccctgcagtgtcagctgaacgtcaggggacccttcaattcgctggaattgtactgcggtgacatcatacaaaccctggaccaaacgaaacaaaactaggaccttgatcacttgatgcggctcggcttggttggctactggatttaacccactctttgctttcgtccaccctcgatggccggtttccagttgagtaaacaatgtacagcttgtgttgttcacaccaaaattagaagtttggttgaaattggaacgatgtgatggaaaagttagaagtttgtgtgtgtagaaaagttttggcatgtttagttcacactaaacttcccccaaactctcaactttctatcacatcacatccaaaactttcctacttacataatcttctaactttttttccaaactaccaactttctccaaacttctccccaatttcagaaactaaacacagcctttgatgtaatgggaatgttgaaagttcgaagaattattttggaactaaacacggccacagtttcttcatagatttgttgttactactccaggagtactatcttttataccggtcaacgcacagcttacagcaaaatgcaatcccccccccctgctagtgaacagtgtctcatatcccatccaatgacccaaaacctgcacctgattgaactactcaatgaggctgtatttagtttctgaaattaggaaaaagtttagggaaagttggtagtttggaaaaaaaaaatagaagtttatgtgagtaggaaagttttggatgtgacgtgatgtgatgaaaagttggaagtttgggggaaatttgatgtgaactaaacatggccgcacaatgatagaagtgcaatgtgcaaaatggtaagcaatcagccaatcaccacaatactggaccgcgttatcactcatcggtgtcaaccgctgcggcaacgtgggccgaggcttcgaattcgccgcgccgcgtgacggcccatcagaatacgagatgggccggcccacccgcagcgaactcatccctgcccaggccagcccatccactctgggatattgtggccgtccgatgcgatcatgccaaatctatccaacggctggtgtatctgaagcgtgtcgatgtcttcctccgaaaggagcagcctccacatcaaccgcctctctcattaattagcggaccatttctaattcacccctcgcatcttttcgaattttcgagagctcaaagcctcgaaccattcccttcttcctcgtcccaatccaagttccaaccatccagggcgggggttttcccgttaatccgcgcctctccgtgtcggattgaattgaagcggagagggggaggaggaggtggaggtggaggtggaggagggcggcgggtggcgatggcgatggcgaggctgacgccgaacggcgtggcggcggcgctggcgggggacacgaacctgaagccggtgctgcagatcgtcgagctgcggggcgtccaggtcaacggcgcgggcgtcacgcgcggggagaggttccgggcggtggtctccgacggcaccgccgcgtcctccgcgctcttcgccgcgcagctcagcgaccacgcccgatccggcgccctccgacgcggcagcattgtgcagctcagcgagtacgtcatcaacgaagtcggccccagaaggttttgttgcctcctcctccactttcccccccattcccctgcctctgatcgatgtgtgattgcgtgcgatttttggcccgtttcgttttagggttcatgcttgcccctggttttatgtgtgtcagtctgcgtgtggtttagattcccgctttcagctagtttgcaatttaaattaatacttagtacttgccattctgttggtaaattgtcgatgagcttcatgtttcctactagatactagtagaggtgcatcaaaatttttctgacaatggttttgtttatgacatcatttgatcggtgcttgttaaccatttgtccaattgattttaattctgatttgaattattattgtcagaaagaggcctcggtattgcagtactaatcagtggtaactaaggctgtcctgtgacacaaattggtgtttgtcgatactcagtagttaattggctggcattagtattaacgattacaaaatagtgtgatatatgtgcttgggtagcctttggtgttcgccatttctggcaggtagcatgtcaaacgatgaaggtaatatggtcagtttgactactacacactttacagtgttgtctgatttagttcactaatttagttgtgtgcctttttttctctagccaacaaatcgccatgtttgggtgcatcgatttggccaatgtagttagatattgatcagcattaatgctgcaactgtctggtgctgtgaacagtttgggtctaagtactaagtattttttatcttttagctgtagccattcagttcaacacaacaccgtactaaatgcatttcttttgtatctggttcataagtaattggaagcatagttgtgtccattcaaatcatgttggcaaggcgacaaatgcaaaagtgaagataagtttctgaccaaaaggtgttgtaattaaacatagtattcatgtagcagtgtgaatcatcatattctgagccttttgcattcttattttcaactgatctactggttgatagagcagaatcaagaattgttttttgttggttgagctgacttgttgcaatacctgtaggattattgtcattctgaacctggaagttcttgtttcggagtgtgagataattgggaatcctacagcgctttcagaaactggatctcctatcccaaatccgacaagagtagagcaatttaacggagcacctcaatatggtttgatggcagggaactcatcaaatacaaccacaaagcctagtgacaatgttccattgttccaaaattcgatggcaggaaactcctctaactttgccactaggcccagtgacaaagttccggtcttccaaccaacagtccagccatcttatcgccctgcacctaattacaaaaaccatggagcaatcatgaaaaatgaagcccctgctagaataatccccatatctgctttaaatccttatcaaggccgctgggctatcaaggctagagttactgccaagggagatatccgccgataccataatgctaaaggtgatgggaaagtattctcttttgacttgcttgattctgatgggggagagatacgggtgacatgcttcaatgctcttcttgatcgattctatgaagttgtggaagttggtaaggtctatgtggtatcaagaggaaacttgagacctgcacagaagaactataaccatcttaacaatgagtgggagattttattggagaatggatcaactgtggatctttgtcctgatgagaacagttccattcccacccagcggtttgacttcagaccgatcaatgaaattgaggatgcccagaacaatgctatccttgacatcataggtgttgttacatcggtcaatccttgcaccacaatacagaggaaaaatggcatggaaactcagaaaagaactatgaacctgaaggatatgtctggtcgaagtgttgaggtaaccatgtggggtgacttttgcaacagagaaggctcacagcttcaaggaatggttgaacgtgggatctttcctgtgctggctgtcaaagcaggaaaagtgagtgatttcagtggcaagtctgtcggcacaatttcttcaactcagctcttcatcaaccctgattctgctgaagctcatagtctcaggcaatggtttgatagtggaggaagagatgcttctactcagtccatatccagagatatcacgcctggagcatcaaggaatgagatccgaaagacagtagcacagatcaaggatgaaggtcttggaatgggggacaaacctgactggattacggtgaaagccaccgttatattcttcaagaatgagtccttcttctacacagcttgccctaacatgattggcgacaggcagtgcaataagaaggtgacaaagagtactaatggcaattggacctgtgacaaatgcgatagggagtttgaagagtgcgactacaggtatctcctgcagtttcagattcaagatcactcgggaacagcttgggtgacagcattccaggaggctgggcaggagttgcttggctgctcggcaacagagctcaacgcacttaaggagcgcgaggaccctcggtttgcagacaccatgctcaattgcttgtttcaggaatatctgctcaggctgaaggtcaaagaagaatcatacggcgatgagcgcaaagtgaagaacaccgcggtcaaagtggagaaggttgatccttcgggtgaaagtaaatttctgctggatttgatctccaagtcctcggcgctacattagcagactgtgctactctatcagctgctcgctcgtgcgtggtgaggtgagcgaggtgaggtgttgcagtgcccatagccctcgccctcctgctcgatttttgtgccggtactttaatattaacgccacttaatagtttatatccagattagtgctttaatagtttatatccagattagtgctgatatttccatttttgtgccggtactttaatattaacgccacttaatgtatcagcttttatacctttttctcgatcaaatgattgccttctagctgcagtgcaatttctcccttagttttggtttgtacatgcctgcaaagccttactctgtcgcgactaagaaatctcttgtgctcttccatgcaatcgaacatctgttttacattcgcaaggctattaggacttgggttagatgcaaacaagcggatccagagaagaagttaatatccgtgcaaacgaaaaaggagcatttattctttcaataacaaggtgtttaaggtgactatgtcaatctcaaggtacgttagtcaaatctctcggagaacataggaagtgttcgtgtgtagaaaaaggagcaaacaatacatacgtcgactctttcttttgcacgagaacgcgagtcgcgatcacaactttgctatacaagtgtggtattcacagacgtccaaaagcgtacatcaatctcagtggtttccccctctatttgcatgcaacacgtggatcacaagaaacccgaaactttcccctgtacaaccgtagtgctctgccctgaaaacttgatcggcactctcacgtcgccagcttgagactgcatctcagccagtttttttactcgtagcagaatcgacactggtatcggtatggcagaaggattgctcttccgtggacaaacaccctgttcagtggcaaagagaaagttgggtaaataaatcaagatgcaaagcaaaggggaaaaaatgccagaacgtgagaaagtaggtcgaacagaacagcctgttcatcatacatcgttttcagtggaaagttgtgtctggctggccctgatcagattccgccatttgtcctgaataagcatcatgattcattagaagaaataaaatgcacgaacaaacctaggagttgaaaaggcaattgcaccttaagatccaccgaggtgcggtacgaatatgatgagaaggctagtcttctaatctcggaccatttgccagccccatatcgggccacaccatcgaccagcttcacaacctcacacaatgtccatgctcgatgatgcttccgcttcccaccccgctttgttttgggattgtcatcagagtcgcaaaaatccttgtcctgcagaccctgaacatccttttcacaagatgtttctacatgtactcctttcttcccagtgttcttctgctagcaagttgaagaaaaatattatataacacataatacagaagtagattacacagcattaagccattgaggtactatgtgtttcaaatatatttctagtcagtacttcattctgaagttggattttcactatattgtccaacatgaagaaacatcatactagtggaacttctatggctttgcttacatggttcttccgttcaccttccttttccaaattcactacatctgcagcaggggcctcagtacattccacagaaggctcaggatcctgatgcaataaaaaaaggattcaggtagctacattgagataattataccaaatctaatagcgtatgacacatgaaaatatggttttgtcctaaattattctgaattggtatatggtgcaatatggtacatcagatcaaatggaatattggcacaatgatgaggaaactatcaaataaagactacaatggcaaaatcagttaacaaaaagttcagagatttcccacatttaatttatgaaatatagcacacggtgtttgtaggaagtaccatgggcaaagagtgaaattgtgaaaaagaaaattaataatctgcttgattgaaaatgggcatgagtctttagttagttggcttccaagaacattttcccttagataagtttcttaggtcagatgcattctgagcaggaagcaatttacaggccaaaatgcgttaacataatgctttatggaaatccatattattttgataaatagagaaggtacttgcaatctcatatcaaaagaagaaattctaaaaaggagcagaaaaaggaagcatctaacataaaaagaggacatccctaaaatagttccaaaaatggagtaaccaaatatattgttggtcctgtatacttgtatagtaatcgaatatttgcgcaaatgtcacaatgataataaatggtagtcaaattgtccagagctggaagattatataatgcataggtagacaattaccaaaaatggaatgaagttactcctagggcgcccccttctcatccttgaaacataaggcacatgcacactacaccctccaagagtatcttctctagtaggataggctgtgctcaacgaatcaacctcatgcaaaggcgctatccgtggtctcaataacacctcatcatatacatgcctttttccaggtgaagaaagtctcccagtggattcatgagtgtcaatatctgagagctcctcaatgtatctttttgttggctttctaattctcttagtagttccttgttcggcaaaaatagttacttgtggttcatcattatctgttggtactcttttgagtctcttggacgatctctgttgctcctcactatgataggaaagacttgatggtaaatctctctcatgtccaggattcattacttggtccctaaccaaattagcctcaagttccatctttggtattgcttcaaccactggtatttcttgtttggcacccatggcaataactttataatccctaacaacacaacctgaacttggaacatcacatgaattgatcaaccccattgcaatccgtcttttgagccatagcttgtccttgacagtagtttgacgcccaaatgtggctctaaatgcttcctgaagttctctcattgtaagatcatccaagcagacttctccctttaaaatggaaaaatcaggaactgaactagtaaccccagaaacagattgtcctgcagatgcctcatttacaggtttcgagcaggcatcagccttttctttatcagaagaaaggtcatttaatactgttgattttgtagtctcagtcgaagcattgtcctgttgggcaatgatatttgccccttgttctgtatttagtttatccagctgctggtcatgaacagctgaacaatttgaaggaagaactatcgaatcattcaatgtacataacctgtcttcctgtgaaatgatatgcatctatttagtgttacatcaacttgaatatgtagattgaaagaagatgtatacaggtgcatgtttagtggatggttttaagggaagtgctcaaataaaaatagattgccctgggattgtatttcacacagatcaatctcttattaccacatctttcaatgatctacagtcagtcagatatgtctcaccgcatatcctgtgttcacttaaagaactcagcatcttctcattacattgaagctcatcccatagttttgatccatccatccatctctatgtcagttcttgatgacgataaaaatatgttcctaactagtactaaacaaagttgttacatacaaaagtggaatttgttgagaccgcatacaattgaactttgaactgctaattagacaaaaaagaactaatccatatttttaccatgccagaattagcttgaaaaaaatgaccacagaggtacctaagaacaaactaaacctattatctaatagaattaacatactatctggtcataaaatgcttatactcaatcgaagatacttcacttcgattagtgagggtattgaatgaaacagaaaataggtttagtgaatcatgttcatgatgcacaatggataagcaatatacctcataggtttagtgaatcatgttcatgatgcacaatggataagcaatatacctctaagccagcatctaacttttgtgtctgtacatctgcagtgtctaatttggaaggcccctctgtgaaaatatagtaataagtcaacatctcaagtaatcaaaccaatcgaatcaattcattaatcatgctagcttgcaaactacaatttatcctcacatggcatgatattcagttatcgatctaaggaagtatgatcacccaaacagaaatgacaataaagtagaaattgagatagaataatatttctgagggcaccttcaaactcaggcttcttcactatgcaatcattagtaaaatattcctccacatgtgttacatcgtcaatagaaggcagatcatcatcaaccttctcatcatgaaggaaagtttcaaactgtaagacctcatcctccgtagcaggaataagtgttccatcaccttcaacctgaacattttattttaaagaaaatgtgtttctcaaagaactgactaaacaattggaaccaattatgtatattagtgtatagccaatagaccctatgatgagaacttacccgaactaactggtaaacaacaggatcagaattgtcattcttatcaaagtcattatcatcacttctgttgtccagagcatcttgtggaccacccacctccatagatcagtacaagcttcatccaatacccttactaatcgaagtctaccaaggtgaaattctacagtcagctaataagtttaggattaagattaagtcaattaagtaattcagcaatcctggagagtagagagaacaaatataaagaacatttgcaaggatttatgactaaacaaaaggattcaggtaattgttggacagactattgcgatatgatccacgctatctttaggcaccactctttttcccctattacaaaatgagcaaatccatgtgtggtgggaatgacaaaagcgatcacacaccatagtgagatcctcaaaatcccaccaaaaactactgaactggcagacaggggcggatccaacttgggacatgggggaacaaacaaactgtttcttgtattaaggttaaggctctgaaatcaatagaagaagcttcttccagatctagaagagaaactagggttaacgcaagcaaattccagacaaaagtactcccggtgggagagagatgaaccagaaagaggatgtggatgctcaccaggatcccctccccctgctctgcgcgccagacggagatcggcgcccctcccctgttcagccgcgagatggcgcaaggagcggaggagacgagacgggggattttcttttacgcgaagggaagggggagatacggagatactcgagctgctccactctatctcagtttttttactttaaaactgcacttaaagtttgagatggataatcttgtgctacttcataatatgatatttcgaaatttttgttcaattttgaacactttttgttccatggataattgcgtgagttaattaaaaaaattatacagtgataatggagtctaactagagggcgatggtatattatactccctccgtcctaaattataggcgtcctccttttaagaaaaatcaagctcagtaacttttaactaacaatcatactaaatatatatacgctaagtattatacatgttacttcctccgtttcacaatgtaagtcattctatcattgcccacattcatatagatattaatgaatctaggcacatatatatgtctagattcattaacatcaatatgaatgtgggaaatgctagaatgacttacattgtaaaacggatgaagtatatcactagatttatattttaaagtagtttcatgtgatgctaattttatattcgttggcaacaaaatatagagtaaattaatggttagagtatgtcagtaaagaccatgtaagaaaaatacatgccttataatttgagacggatggaatagaagttaagcaaaatacgatatcatattatataacgagtcaaaatcagtgacacaatgaattctctttgaaaaataatatagtcgaatcgttttttttattttagtcataatagaacttttttttacctaaacatgattgggggactttgagagaagataggaagaggggataatgtcactagccaaaacacatggggggaggggaagttgcttacatccatggtatgttttgataatatactattattattaattttgttcttcactgtaatacgatgtaaaactaaaaaattaacatatattactatttcattattcacttttcttcttattttctcgatcttttttattttcaatgacaatattgctagaggtccgcggagccgataaccatgtgggggtatttcaatgaagctaattttgcatagtagatattgctaactattatctataaacttagtcaaatttgttt

SEQ ID NO: 5409 - DNA, 48176 bp, Oryza sativa
  unsure (1)..(48176): unsure at all n locations
acatatggtaatgcatcgatcaatctgatggttttgcaaagatcacacaaccttaccactgacaattccaaattaacatgtgacagttcatttaacgacaagcccattagggagacagtagctgggccactgggtaaagaactgtttgagaaagaacaagaagacctgctctccgacctgaatgacattccaaagaaagcctgtgaccgtcgagtgagaagctcatcatcatcatcatcagaaacaccttttcttgcaagattacatatatatgctcactcatgctaaccattcattctgtcactgaaaaactgtttggtgttttcagatcaacgaattcgtgaagcgttcgaggtcagccaaggtccatgctcacataatcagccacctgaagaaggagatgccggcgctgatgggcaaggccaaggcgcagcagcggctgctcgacaccctcgacgagcagttcgccaaggttcagaaggagctgcacttgccggccggcgacttccccagcgtggatgagtacagggagacactgagcgcctacaacttcgacaagttcgagaggctgaagcccaagctggtgcagggcgtcgacgacatgctcgcctacgacatccccgatctcctcaagagcttcaggaacccctacgaatgaatgagcaagcagcagcagtcagagaaggcgtgttcgaccacaatacaagcatggatctttcttgttcacaaaaaaagaatgtgatccgtgaatcgtcaatccatctcttttgtgctccacgaaggcgcgatatatggctttttgttggcgattttcttcagtcttctgcagtgatctctgaagaaggcagtgtgacaggaatgtgcaaagtgaagccgattggaaagtttggaacagcgttaaactgggcttgggcttgcgagatcagaatttgcaatgtgctcggcccatgagaccaggtgtgtgtggggtacagcagcacgagtcgcatatgtaatgtacgggcgtgttgcgatgcgacacggttgctcggggaagaccgagaagagccgtgaggaggaccgtttacgtggtcgtaggtcgtagcatggactcgcgttcgccgtcgcgaccgatacggcgccacacacgcgcggtcgcaccgcacccaacccccgattggaccggagggaggagagagcaagtgcacgactgcaagagattcccgtacaccacccgtcagattcccccgtctcctcggctaaagagttcgcacccaccaaaccaaacaccacacgacgcgctcctccctctcgctgctgctgctgcggagaacgaaggagagaggaggacgagctgcgcgggcgccatccagcagcggctgcgaacagcaacgtcgtagccgacgggagcccgccacctacccgcaccaacccgtccccgaggttggcttttggtcgagcagttggtgggcacctaacccggcgaactccggctgaagtaagtgcgagtgagtagtagtagttgggggtgaggaggatgaagaagttgtaccaggggaagggacggagggtgcacccggcgccggcgcagcaggcgcaggcggatgctgctgcggcggcagcggttgtgctgccggccgctgtgctggccctggcgtcggcgctcacggcggaggagcaggaggtgctcgcctacctgctgtctggaggtggggcggccgggggacgccgccgccgccgcggggctcacccgccggagatggggtgcgggtgcttcggctgctacaagagcttctgggcgcgttgggacgcgtcccccaaccgccacgtcatccaccgcatcatcgacgccgtggaggaggcagcggcggcggcggagctggcccgccgcgccgccctccccgccgccgccgcggcggcaaacgcggaggcggcgactgcgaggaggatgcaagtgccaccaaggaggcggatgccagcgtggaacaccaccaccacgcctgtggcttcgatggcgaggaggacggcgactacgagggcgatggcgacgacgaggaggaggaggaagagggcgacagcatggacggcgatgcggacgacgagacgacgttgagcgagggcgattgcagcagcagcagcagcagcaacgccgagaagagcacggtggggaggctggtgcgcttcatcggggagaaggtgtggggagcttggaactgagctcctcctcctcctgcagctgctgctccccatgttcttgtagattaggagaaggaagaagacgaccaagaaggtcaggtcaaggtcagtatcagtagttgttttgatcaagagcacctcagctctatgctccttttgctgttctttcttttgatttcttgcactctgatgagcactgaggtttggagggaaaatcaagatggtgtagtgtaatccaatccaaattacagttcttcccttcaatcaacctcactgtaccatatttttgctcctttggttcaacaatgaacttcttttgcaagagaacaatatcatttccatttcttctccttgtaatttaggagtagctgtttttgcattgacttcatggtactagcatagcatctggttctgatggctgcatcatgtgtatggatggaactgttgagtgattcctactgcaatggagaggaatgtttttagttaattaaacttttgtaaagcttgagtgggcaagaaatcctcttttatgggatatctgcaaatggaggcagtatcaagttatgcttgcctggttgtacattcctcctctattaaggaaaagcatatgtgcaaagccaattgttttttccatgatcgttaagcgtgttccatgcactagttggggttcatctccctgaataatggaatcacagcagcatccttgatgtagtcaattctaacagttccacaggcagtgtaatagtatctgctaagcaacatgttttcaccatctttttgaagcaaggcttgatcacaatcttgaatgtggtaaaagaacagcaaatttgaccaacatgtcttcagcatctttttgaaagaaggcaatgttgttgtcacaattgtaaatgtggtaaaggaacatcaaatttggttcagactccttcatggataagtaatcaagtactgcagtggtgttagtccctccttcccaaacaccacctgggtttttttccagccaaaaaaaggcatgttttttcatgttaaattttttacttctcctttttgaattttagtacatttgtaccctttttcttttcagctaccctgttggacggctcgaaaaagaagcattagagctttcctcttgcactgcactggtactcttgaaaagaatgtgaatagaaattagtgctacttgcaatgtgcaaattgcaaaacgaaagttagccgtgaacgagctatagttttcacccaaggacgtgtactccacaaaatttgttagtatttcctttagtacaatcagtgcaaagctttattgaactttaatactccttgccaccactgctgagattttacgacttctttagttcttcctccatctcatcagtgacacattgatgtgctactattaagcacaagctgagtaccaaatgcaaagggagcccgtgtttagatccaaagtttggatccaaacttcagtccttttctatcacatcaacctgtcatacacacataatttttcagtcacaatcatctctaattttaactaaaatccaaactttgcgctgaataaacacagcctgactgtcactgttatcgtagtactacagtacgagatgaaggacaggaagcaggttgctgacaatttatgggctctgcactgcacctctctctgtagagagatcaacaagctgcagcacggagaggcagaggcagaggccggttggaaaaagaaacgagacgtacaagaagaaatgctgcatttgatggctactactgatgttttcgatcggcagtttggcaggcgggcgctgctctgcgaagatgcaaaggcaaaaagaaaacgagagccatgacgacgccgcagtgcggatgcagaggcaggggacccttgtatgacggaggcatcagtatacctcctccattattgggctccatttgctcctgcgagatttgatctcaaattcgatttcgattttggaggatggttatcatagctcattcaattttggagtagcttgaattgaattctcccgtcctaaatgtcattcaattttgggggagtacgtctgcactgcaagtgtgtgtgggccaaactcgggttaaatnttgatcggtcgctctcactctcgttcagcacagtcgccagcgacagggacagtgcgctccgtggagaggccaatggtcagcggcgccggagccctgaattgcagtcagcagcatatgcgtccatcattttcaaacgcactgtttcctatgaatttcttacgaaaatcttctcaaattaggccccgtgagttgtatgcagtgtttgaaatttcggaaatttcgcccccaccgaaatgctaacatctcgcccgaaaatttcggttttttgtaattttttggtgaatttgatcaaattttattcagatttatacaaaatccgtcaaaattcaaaaaatttcgtacgattttttttctgaaatttcggttctattgctcagctgcggcagaaatgctgatttcaaaatttaaaaccctggttgtatgaaaaacacaaaaattttagaggattttagttctaaaaaaatcctacaaagatatttgaaataaaagattgaattcttattttccttaaaaaaattttatgaaatggacaatgctatacaaatttcgaagaaaagttaacgagagcttaaaactttctgaaaagttgagtttatctctctcagccaattcatatctttttcttgctatctaactaaacaatcatgttttacagtactccgtaatttttctatcaacatttcatgtttttttttctattcatgtggtttatttaatcttttttttgcggggatggtttatttaatcttatgttttaaacaaagaagactaaagtacatctaaacctccaaaaatgttcgtcttgttggattgcagcaggaagcatttttgcctaggatacgaaggtggtctcgacgacgaggatgcgttcttggctgtacctgactagcactacatacatactccaaaattatggagtatcatacagtttgtagagtaaagtagaggcggtgaagatgagacaaaggggagcggtggggaggcgaggtgagatggtggcggtgagcacaaggagcgggaatggcgacttgggcttttgtacgcgttggtattgtcgaaaggggaggcttgctgaccggttgggagaacgcgtcgccgtcgtggtggtcgcgtttttctactgcaacatatagcgtcctccccgtcgcctgttccccgtgctgccgttgccgttctcgtcctccgatgcttcttctcgtttaagattttcttccctaaatcgcaataggttgggggtacaaaaatatcgttagctggtggaacggttggcctaattgggcgtcagcttggatctcgagagacatttgatacatgctgttctggaaggaaggattgatctagagacgaacacccatcgtttcgtttattcgcggaataagacaaacgacatatttacaaataaaaagtaatttgtgaaaattttttttatatacatgcttttagtgatctaaaagtaaaggctgaaaaataaacatcgatgaaaaaaatctcaaaatcaactttaagtttaaagttgaaaatttaaaatttagctgataagtataggcataagcgaaaagataaggcccgaagtgtgcttagctcaatttatcgggtctcttgcagtaaaacttgaattattctagtatttatatgtactacatgttaattttgcaagttgtgtatacgtatttctaatgcaacttgggcagaattgcattttattccaaacaaactgggggcccgaaatacattttattccaaacggtaatgacttaagttattccgaaattctttaagtagacatctacgatcaggccaaataggtcaagcggagtagactacgaattttcatgtacgtataacatcctctgttttgaaagctaaagttcgaaaaaggcactattcgttcaccactcttcacaaaatcattggcagcagcagcaaagtcaagtgtctcgcgatcacacatcgctgaaatggtcagtggtctgcacacggaaacgatcaacttgacattggggtttaaaagtgatgacaagtttaaaacctccgaaaggaacacgacagttcagtcacttaagtttgaatttgtgcattaaaactttgaaattgacatcgttgaggaacataacacatgacagaccaaatgcttgcttgccaaccaaacaacagtcctgtagtcatcctcctatgcatccaccgccagcctatgagtctcttccactcaaagtcaaaggacagtagtgcatatcttttttccttgcatttggccctgtttagattccaacttttttcttcaacttttaacttttccgtcacatcgttctaatttcttcaaactttcaattttggcgtggtactaaacacaggccgagtttagttctaaaatttttcttcaaacttccaacttttccatcacatcaaaactttcccacacacacaaatttccaacttttccgtcacatcgttccaatttcaaccaaacttccaattttagcatgaactaaagacacccacagcctatgtcctgtctcacaaagtgtggcaatgcattcaatttgagagtttagaattgaactaaatagggaaggcaaaagggatgttctgtctcacaaagtgtggcaacgtattcaatttgagagtttagaattgaactataggaaaagcaaaagggaccggaatgttggacacttggacagttaactggaacacggggtatttattcaatactttgtcactatatagtaaattctaaggtgcagttggtcatgccaggaacatacaaactccagcgattgtacatgtgcggctatggccgttacgagtcaaatatctgttgacacattgatcaatcccaaataaaaacttccaaatgagtgtccgtaaaggtcaacatattctcaccaaattttatgtaccacagagtgacggcaggccaaagcaatgttaattttccttctcctgagaggcctttagatgattcttgatccaagactcaagagaatatagctcttccttggaaatcgagtgaccaagacctggatatgcctgattaaacaaacacagatgataacttgatacaattagaaccagcttgtaaatcaaaggtcctcttatgtgcaagaaaaaaagaagatacataattaccttaaattcacaactgaaaccagcattttgcaaaaaaggtggaccagcttgaccagcttcaaacaatactacattgtcagctattccatgtgaccacagaattggagtctgaaaagttgaaaacagacccaaaaaaagaatctaagcttaataaatcatacatataaatagttaatttcacatcaaatttctatccatacagagaagggttgacctaacatttatgaaagtcaaagttatcattcacacatttatggaagttcaattacaatggaataaacactactaaatttgcagcggcattctggtctgcaatcaggattcaaccctcagtcacctccgccctacttatggggcagctacaacctccggcgatcattctggtcgtcgagtatcgagccttcaacctgctttgcttctggcgcctttggaaccatcgtcacgatgtggtcttccgaggggaagcgccgtcaattcaacaactcctacgctgatgcgtagaggatgcaactttgagggcggaaataatgaactatagagaacaccctgtagcgacacagtggaaacactgcttctcttctgctctctccctgatgtaatgctggatcctttttatcaccctttacctcccactttgtccatctaaatgaaaatttaggtggggaaaatcccccccccccccccgggtgaacattaaaaaaaaaaagatccagcgttggttcatttcatcctaccctaccaccgaagcactaaggtgaaggtaagctcttatttctagtgaatttgattatactgacacccaactgacatacaattgatatgcaagtttgggccacagtagatctttacattcatttgatatcattcaggtaagtcagatctttacattcaaccagtttgacagaattgctaccgtttagtacatccatatttcttaagtttgctcaatgacaactgaacagtgttgatcagtaactgctgcgatagacagcacatggatttttccaaatgaatctgcaacccaacttgtgtttatgagatatatttaattcagagacaaatcctgggtatgaatttatgatcatatcaatgcaggcatatattccagaagcgattgaactaaactgctcgcttgcaccttatgaaacttcattaaactaaacttgatgaataaagcgattgattgcataccttccttgcttcaggtgaaatcctctcagtaactgacgaaccaaaaggcagccacccactgaacactgcgccaccacctagagtcttgggataaagcaaaacacttgctaatgtgagagcacctgccaacgaacatgcactccaatacttagttcacagtacaaaatttcttaccacttcagaaacttacaatgcaaagcactagtcctacctccttgactgaatccacaaacaaatatgttctctggagggatgccatcagctacctccttatcaatcatggcgtgcacattttcaacagccttaagaaccccactgtcatcttgtggagaaccctactcgttgaagatttgaacaagatcaatacctactggtacagtaaattatcagcttagataagtggaatcagtgaactcacagagctcatgggtagctcgtggatgtcgaaccatgaaggcatcacagcgccatctgcaaggaggaagaaaatctcgttactgaatcaggagcaaatccgaagcagagaagacgagatggcgcgggggggcaacgaggcgtacggttgcaggagacgggggagttcggggcggaggggaacgcccacttggtgaggcggaactccggcgcggagaagaagttgcggatgggctcgttggccgggccggagtcgccgagtccgtgcagccacagcacgaagctccggttgcgggccgccgccgccgccatgggcgcggggacgaggcgggcggcgaggccggagggcggcgcgcggcggcggagggcggcggcgaggagggaggctgcggcgatggcggcggcgagggagaagaggaagcggaggcggctactcattgggtcatgggccgaagtcaactgggccgtgacgcgtcactcagcttggtcggtgcgacaggctatgagccggtatggtagttgaccaaactgcaattggtgggattaaaaaggtttgaactgtttttgggggtttgattttgtaagttttgccaaattgtatgtgttgattgaaggatcgaatgaatcgcaatgcaaattctaagatggaatggcagaaattgcaaggatcataaacctttatcagatcataattccacaacataaaaaggcatttcgcagtacatcaaatgtagcaccaatgtaccaacaatgaatggtagccataaattggactagaatatccacatcaagaacaagaaggagctataaaaattggggcctaggattcctgccctttggttctaaaaaaacaagcagctactggagatccatcttgtcagataaggatggcactggaactccagttccttgagataaacgatccttgatccattgtcgaaaatactggagctcttcatccaccaatgtatgcccaagtgcaggataagcctggtcatttttattagtgaaagaaaaacagaacattgtagtcagcaaacagacagattcttcagaaaaactgttattttgtcaaatatgcttcattaccaccttgaattcgcagtgcatgccaatttcttgtaaaaatgcacacccagcatgcccagcttcaaacagtaccaccccgtcagccatgccatgaaaccacaaaactggtgtctgcaaattttgaagattcagtatgaagacaaacaaatcaacccatttgcaggaggatgtgatcaccaaatgctcgttgcaaatatatctgcagctctgttacctttctagcttcagatggtatactctcagcaaatgttttgcttagaggaagtgatccactgaacacaacacagccacctaaagtcattgggtagagtagaacacttgctatggctagagcacctgtgaaaaggcaattaaaatcatagtcttgtgagtcctaactaatgccattaccagaagcatgcagattactacctccttggcttaacccacaaacgaatatatttgaaggactcgtcccagcagctacttctccgtctaacatttcgtgcacacgctccacagctttgagcacttccttttcatctctggcagttctctaagaaggacaaaagaatgttgttacttttgaaccaataaacgatgccatgctagcaagagaagtcagtattcaccaagcacaagtattttctttttgaatgaagttgaacagcattttggaattttaatagttaggagtacgaattacagcagtaataggaacttccgggatggcgaaccaagccgtgatcacctcgccacctacagcaatggtggaaacagacattcagatatgttcctgtttctctctgaaattttttatgcgccttggatttggaacagattttgtgtatatataaaagtttggttttgggtaccgtagcaagggatggaggaggtgggcgcggtggggaaggagaagcggacggaggcgagctccggcgcggcgaagtatggggcgacctgggcgcggctctcctcgcccgtctggccggagccgtgcagccacagcacgcgcccgtacccgcccgccgccgccatgcccatgcggccggcggggttcagcgtcagcgatcgatcggggcagcgaaggagctaggccgcggggggaatcgcctcgtgggcaacggagacgcgaaacggaggccggtcaggtcggatcacaccttgggcgtgcgctttgcgccgtccgcctccatcctcatcctgccgtgcccgtgccgtgtagcgtccgaactgtcgcctccgtcctaggcgagctgcgctgctgccgatgcgacgagagagcgcgcggcgtgggtggccccgtccccgcctgtcgccgtccgcccaggcctaggcctagcgcttcgtccgctcgtgcgggccttctacgaattcaccagttttgggcctgggccccttttgcacgcaagcgggatgtcctagaccgaaagtattactccctccgtcccaaaatatggcagtctcatatccagattcgtatttctaaatgggtctcatcctactacattttgaaacgtaggtagtaatagtgtgaaagtttttagattttaaattggaagttttaaagctacagttaaaaattccacatgatttgaactgaaagtctcgtatagaagttttattagaaggaaaatagtgtgatcaaacaacgcacgtgtacccatctcctgagaaagaatacatttaggacttttttgtaagcttaggtttttaagttagtttttttttctttatataatttataagccagtaaatttaaagttctaaatttaaatttaaattcactagcttataaatcacacatgccctaaaaaaacttcttttaacctagtttttaacttaacggtgtaagagtgtcttatagctttagaaaagtcaaacgaagaaacttatttgtttaggtttagatttttcgacgcttataagtctaaacaaacggagccgtagaaacaaacgggttgctcgaggccttgagttgtgttttgaagctgcaattcgtacttcagtactttgatgtacttgtgtcttgtggtttctcttcttaggaactgttgaagaggttactgcacaagaagatgttccttgagactctacggatcaggccttctcttccactcctgtgcaaaattttctcaacccaccgctgacagtaatccaattcgtagtattccaaagaatgcccaagcctgtcgtatacctacgcacatacacggcaacaagtgagagaaacgtttatatcgaattctgaaatgttaaatcagcaagctactagtagcggagcacataacgaacagttgcaaatgtgtatgattaccttgaactcgcaactcatgccaagtcctcgcagaaatttaattccatctctgccttccttgattgggattagagagcctgcttgcccatggatccacaaaacgggtgtctgcaagccacattgtagctgtagcatgattatttaccattgcagtcatgcatgagctggtcattagctctagctcttcttttccgttaaaatactacgagcattattggttgccctaataaatcaaaattaaagccaaatttaaatttttgaactttattttaaaattattttttaacgtagtttttttttcagcattagcttttaaaccgctaagaaacacatacatatataagctttatctataaattagttttttattctttaataagtcattttggcttattaagcaatatgagcaacgatgtgatcctaccattaccttctttgcttgtgcagtaactctgacagcaaaagaggaattgaagggaaggaagccactgaagaccgcacatccgcctaatgttttcgggtgaagcagcacgcttgctatgcccaatgcacctaaaatgtgcagatgtttagttatcaaactttcttcagatgaacatatattaatcgtcgtatgacaatgttagttctacctccttggctaagtccaaaaacgaatacgtcttgtggattcgtcccggctgcgatctctctgtcgatcatcgcgtgcacgctttggacagctctcagtacatcctcctcgtcccttacagatacctgcacacatccagactcaagtgaacatcacaattgttccttttctggcttctgcaagcatggcataaacaggggaattttcgttgtggcagagatatctaacggaagtgatgggcgcgtcgtggatgtcgaaccacgagggcatgagcatgccgcctgagaagaaacggagatggagagagtgcatcagtccagcgacgaacacataacaaaaattaccaagatccgatatatataattatctaattattaactaatatacttattaatatgtttattagttagaatcgaataatcgaacgtagaatcgccaatgaatcaagaggaccaattgattggtggaggggttgcgattcacgtacggttgcaagtgaccggagcggtgggcgcggtggggaaggcccagcgggcgtcggcgaaggcggccgtggtggggaagctgtcggcgaggaactcgttggcgcggccggtgtcgccgaggccgtgcagccacaccacgaagcggctgcgcggcgcccggctcgtcgcgggctccatccgaccatccgagattccggaggaggagaagagcgcgaggcgatcggtcgattattgtggctgatgagttgacatccattcttccatcggtttctgacttcccgtggctgttgactgatgatgagacatgagagcggcttgactttgatggcctgtacaatttcatatatcaagcttccccatccaactcgcaaattgtgccaacaaaacaactcctgcggtcctgcctggtttatgttaagatggaaaagaagagtgaaaaggtacagctgaaattactgaacctccaaccataacttgtacaagctgtaagtaatcaggtctaagggtgtgtttgagaaggaggggattgaagagatacgtaaaacgaggtgagccattaacacatgattaattgagtattaattattttaaacttcaaaaatggattaatatgattatttaaagcaactttcatatagaaattttttgcaaaaaaacacatcgtttagtagttcgggaagcatgcacgcggaaaacaaaactatctttctctctttctcctgcgcttgaacgcagcctaagtgatgaaaaggaacaaaagggggactacatctctttgaaataaaacaacaacaatctatttgccgaaaactatcaactttatttgtaataacacactcgtccatatccatggacaaacgtttgtgctgaacttccattattcagctcataaactaagaagcccggaagctggtggaaggcttagccaagtggtgaaaaaaaacatcgatcttgcagagtgcacacacttttcatgatccaaagtactaaaagcacaaataactggccaattctgctttgtaataggcacagataatcgcttatggtaaacagatgaaaacttttgtctcctcaatcagaaaggtcgtgtagatggttggcattatcagtcccgatcaaacgattgtacatgcacaatcacttgcccgatgctttcaaactggcgtcttcccttcaggattgcctttgcacaattaagggcacgtcgctcacacgaagctctcttgctggcatcctcaatcgactcaaaatcctcaacatgagcaattccaacaattctcctacatatgtatggtccaatttagtaaacagaagtcgcttgaggatcatgcacaaggcatcggaatacagataaaaaatttgaaaatggtgtttaaatgtgattttaagttctttacacttagcttctcacaacataatatcctgaattgcctcaattcaaccatttatgacggttttcagtcatactttatgcttgtcaaaggtggtcttctggaacatctcttttaggacaccacatactgacatacatttatgaaaaagaagtgctgcatcaaaattgacatcggaaacctctacttttggcctaaattagcgtgcctttgagttccttacagttaaaaagggcaggtctagtatatcttcatagtctagacgtaaataagattcaacaaattaacttagtagtatagactatataattgtactgtttaatattagagtatatggtagttagagtcatattaggatatgattgatttatgtggattttttccatatctgtaatccttccttatctcatgtatctatatactggcccctgaggctctaataccatgttaaatataatacttccttatctctaccctatttatttcctatatatgcgggctcctaaggctcaatagaatgtgtccaatattcgcagtaatctcctcttcctatactattcaacatttatttacctgatcatttttgctgaaccaaatccaagactgtcatgaaataggcttgtcatgtacttcttctgtgcaaggcacaaaagctctgagctgttgtatatagggggcaggtatgcttccccattcccatctttgtgtttattccataattcgacaaacttcttgtggaacaaattccatgaatcttcaattgtcttcaagatccatttcttgtaagcctgaaaaatatgtacagtcatataacttattttatgccccgtgatacatcatgaaaataccttctaaaatctagatgctgccattgcactttgccatataacttgtcatttctgcagttcccattactcagggacattcaagtgatgagtaaggcaagttattcaacttattgtctgccgagcaccctcctccctctgttacatacggcatatctcaacaatatcaattgctaattattctataggatacaagtacacaggaagacatgtggttgccattatcttagcaaacgcaaaacaacttaaccacccaaaaagaaaaactatctttttgtcacataaaaaaaaaagaggacatttgtggaccaggtaaaagtacacactttcatttactattattagccaataaatccatacataccttacgatcatttgcttgatcagcgtgtccatcttgtgaaaaatatgccaaaatcaagttccccaggaaggccccaatgtcgtaacccattgggccatagaaagcaaattctggatcaatcacttgagtagaatctggtgtcaccatgatggaaccagtgtggagatctccatgaagaagagcctgtgctctctcaataaacctgcatatgcaaatcatgtccatcatctccaatatgaaaagaaaagaaaagcgctggtttaatctggaaagatagttacattgatttcaattcagcaatctccaatttaagctcagcatcctctcgaaccgctgcagcatcattatctaggaagggtgatgtgcaacgattgtatttggcgagcatgtatgggtctgagaacacgacttgctctgtgagcctacacatctccacattatcgcagtactgagcaactgcagttcacagaacacaaacattccatcaatttggttatcatttttctcccttttcatagtcacagaacacaacattctatcaatttggttctcatttttctcccttttcacaggcaaaccaaacctgtataataaatcaaccaacctcctttcttgtgatcagtggtggagttgtagagaagggaggtgaagaagagcgtcttggccatgtaatccgccatgtgctcggcgagcagcgggtactcgacgccagcgatgaggcccttgcggaggatgatgtgcggcggctcgatgtagcgcatcccgatcagcgacatggcccggtcgaagtggtagacctcggggacatggtccgggcagaggccgcggtgcttctgcagcgcggaggcctcgaagtaggcgcgctccctcgtcatcggccacgaatcccccacgcagcggatgtacggcagcgcctggattgcagcgtcgtcagcggaggaacggagagagaagatgcgtacatgtgtggcggcggcggcgcgtggaggagatagggacctgcttgatgacgacggagccggcgtcggagaggacgatgtagacgaagttgaggttgccgtcgccgacctccttgatggtgagggcgtcgaggctgccgccgaggcgcgcggcgagggcgggcgtggccttgatgtaggccaccagggacgcctcgtcgagcgggcggaagccctgctgctgctgctgctgctgctgctccgccgccgcggccatggccggtgcgtgtgtggccgtggcgtcgagttgaccgatgcgagcgccggcggcgaagtggccgcgacccgcgagaggagtggggaatcgagtgcgcgtgtgtgggaggctgcgctgcgcggaggtgtgtgggttttgtaacagctgctgctttcgcggaagggggcggttctctgaacctggacttgttattggtacaaggcggattcttcagttgagtcgtgtcatcagtgtgagctaatcttgaggagttcatgctatctttgagttttcaatccaggccgtgtttagattcaaaattttttaaattttttttaactttttcatcacatcaaatatttagacacatatatagaggattaaatatgatgaaaaaaaacaattgcacagtttgtatgtaaatcgcgagacgaatcttttgagcctaattacaccatgatttgacaatgggatgctacagtaaatatttgctaataacggattaattaggcttaataaatttgtctcgcagtttacaggcggaatctgtaatttgttttgttattagtctacgtttaatacttcaaatatgtgtctgtatccttaaaaaaattggcacacaaactaaacacatcctagtatactgctaattttgaactgaatgtggcttctggtcattggatttggtgaattttcctctctgttccaaaatataccatcatttatgttatctctatattaccactccatctgtttcatattgtaaaaattttctacaattgaccattgttaatgaatctagacataacatccatataaatatgggtaatgctagaaaattttataatatgaaacggagaaagtattaaagttgagtcatcctccgttcatctccttctcccaccgctcgtgcagtctatttgtccgctccttctcaaatcatgtacacaacctccgtatgatacggtactttatcctcaattaccttcctagccctttcttactcgtctcaattgtatgttcgatctgttataatgcatgaatatatgttgctaataaatctgaataagtgtttgttcacttatagcagtattttaggacggatgaaataaataaaattgttttctcgaaaaaataaaaaaaaactaatgaatctttcactcatgcttcaggctaccaatggtggtgtgccttcggttgaagttggaattttctagcaaatcaaccataatcgaaatgttctcatatagatatatagaaacatgccatgcctacataatttttctgaaaaaaacagctctaagataaggaccatatattcatttgatagaatgaaacggttactatgttcgtttgtgtgtttattagaaaaagaaatttattgtgatattttagaggattacaattcacaattattgtgtcccttcaatgaactctgcgagttgataaggtagcatccgaacgattaatcagttggtacgcatgttccacgctgttcttttcaacaaacagggagaatatatcgactgtgtttggccccatacttcggcttgatgtcgccgtcaatgctagcatcatgtatcttcaaaatgacatcatatccaaataaaagcagcatgaaagtgccagtcctccatattaaacggcatgaaactagctcacaagacaaaaatcattatagtattctcatgaccaagcgaaccatagtgagaaagttgacaaactctattatattcaccggatgaactagaatgttcaaagtatagataggtcttttggagaacttctagcatgtacagtttcttccaaaatctccaattccctaaataatcatattatgagattttatagctatagaatccagaaaaaaatgtgtaaagtacacgggcggtccttaaacttatagcggtgtgtcatctaggtcattaaactctcaaaatgcatatccaagtcacagaacttgtcatagtgtgtcatctaggtcccagatcaccacaaatccttcaggatcctacgtggtgcggatgtggcatgtcacacgaacatgatgtggcataattttgactgacaaataggacccatttaaaaattttatttctttcttttttttcttctcttgcattttcctttcttctcctttgtctgtgacccgagcaaaagagaggggaaaaaaacaagaataagaagaaaacagaaaagaaaaagaaaagaagaaaaaaaaggacatgtcacgtccatgtggcaggtcacatcagcgccacgtaggatccaagaggggatgtgtcgatttgggacctagatgatacactttgataagttctagggcctggatatgcattttgagagtttgggggatctagatgacataccgctacaagtttaagtaccgctcgtacactttactcgaaaaaaaatctacgaggaagctaaggaaaacctactttgtagattaaattctgagaaatggaaatctagttgtgagagcataaaaaagcagggaaaaccagttttttagcttttattaagattcttttgaatctagataaaaagttaaattgtttggggaagcttttgccattcaaccgactgattcttacaaacttagccaagtggtgaaaaaaaaacatcaatcttgcagagcgtccacacttgagcatgcataatgtatagtagaactagtccataaagaatacaatatttcattcagccacctaacaacattgtagaactagtccatatcaagcaaatagcaaaagtcacccataaacatatgagttgcctatatagaataaaatatattatttatctctgctttctctctccttctaatactactaactacctatatatattacatccttcgtttcacaatgtaagtcattctagcatttcccacattcatattgatgtccatgaatctagatagatatatatgtctagattcattgacatcaatatgaatgtggaaaatgctagaatgacttacattgtgaaacggagggagtatgaaggttacaataggtaaatcccacatatgtgggtccatctgtatggactactttggctatatacattgttgttgcccagcccacatataaccggccaattctgctttataataggcacagataatcgctgatggtaaacagatgaaaacttttgtctcctcaatcagaaaggttgtgtagatggttagccttatcagtcccgatcaaacgattgtacatgcacaatcacttgctcgatgctttcaaactggcgtcttcccttcaggattgcctttgcacaattaagggcacgtcgctcacacgaagctctcttgctggcatcctcaatcgactcaaaatcctcaacatgagcaattccaacaattctcctacatatgtatggtccaatttagtaaacagaagtcgcgtgaggatcatgcacaaggcatcggaacacagataaaaaatttgaaaatggcgtttaaatgtgattttaagttctttacacttagcttctcacaacataatatcctgaatagcctccaatttaaccatttatgacggttttcagtcatacttataatcgtcaaaggtggtcttctggaacatctcttttaggatagcacatactgatatacatttatgaaaaagaagtgctgcatcaaaattggcatcggaaacctctactttggactaacttactgtgcctttgagcttcttacatttaaaaagggcaggtctagtatatcttcatagtctagacgtaaataagattcagcaaattgacttagtagtacagactctacataattgtactgtttaattacctgatcatttttgctgaaccaaatccaagactgtcatgaaataggcttgtcatgtacttcttctgtacaaggctcaaaagctctgagctgttgtatatagggggcaggtatgcttccccattcccatctttgtgtttattccataattcgacaaacttcttgtggaaaaaattccatgaatcttcaattgtcttcaagatccatttcttgtaagcctgcaaaatatgtacagacatagaacttattttatgcctggcgaaacatcatgaaaataccttctagaatctagatgttgcaattgcactttgccatatcataacttgtcatttctgcagttcccattaagtactccctccatttcatattataagtcgtttgacttttttcttagtcaaagttctttaggtttgaccagatttatagaaaaaaattagcaacatttacaacagcaaattagtttaattaaatttaacatagaatatattttgataatatgtttgttttgtattgaaaatgttattctatttttctacagatttggttaaacttaaaaaaaattgactaagaaaaaaatcaaacaacttataatatgaaacggagggagtaatactcagggacattcatcgtctgctgagcaccctcctccctctgttacatacggcatatatcaacaatatcaattgctagttattctataggatacaagtatcatgttccaaacttctatcctatcgaaattagtacacaggaagacatgtggttgccattatcttagcaaacgcaaaacaacttaaccacccaggtaagattacgcactttcatttactattattagccaataaatccatacacaccttacgatcatttgcttgatcagcatgtccatcttgtgaaaaatatgccaaaatcaagttccccaggaaggccccaatatcgtaacccattgggccatagaaagcaaattctggatcaatcacttgagtagaatctggtgtcaccatgatggaactagtgtggagatctccatgaagaaaagcttgtgctctctcaataaacctgcatatgcaaatcatgtccatcatctccaatgaaaaggaaagagaaacgctggtttaatcaggagagctagttacattgattttaattcagcaatctccaacttaagctcagcatcctctcgaaccgctgcagcatcattatcaaggaagggtgatgtgcagcgattgtatttggcgaccctgtatggatctgagaatacaacttgttctgtgagcctgctcatctccacattatcgcaatactgagcaactgcaattcacataacacaacatgccatcaattcggttctcatttttctcccttctcaattttcacaggcaaaccaaacctgtaataaatcaaccaacctcctttcttgtgatcagtggtggagttgtagagaagtgaagtgaagaagagcgtcttggccatgtaatccgccatgtgctcggcgagcagcgggtactcgacgccggcgacgaggcccttgcggaggatgatgtgcggcggctcgatgtagcgcatcccgatgagcgacatggcacggtcgaagtggtagacctcggggacatggtccgggcagagggcgcggtgcttctgcagcgcggaggcctcgaaataggcgcgctccctcgacatcggccatgaatcccccactaagcggatgtacggcagcgcctggattgcagcgtcgtcagcgaaagaacggagacagaagatgcgtactacatgtgtggcagcggcgacggtggcggcgcgtggaggagatagggacctgcttgatgacgagggagccggcgtcggagaggacgatgtagacgaagttgaggttgccgtcgccgacctccttgatggtgagggcgtcgaggcggccgccgaggcgcgcggcgagggcgggcgtggccttgatgtaggccaccagggacgcctcgtcgagcgggcggaagccctgctgctgctgctccgccgccgccgcggccatggccggtgcgtgtgtgggcgtcgagttgacttgaccgatgcgagcgccggcggcgaagcggggaatcgggtgagcgtgtgtgttggaagtggctgctgctcgggtgggatttgtaacagctgccgtttccgcggaagggggcggttctctgaacctggacttgtttttggtacaaggccaggattcttcagttgagtcatgtcatcatcgtgtgagctaatcttgaggagttcaggctatttttgagttttgaatatattgcttcaaatcttgaactgaatgcggcttctagctattggatttggtgcttttcgtgccataccttctccattttaaaatgtaatagcatttctgatataattttggataagtgtttgttcacttaaagtatgatgagataagagttaaaaagatcagaaaaattaaaaattaaaaattggatcacttcaggctagctgccaatggcggtgtactggcgtaccgtcagttggagttggaattttctaggatatccaccagactcaatatggtgtactgaacaaaatgttcttctatagataaaagacgatatttggattccaaacacatttttaaaaaaaattgtaagcgcgttagatattgaacacggggtctcaaaattgaaatcacacattccattctataagtgcatcttgttcttctatatatagatacatgccatgactatatagttttgctgaaaaaacaggtctcaggtaaggaccgtatattcatttaatatgaaacggttactgttcaggttcgtttgtgtgtttattataaaaatagaaatttactgtgatattttagaggatcacaattattgtctcccttccacgaactatgtgagttggtatgggctgtgtttggatccaaacttcaatcattttccatcacatccacctccacctgttatacacacgtaacttttcagtcacatcatcttcaatttcagccaaaatccaaactttgcgctgaactaaacacagccaaggtagcatcggaccgattactcggttggcgttggaacgggtactcatgttccacgctgttgttttcaacaaataggaagaatatgtccatgtttggacccataattcggcttgatttaaacatgtcgtcgtcaaatgctagcatccactaatctgttggtttggatacttgttttcttcgaaatgacatcgtatctaaacaaagcagcatgaaagtgccagtcctccaaattgaacggcatgaaactagtagcttgcatgaccaaacgtatttatggccatgatatatttaagagaaaaaaatcattctaaacagtatatatttactgaatgtactagaaggtccaagcacataattactccatcaattttaaaatataaggattgttacaataaataatttatttttttcacttcagttgttagcatttgaatttcgaattacttgtatttcttttgggaaattttgtaaaaatacactcgttatgatcaaaattacacaaaactacaaggattttgacacatagcacatgacccataggtactatggatataaagttccacaaaaccacattgtaaccaatttgacatactcatatatcaaatttttaaaaggccatggatgtaacatttatatgatggataaataactcataaattcgagatgcgattgtataacttaaaattatggtaattcaaagttagaatgataaatattgtgttttttgaaatgaccataatacatatgtttatgtgctaaaaaatcgtatgtttttttaatttactcaatttgttctaaaatttagtactagataggacacatcatagtactataaatctcgacagaaattcgttgggtattatatgctctatgttcaaattcgtagtactataatgtatcccatctagttataggttattattatttgtgattaagaggtagatcataatacgggtggttaaatgaaatttacttattctctctttccaagcatttgattagctttaaaattattgaaatgatgggaatcacaaaaatcagtgaaaaataagaatattatggtgtaaaatttaaatcttaaaagtatagaaatggaaggagttattccaacaccatcgggcatcacttgcccgcaaaattgcaataactcaccataatatttcaaaataattcgacggaattcattcgctcgcgccgtctccgaaaccgaatccatttcctgatccagcaaaggacacagagagagatcccatctcgtcctcgtcgcctccgcctcgtgagctccactcacctaccccacttcctctcctcgcttcggccgcggccccaaaccctaaccctccccgcggcgatcccgatggccaccacctcccgccgatccctccacgccctcctcggcggcggcgcaggtacgcacgcgcattcccggcgctctccgatccgggtcgagaatttgggttcggttttctcctcactcgtgttctctcgtctcgcagtcgccgacttggtgctgtggcggcggaggaacgtgtccgcggcggccgtggcgggcgccacggcggtgtggttcctcttcgagcgcgcggggtacagcttcccgtcagtcatggccaacgccctgctcctcctcgtcgccatcctcttcttctgggccaagtccgcctcgctgctcaacaggtgggtttttgccctggctctacagcaccgcgtgtttctgatctcatgtagagtcgcgccgcgccctgcggccctgattcgctgtagttgtaactgcggtgttcactgtaatgtgtatgaggttttgctgaataatgtggactttcttttccccaaccgtttggttgttgcatctttttggcttcaagaagctcactgccaaactgtttcatacactaacttgcttagcatttttgaattacgggttgcagtaagaaactaaacttcaggccagagcagtttgtaattggaagtgatccgatgatctcctaagattagagattgttcaaaggtttgaactctgcatatgtcggggtttcctaattatcccttttcctgaaacctgcatatttcgtttttattacattaccaataatgcatctatccgatcccttatctacaaagtaaagaggctgctttactttaaagctaagccgcgatagcagttcgataagttaattctgctagcatgtgtcattttctctagagcttgtaactgtgctatatggtctcttctgcaagcaatccacaaggtttttttcctagatttacattacatggtcaatcaccgcgcttgccattccttatcggctcatttatgagtttgtgttccccatctgacttgattgttgcctagaattgatatgcatttatgcagtgtctctgcgattgtatcgctaaaccgaaaaagaaagagctgtttttggcactttggttgttttatgttgttctctgtgactggcattgtacttccattgcccatatcatctatccaagtttgacacaaagttgtgatttttgcaggcctcttccaccactccctaaactagaggtctcagatgtggttgttgagaaagctgcagatcgggctcttgtatggatcaacaaggtgttggctgttggccatgatattgccatcaagagagataggagtgtttttataaaggtctctctcttatacacacacatccatgcccactagtacacacacaactgtacgtctatatggctgtacctgcctttgtatgctttcttcttatgccccttattttgtttggtcatataggttatattgattttatgggtggtttcatacattggaatgctcttcaacttccttacgctcatttacattggtgagtactactgaatttgtttctctttaacttcctggacctattcatgtatggatcaatcgttcttttatgatagctcatatgtaataattgtatcattctggcttttctctaggtgtaatgttttctctgttagttccaccattgtatgagaagtaccaggaccaagtcgatgaaaagattggtatggcgcacagtgtactatcaaggcacttagataccatcattagcaagactggagaatcaaccaagcaaaagaagactgagtaaccggtgtttttgctacattgggtgagcttctaagacggtttgaatcttttttactagttcatggtatactctaaatccaacaaaccactaatagcttttgtgtttcacatatttagtatgctacacatttcgttaacatgatagcatggacaacatttttgtttaactcttgcaatctcaagtttacataatgttgcaatagttcaaaaaacctttaagatgctataacggcaatgccagtggatctttgttactcgaaaagtcccacaaaaacctaagggctaagggcagcaaagatgagataaattctcgttgaacaaatggatagagttacttctcaccgtattctgtatttctgttgtatttttctaaggcaaaaatggtctttcttagaaaggcgaggcagtgatgtcctccctttgttaataaaaagagaaaccaccagcccaggaatggcattcaaggcactctaaatacaaccaagtaatcactttcagaagtttgtttttctggagttgaactgttaccacacatgaaatttacaaatgttctgagaccatcttctgttgttcctgagaaatgatacttctctataatgatcatcttttgtcttatcaggaacctcttttgtcatatgtggttggtcatgaacctcgtcagttactctccatacctgtgaaccaccactggaaatattcttggatatcgaagatgtcatgtttgactgctgatgtagtttacatgcactctgttcaatttgagaaatggaatgctttgtatattttttcaagtaacatgacacatgctgaggtttatcatgggcacatatcttgtggataatgatatatacttttcccctgaaatcattttctgtagccggcatatacaaatatgttggttgctggtgcactaaaccgtttttttagtgttcttgattctcattgttaaatagttccctaataaactttagtgagctcattcgatgccaaactgcacacatgcatacctgaatctttggtaatcgtctagggccagccatttttctctactacttatgaaccgttgtgttcagtttttactattctggtgtattaatttgctgcaaaacttatgtatcatgtaagtattttgtgttggtgtaaaatcgctatgctagaaattaagaaaaattaacaagacaagtcagagcaaccacatgcatatttggaaattctgtgcagttcattgtagaaacaaattatgcatgagccagccttgataacatattttcaaacttaagttgtctgctcaggctccagtatgcaacacctctctttagaggggctaaggccattacgggcaccagtggacaaattggcttaggcatatccgaaaggggacgcctattggcaattcaatatgtgtgagcattatggtacaagactaccagtgcagagcctttttgggacactaacataaaaacttgggtgggtatccaaattgtagggtcactactcactgggtcaagcagataagttctccatcttccaacattctttttctatactccacagtacacatatctgcacacttatttgtgatatggaatatagtaagcattattctggcaaagagaagacacctttttttttctggtttgctattatgaatcagacggcaaatattgcttccggccgagtcatgtcatgctgacttcatgtttagcaaacgctaatatgctatatgaacatatctttgctcctggcccagaagatgatgatgttccacttgctacatacacacattgtgccttttgtcatgccccagtgccccaatcatatactaccggtatgtacagactacagagcactgagcccggtcgtgaggcagcctctgccctcctgccgaggaaagccgacgctattgccttccccgcactgacccatcatcaacaactcaactcaaaatcacaaaacgccttgaccgcacactgccatactattatgtgtgtattcacttcgcgagctaggcacgtagccacttcgccctggaatcaagtgcacgccccgctcggctcggccagtggtcgcgagctgcacgccgccgctgcctgcacgcacgagcgctgcttcatttcttcttcttcttcactcctaccgtcgatgacgactaattaaccgccaaccccactaccgcctctctctttgctggctgccattgcctcctctcttccccggcaaaacaacttctctcctattcccacctcttttcacccataaagcggaagtggatttttgtcgggacatcctctcgttttgtgcgtatcgtttaaaaagttatcaaaattttttttaaaaaaattatcaagatatatattgtgatcaatatatgatatatcttttcgcaaacatgcaagttaaaattcgacatatgtaatttgaaacaaaaataacaaacaaatttaaccgtaaattacgtgttcttttcacagttaaatttgctatttttgtttttacttgtataagttgaatttgaatatgcatgtttgaagtgacatatcacatatagggtgtgtttagttccacgctaaagttgaaagtttgattgaaattgaaatgatgtaacggaaaagttgaaagtttgtgtgtgtagaaaagttcgatgtgacgtttttgggattcaaagtttggaactaaaccgagccataatctgctacactaaattttttaccacctccgtcccaaaataagtgcaaccatagatatccgtgtccagcgttttgactgtccgtcttatttgaaaaaattataaaaaaaataaaaatattagtcacgcataaagtactattcatgtattatcatctaataacaataaaaatactagtcataattgtttttcaaataagacgaacggtcaaacgttgagcatgaacggtgttaaaactgcacttattttgggagtgacatgtaaaaacgagatgatatccccttaaaaaatgaatatagtttttcccataaagcacgctccacttgtgctgatccattccatgtcaatggagttcatggagccatggacccatctcctcctcctcctccttaaaactcgtcttcccccccacgtctcaccaccatctaacgtgcgtccatggcggcggcttcaggccataatgcgcgcctgcttgcgctcgcgctcgcgctcctgctcgccgcgctgcacctgcacggcgtggtgtgtgaccccagccatactcacttcgccatggtgtcgcgcaatgcgccgtcgtggaggcccgatcgcggtggacaagggaaggtatcggcgccgtcccggaggacttcctgaacgagaacctgcaggcgctgtacccggtgatccaggcgttcaaggcgaccatcaccagcgacccgcgcggcgtgacggcgtcgtgggtcggccccaacctctgcgacagctacttcggcggcgacatgtacaagggcttctactgcgagcacccgccggcgccgccgggtgcaacgacgccgaaggacaacaccacgctcaccatcgcgtccatcgacttcaacggctacggcctcggcgcgcccagcctctccggcttcgtcgacgcgttcccggacctagcgctcttccacgccaactccaacaacttctccggcgaggtccccgacctcaccggcctcccgtacttctacgagctcgacctctccaacaacaacttctccggcgcgttcccggccaccgtcgtcccgctcggccgcctcctcttcctcgacctccgcttcaaccgcttcgtcggcacggtgccgccgccggtgttcgacctcaccgtcgtcgcgctcttcctcaacaacaacggcttctacggcaacatcccggacaacttcgggagcaccacggcggagtacctggtggtggccaacaaccagttcaccggcccgatcccgcgctccatctacaacacgtcggcgaacctctccgaggtgctcttcctcaacaaccacctctcgggatgcctcccctacgagatcggattggtggaggggctcaccgtgttcgacgccggcggcaacgacatcaccggacccatcccgctctccctcggctgcctggggctcgtcgaggagctcaacctcgccgggaaccagctgtacggccacatccccgacgtgctctgcgcgctggccaagaccgggaagctgcagaacctctccctctccgacaactacttccactccgtcggccgccgccattgcctcgagctcgtccggagcaaggtgctcgacgtgcgcctcaactgcatccccaacttcccccaccagcggccggcgctcgagtgcgcccgcttctacgccgacccgccgcagcactgccccttcgtgccgcacatcccctgcgacctgccgggcttcaggccgccggcggcggcgttgccttcggctgtggcagctgaagaaggcggcggcggcggaggtggtggcaactgaactgatcagcgatcaccaactttgtcagcgttttgtcgttcagatcgcatgattccaaactttgtaactgttggtcaataaacggaaaacggcctaccaatttgtgccgcaaatctcagcctgacgcattgctgacaacaatctgatatcacatcgcaataagagggaaggatgcaaacacgaacattcttgcatccttccattgtatccttacaagtaatcagtgttctgaaattcactgatcagatgtactagttgtagctatatttcgacagaagtgaataatgagaatttggaacggtaaaacaggatcttcgttaatgtattcttgagatgataaattatatagagtacaaattggagaagataaataagagtacaaattggatcgagctatgtacacagatcactgtaagataaaaggcaggcagtagagtaaataagctgtcccctcaaaatgcgacaacgatatatggaggcacggaagcagaaatttcagaaaggctccacgctgcctcatcccctctcctcgccgattacatgttatcgatgagctcatgcggtgttcagcttagcgagcgtgcgcttcaaagccttcacgctcaatgggctgttcttgctctgcacaattccaacaaaaggaaggtcagttcgtacgttcaaatatcttgcacaattccaacagaagaaaggtcagttagtgcattacagttatctgaactatctttggagccaaagcaaccttaatgtctagttttttcagaaaaagcatgatgacaaatatttgctgagttcagatcatgaaagcctcgtgccttttcaaaaccgtatagcttgtcggagcagaatactatgatgaaaacaatctttggaatagaatgtaggcagtataaagttgcagtaagaacgaacaagaaagcgaggagattaccgctgagcaggttccagcccgggtgttgcagacagggtagtcaggcgggcagcagctggcatgatccttgcagcaggttgcaccttcaactgggcaacagccccaaaccaagcagagattcctgaagccgaatgcgcagcagcaggtgctgcccgctgggcaagagaagttatcatcgcagacatggtcaggggcggatgggggaggtggtgttggaggagttggaggagtcggagatggcttgggtgggtttgctccgctcttggtagggtatgatgccatcatggcaatgccacacttccccgtggtcacattgatattgcgctccatgcgaacgtatccagactcaccccacttcgggccccaagagttgcggacaatccagtagtctttgccattgtcagtgccataaccgacggcaaccacaccatggtcaaggcttgtgccacacctaccgctgaagacgccctgtaatgtaaaaatcaatagttgttacgaccaaaacctcctatatgcatggggtgatatctgcaagttcatttaccgaatgatagagctggaactcgcggccaccagcctcaatagcaacactgactggttggtgagcaaccgccttctgaagtgatttctcatcattttgaggtacatcctcaaagccatcgatgctcacaaccttagcattttcctaaaacaatgcacccgttgaaacattagcgatttgcataatgtgggaactgaaagatgaatgtatgaagttattcatcagaaaataagttaataccctgttgatgtcacacttgccatctacagctttgtaaggatagtcatcttcagtatcaatgcctccattcttaatgatgaagtcaaaggcatcatccatgagcccaccgttgcagccactgttctgtccattggttgagcattctacaagttcttgttccgacaatgtgatcatctcaccagtaacaagttggttgatgctttctactgtgcttactgcggagaaggcccagcagcttcctgcatcccaccattcaagaccaaagatgtcagtaaccatcaaaataactagtgtcatccaagagagcaacaactgcaatcataccgcaagcaaccaattgtaatatgaggcaagaaccctaaactgtttaattgtatcaatattatcaagatcaagatggatagtaagatatttgcagacatttgtttcacccctgtttttacccacaaaagcagtttgaagacacctgtaggctaatatcagcaaacagctcccagcacaggataaaaagtttgctcgactgaacacgaaaggttgataaggtgtgatatcccttaaaagtcttaaaggcccaaaatagttgcaatgcaaagcaacatcatcaaatcggtttaatgtcttagtagttggttacagggtcaccttgtccaaagtatttgactgatagatgcaccgaaaaagacctttaaaaatataaagacaaaagcagcacaaccacagaaacggcagtcctaaaatcaggaaaaaacaagctaagctaaactacaatcctggaaacaaggaaaccacactgagcaagtcagccccaaccaacggcgggctttgaatctgttcaagtccacaccgctgtcactgcacgattcacaagtcacagccgttgccaactccagaagcaaagaacgaagagaacaaataccttacacagttaacccaatgagaggattttccaagaatacatcctgcatccactacgtaataaatccttaccatagaattccaaacaattattcggtccagtaaattatcatcgtattaaaagaacaataactctgtcattaaatcagatatgctcattcaggggggaaagtcagctttagctagaaaaatgacccatcttttctagagactagacggtgtgtgactatataatcataatctactattatattatgtatatatcagaaggaaatctgcactgttttgcaagtaggggcaaaagattactagctgtgaacctgaattaactgttgtgaaattgccctacttagatccgagattagcgtgacaaatagataatcgcatctaagctttcaatggtaaataatcgcacaagggagatgagatgaggaaagagaagaaattccttaccgcattggccctggttcttgacgggggcgacggcgcccttctccctccagtcgacggactccggcagctcctccaccccgtcgtggcggtacctctccccggcggcgcggctcctctcggcgaccttggcgccgaggaaggtcgcgcggaactcctcgttggtgagatcggcgaagcggttcatcccgaggcggaacccgccgcgctcgtcggcgcgggcgttgtgggcgtcgacgaacttgaggttgtcccagaacacgaggaaccggcgctcgtgctcgccgccgagcgcgttgggcgagccgccgccgttctcggcgagccagaggtcgtacgcggcgcgcgcctcggcctccgtgggcccctcctccagcccccgcgccccgtgctccgcgttgtaggagatgatcgacatgtccggcgccgcggtggccgcgccgacgatgagcagcagcaggaacgcggcggcggcggcgcgggcggccatggcggcgacgtggagacgagcgtctctctccaacctcttcgctttcctcctcttttcttttcctcctttttttttccttcttcgttgggtttgtggttttttgggcttgataggctcgatgcgggtgggatttataggcggcggatgcgtgtttgggtcggcgactggaagaggagtttgggtttgggaattgggatgggatgaggtgagggatccaacgccgctaactaacaattctgatctgaattaggttgctaatcgtaacaattcctatcttaattaggagcgaaacagggtggatattctcccccgaataaaaaattttccatggcgaagtcgatcgggtaaaaaattaggaaccgaatcctcaagtaattagtactataatctagctcgtggtaactggtaagacacctcatcggtgtcgaccaaatccgttggatcgtaaataaacaaggcagattttcccccccccctccctttctcatcgggtaatttagaactgacggagcgtggggctcctcaccgggagaccgcgcaggcccccctttgccagttcggccgggggccctgggtgaggttctaagctcccaatctgtggaaggttcgcaagagcggaaacacacaagacacgggcgatgtatacaggttcgggccgctgagaagcgtaataccctactcctgtgttttggtggattcgcgtatgaagaagctacaaagtgccagtcagcccccgattcttctgggattgctttctcctctcctttctaagtgggcaaggtcctccttttatatcccaaggggatcccacatgcaccatctctccctccctttctttcaacttgacttctcttcattaatggacggagatttgtatcgctgccatccgaatcaccttctgacgggacggcccatacctacctccactttcaccggaagcaggcgcgacgtgggagatggctgtctgctgacgacatgaccattgtcagaccggtcaccaatcggtcattcttgtccatcacgtgtcagtttaacaatctgcatgttcgcccttcttcatacaacatcttgcctgtaatggttaggatgaagcctggtatatatctgaccggaaccaacgtgtcatctccaggaggtaacacgccggctccggctagggacgagtgcttggaggctctcgtcctgactggacggggcgaggcgtgcgtcagaccgcctgtcgccacctaacccacgatctgaccggtctgtgactggtcacagaccggataaacgagcgcgctgcaccgtattacacgcggcgtgacgcgttcgtccaaaccgcaataaatgcggttaggtgagcgccgctgtgctcacctaacccatacacgcggcgcaaaatccacaaggggtcggggcgccccaaccctcggggccaaggcgggagcggtccgaccccctcggggagacaaagaggagggcgaacacaccaccctcgggcccgacccccccccccccggtgggtgccaggccacgtgggcgattgtgtctgcctcaagcctctagtcacgatactcccggtcccatgtcatcgacagtagcccccggcgttatgccggggcgattaccctcctcgagggaagcggtcgggcgtgacgccacttcctaaggcctggtgacaggtgggaccggtctccacagttgggcagaaacccatcagtcgcaaatcacgcacatcggcaacggttactcggctgtcaataatgaacggtctcttcaagactgccacattactcgagtaacgtgtgaatcgggacgtgccggttcgttttgcctggagatatggtgatggcgcttcggtcggcgagcgtaattaacgcgcgcacgagatgttccatctcgactgccacagccgcatatccacctcatgcaccgtaaacgggcgaatgggattagtggaagagtgggcgcgagaaacgagggggcaagatagtgggcgcgagaaacgaggagccgggcacagcgttggcaagggtataaagttgccgaggaagagatttgcttcctttctttcgccattattccccttgtcttcgccgcttgcgccctaactccttgtttcctgtgccctacctccgccacacgcgctcgctctcaaacatctcttcttccggcgtcatggcacggggctccgctccgcttgacggtagcgtgctgccgccttcccgcatcgtgagcgagagacaggccgggctgctgcgccgcttcatgccggaatctgcgaccggccgggagatagtctcgctgggcgaaggatgcccggcgccacgctacccggggcggtccgtcttcttcctcccttttgctatggcagggctggttccgccattttcttctttcttcgtggatgttctggagttttacgatctccagatggcgcacctcacccccaacgcggtaatgacattggccatcttcgcgcacttgtgcgagatgttcatcggggtgcgcccatcccttcggctgttccggtggttcttcaccgtacagccggtttcgccgccgtcggtggttggtggttgctacttccagccgcgggggccggtgctgaaccgctacattccctgcgtcctccgcaagaagtgggatgactggaagagcgactggttctacacccccctcgccgacgaatcgcgcctccgactcccaagccagcctccagcgcaggcctccaactggcgggcgccggtagatctgggagatggctacgacgccgtcctcgaccgcctggcgggcctgcgatctcaggggctcacaggggccatggtgttcggcgactatcttcgtcgccggatcgcgccactccagcggcgcgcccggggcgcctgggagtacaccgggtccgaggactgtatgaggacccaccagggggtccgatgggactgggctcctgaggacttcaagatagtggtccaacgggtgctgaatctcagctccgtggaggcatccctcgttcctcaaggagtcctccccctctgcagtgatccagaccgtgcctccatcttgaccatcatgcaggcggtcggggcatcggaggagcgggctcctcgaggccacgatggcgcggtcgggagccgcaggggggaacgatctaccccgggagggggtcgtgcttctgggcctcgcgacgggggcccggggagcggccaccctgccgacgcccgggggaagaggaagcaggaaggaacccctccctcatctcctccccgagggggcggggcggcgcgtgccagcagcaggcgcccggagggggccacgccgacgtcgcagcccgagggggagcggaagaagaaacggccccgcaagatgagggggacagaaccatcccggggaaaccttatttcccctccaaggtggtcgtttaaccgaccccctcgcaggttcgtcccacgcccatcatggccgtattcattcctttaacgcgagttttcactcatccatcttgttttgtcttctggtctttcttctgtttcagcgagatcccgtcgcgtccctcccgccattccaagtccggccagtctgagtccgaggacccggcgtccacagaggcccggaggcgggaatctgaccggcgagaagccgcagaccgccttcgggaagccgaggaggccgctcgggaggccgccctggctcgccagaccgaggaagccgttcgggaggaggccggactccgccaggccgaagcgacgacatcctctgaggcgacccgtgaaactgaccggcaagaggccgcggatcgccttcgagaagccgaggaagctgttcaggtggccgtccaagctcgcctagctgaagaagccgctcgggaagaggtcagacttcaccaggccgaggcggcgacgacttccgaggcagcttgcgacgaggccgcgggcgcatcgcttgggcccaattcctcgggcgacgcccaggataagctaggtccgggggatatccctgagtccggcacgtccattggcgggccgagccgcgcggcatcctcaccgagacggctcttccccacgccttctgctgctccactgagcgcagaaccccttctgcgggccttggccgtcgcaaacacgacggtgttggacgggttaagtgcccaagtggaggccctgcaagcagagcgggcggagctcgacgccgcatgggtgcgtgtcgaagaggggcgacgctcggtggaggccatggtggaagtgggtcgcaaggcacaccgtcggcacgtctcagagctcgaagcccgtcggaaggtgctggaggagatcgccaaggaggtggaggaggagcggggggctgccctcatcgccaccactgtgatgaacgaggcgcaggactccctccgccttcaatacgggagctgggaggcggagctagagaaaaaactcgatgccgcccagggggtccttgacgctgccgctgcccgagaacggcgggcggcggagaccgaggtggcatcccggcggcgcgacgaagcccttgaggcccgtgccatggcgctggaagagcgtgcctgcgccgtggagagggacctggcggatcgcgaggccgccgttgctattcgggaggtcacactagcggtgcacgaagccgcctgtgccgaagaagagtccgcactccgcctccgcgaggacgcgctcaccgagcgggagcgagctctcgaggaggccgaggccgcggcgcaacggctggcggacagcctgtccctccgcgaggcttcgcaagaggaacaggcgcgccgtaatctggaagatgcccgcgccgagaggaccgcgctgaaccagcgggccgctgagctcgaggcgcgggagaaggagctggacgcgagggcacggatcggcggggcggccgcgggcgaaagcgacttaaccgctcgcctcgcaactgccgaacacaccatcgccgatctgcagggcgcgctagactcgtccgccggggaggtcgaggccctccgcttggcaggcgaggtagggcccggcatgcttcgggatgccgtctcccgtctagaccgcgccggccggcaggtgggcctctggggcgggcagactgcgaagtacgccgccacccaagggggcctcgcccagcgcctctcggagatagccgggactctccaacggctccccgaggagctcgagaggacgattaagtcatcctcgagggacctcgcccgaggagcggtggagctcgtactggcgagttaccaagccagggatcccgacttctccccatggacggcgctggacgagttccctcccggaaccgaggacggcgcacgcgcgcaagtccgggacgccgccgaccatatcgtccacagcttcgagggttcggcccctcggctcgcgttcgccctcaactccgacggggaggatgatacggcggagtgggcaatagtggcgacgaggccggcgatccgggtgcgtcggagtgagcccccaggcccccgccaatctttaaatagtatcttcttttttttttaaggccttcgggccccctgcttgtatagactaatttaatctgcaatcaaataaagaggaaattttttgtgttaattctatttgttgtgtgtatgagacaaggatgtctgtgccgcggttctcttgtgtcttggcttgaacaagggctcgtgcccaggtcctagtcctcaaatggctcgggtcggggctagtgcctggagagatccacatgtcgagactggccaggccgggagcgtggtgaccgagggttatgggtgacccgattgtgggtttttgccgattctcccccggagttcaccacgccccggggcacggctcggttctgggccccgtttggcgattttagccgacccgagcccccgagggcaggattgaacacgagtgacctatttcaagtcaagattcttcaaaaggaaacaacagcacagatacagcctttaggaaatcgaaaatacttttattgaggtacagatataagagaaataagaatatgcatatgtggcagcccccggccaaccctgcacgcccgaggggggtgcggggttggcccaagcctaaatcctgatacccgatcccccttaggggtagaagcgacgaaggtgttctatgttccacgggttaggcagttctgcgccgtcgctcgtggccagccgaacggagcccggccgggggacaccaatcactcgatacggaccctcccacatcggtgagagcttgctcaatccagcacgcgtttggacgcggcgtaggacgaggtcgtcgacgcagagtgatcgggcccggacgtggcgctgatggtagcgccgcaggctctgctggtagcgcgcggctcggagggccgcgcgccgccttcgctcctctaggtagtcgaggtcatctctacgaagctgatcttgatcagcttcgcagtacatggtggcccgaggggacctcagggtgagctcggatgggagaaccgcttccgcgccgtagacgaggaagaaaggcgtttccccggttgctcggcttggcgtggttcggctcgcccagagcaccgctggcaactcctcgatccacgaatcgccgtgcttcttgaggatgttgaaggtcttggttttaaggcctctgaggatttccgcattggctcgctccacttggccgttgcttctggggtgggcaggtgaggcgaagcagagcttgatgcccatatcttcgcagtaatcgccgaaaagttcactagtgaattgggtgccgttatccgtaataatacggttaggcactccaaaccgagctgtgatgcccttaatgaatttaagtgcggagtgcttatcgatcttgacaaccggataagcctcgggccacttagtgaacttgtcgatcgcgacatacagatactcaaacccgcccggggcccgcctaaacggtcccaagatatcgagcccccagacagcaaatggccatgaaagcggtatgatctgcagggcctgggccggctgatggatttgcttggcgtggaattgacacgctctgcatcgccggactaggtcgaccgcatcattgagagctgtcggccaatagaaaccttgtcgaaaagctttgccaaccaaggtacgcgaggcggagtgggctccgcattcgccttcatggatatcggcgagaagctcgacgccttgttcccgaggaatgcacttcaggaggattccgttagccgcgcgccgatagagggtcccttctaccagcacatagcgtttggaaatgcgccggacgcgttcactcccttcgcggtcctcgggtagagtcttatctgtgaggtatgcttggatctcagcgatccaagcaatcaatctaagggagctaggagcgctcccctcgggtcccgaggcctggactccgacgggcatcgggggcctgtcaggcgcgtccgtctcccctaaggggtcgggtcgcgccaacggctaggcaagcctttcttcaaaagcgcccggtggggtctgggctcgcgaggaagcgagtcgtgagagttcgtcggcaaccgtgttatcccgtctgggcacgtgccgaagctctatcccgtcaaaatggtgctccatacgccgtacttggcgcacgtaagcgtccatctgcgggtcagagcaccggtactccttacagacctggttaacgaccagctgggagtcgcctaacaccaggaggcggcagatccccagtccagctgccaccctgagtcccgcaaggagtccttcgtactctgccatattattggtcgcccgaaagtcaaggcgaaccaaatatctgaggacgtctccgctcggcgaggtcaacgtgacccccgcactagcgccctgaagagacagggagccgtcgaactgcatcacccagtgggcggtgtgaggcagctgtgaggggcccgagctggcctcggggactgagacgggctcgggagctggggtccactctgccacaaaatcggcgagggcctggctcttgatagcgtggcgtggttcaaagtgcaaatcgaactcagaaagttcgattgcccatttcaccacccgtctagtaccctctcgattatgcaagatttggccgagggggtaagacgtaaccaccatgacccgatgcgcctggaaataatggcgcagtttcctcgaggccatcagaatagcgtaaagcatcttctgggcctgagggtatcgggtcttggcgtcccggagggcctcactaacaaagtagacaggccgctgcacctttcggtggggccgatccccttcgctaggggccacatccctggggcgctcttcgtccaagcggcctcgcgaggcgcgctcgtcttctgtgccgacgacctcggggtcagaggacgacaggggcggccttcccacagtggccccggggccgtcctgggggtcggaggctcctggcgtcgtcggacaagcgggcaaagggccaactccggtcgtcaggggccttaggccaccgttcggctcgggggtctcttctccctgctctctcccgagtcgagcgggcacaggattagcctcggggtcagagggtgataggtgcggccttcccgcagtggccctcaggccatcctggggttcgggggcacctggcaccatctgacaagcgggcagagggccaactccggtcgtcgggggccttgggccgccgttcggctcgggggcctctcctccctgctctctcccgggccaagccagcacagggtggggatgcgcgaatgaggattatcctcatcgcgctccacaaccaacgctgcactaaccacttgcggggtcgccgctaagtaaagtagcaagggttcatctggctccggggcgaccagaaccgggggagagctgagatacgccttcaactgggcgagggcatgttcagcttcctccgtccaggtaaacggtccggagcgtttgaggagcttaaataagggtagcgccttctctcccagccttgatataaaccgacttagggcggccatgcaaccggtgacgcattgcacatccctaagcttgctggggggcgcatgcgctctatagctcgtatcttctcgggattggcctcgatgcctcgggcagagactaaaaacccgagaagcttgcccgcaggtacaccgaacacgcacttatcggggttcagttttatgcgggcggagcggagactctcaaaagtttccgctagatctgagagtaaggtctcttggttgcgcgtctttacaaccaagtcatcgacataagcctcaacattacgtcctatttggctacccaaagaaattcgagtagtacgttgaaaagtaggacctgcattctttaacccgaagggcattgtcgtataacaataagttcctatgggggtaatgaacgcagttttttcctcatcctccctagccatgcgaatctgttggtaaccagagtatgcatctagaaaacacaaaaggtcgcaccccgctgtggagtcgacaatctgatctatgcgaggcagggggtaaggatccttaggacatgccttgttaaggtcggtgtagtcgatgcacatccgaagcttgccgttcgccttgggaacgaccaccgggttcgccagccactccggatggatgacctcgcggatgaatccggcctccagaagtcgcgccacctcctcgcggatgaaggcttgacgttccggggcctggcgccgcactttctgccggaccggccttacgcccggccgcacggcgagacggtgctcaatcacctccctggggaccccgggcatatccgccggcctccatgcgaagacgtcagcgtttgcccgcaggaaagagacgagcgcgtcttcctatttgccgtccagaagaccaccgatccgtgtggtcttggacgggccgtcgcccagggcaatctccttgaccgggacctcgtcgcatgtgactatccgctgcctcggggcggcgggggcggatgtgccaagcctctcgtcgccaccctcgggcttggacgcgacggcgaggcggtccgcgcgctgctccatacaagcaagcgcgactttgaggtcgccatggacagagatggggccatcggggcccggcatcttcatctggaggtaggcgtagtggaccgccgccatgaactttaccaacgcgggcctccccaagaccgcgttgtagggcagactgaggtccgccacatcaaagttcacctgctccgtgcggaagttggcgggtccaccgaaggtgaccgggaggtcgatatgacctagcggccaagtgtgccccggcgtcacaccgataatcggctgggacggccggagcaccatccccggggccttgatggcgtcaaaggctgcgggggaaaggatgttgagggctgctcctccatcaatgaggacacgccccagcttcacgttgcaaacagtgggggaaaccaccattgcgatctgtcctccccgggcaacgcacggtgggtggtcggtctggtcgaaggtgagggcaacctccgaccaccgcgcccggcgcgtcgcctcatgagtaggggccgcggccagaagctctcgcttcatggccttgaggctccggcgagaaacgtgagcacactctcccccatcgacagtggcaatggtggccccaggctcttggaaacctaggtcatcatcgccgtcatcgatgtcctcggcgggggccttctgcttggcctcacttcgccgattgctggaaggaaccgccggggacttgccctctcggcgctcctgcctcctctcctcctcccacttcctcgtccgctcagccaaacttttgactgcacggcagtccgcgaggtcgtgaagggaagtgttgtggacgatgcaccacttgtcggttgggcgctccctactaggagcgccggcctccttctttttgtcgcccgcaggcctcccctttcgagtggcccgcgaagcgtcctcgacagcgaggacatgaccctcgtcgtcggtgtgggctgacctcttcttcctcctcctgtcacgccgccctgtctgagcggcggatccgggggcggccgaagctgccacaccggaaccggaggggttccaggtccatgcctcctccttacgagccactcggtccgcgagctgaaaaagctccgcggtagtctggggctctttggaggcgatcttttcgagcatgcgattgtgccgcacaccccccctgaacgcgtaaatcaccgtgtgtgcagggatgcatggtatggtgttgcggacttgacagaaccgctgaatgtacgagtgaagtgactcatcatcccttcgctgtactgcgtgcaagtccgcttcctcacctgggcgcggatatgtgccttgaaagttcatggtgaactgttggcacaaatcctcccaagagtggacagacgcgggtggcaagttcattagccaaccccgcgcctgtcctttcagggccatgggaaagaaattcgccatgaccctgtcgtcacccccggcggcctcgatcccggtcgtgtagacctggagaaactcggcggggttgacgctcccgtcatatttttcggcgatggtgggccggaaccttgggggccaacggacgttccgaaggctcgccacaaaggctctacagccgacaccaccaaccgggggcacggagggctgatccccgcgtctgtggtgaggtgacactccggacgaggaggcgccctccgttgcgtggggagcacgtcggccattacgccggcgctcgatactgatgcgggcatccggtcccccacgcagatcttcccgggtcagaggcgttgacgaaggagtggcggccgaatggcgaacagcggctgccgctcgccgcgccctccgtcttgacgacgcggagccggtggtagcagcaccagaggccttggtggcggaggaccgcccaccagcatccaggcgctgccgtgcagtcatgaccaatttggccacatcgtccagccaacgttgggctggagactccgggtcatgggcgacgggcgggtgacgtaggagcgcgcccgcagcttggagcgcgccctggggcgtgctgccgtcgccgtagacgaggaggcgacgctccccatctcgccgcccttctccacctcctgtggatgtcgaagtcgcggatccttcggccctctcgagcgccttctcccgcctaggactttggcgtggagggggcggtggagtacgagctcgacggcgtgggtttagctccccgtcgtcaccgctcatactcggggagaggtcgtgcgcctttgcttgctcggccattgggctgaacaggaaaagcttggcgaacacgaaagagtgcgagagctcagaagatcactcacagagccccctacctggcgcgccagatgacggagcgtggggctcctcaccgggagaccgcgcaggcccccctttgccagttcggccgggggccctgggtgaggttctaagctcccaatctgtggaaggttcgcgagagcggaaacacacaagacacgggcgatgtatacaggttcgggccgctgagaagcgtaataccctactcctgtgttttggtggattcgcgtatgaagaagctacaaagtgccagtcagcccccgattcttctgggattgctttctcctctcctttctaagtgggcaaggtcctccttttatatcccaaggggatcccacatgcatcatctctccctccctttctttcaacttgacttctcttcattaatggacggagatttgtatcgctgccatccgaatcaccttctgacgggacggcccatacctacctccacttccaccggaagcaggcgcgacgtgggagatggctgtctgctgacgacatgaccattgtcagaccggtcaccaatcggtcattcttgtccatcacgtgtcagtttaacaatctgcatgttcgcccttcttcatacaacat

SEQ ID NO: 5410 - DNA, 10825 bp, Oryza sativa
tatatgggcagaattttggagccacttgataattttcagtttcagaccatgggaaaaagtggtggtttcaccctgacaaacagatcattagcaaaagtagtttatatcctctcaaaaaaaaaagacaaagtagcttataaacaaattggcatagtaaacatatagtatgaacgtaccacaagagcagcttccaaagattctgaagaaatacccacttcagatgctacatcaccaacactaacctttccttgatcaattagctaaaatacagtacagaaattaatgtttctttccttggcatgggttacgtagtaaatatcagagtcctaactgagctttgccagagtagaaattacctttctaagaacaagagcaacatcagcagagtttctcataaggttcccaccaaccgagagattgtcagtatccacttccatcccttggattgctagggaatctgaacttctaacagtgtggggtaaagaggcttgctctatggtctctactttgataaggttactagagttaaagctagtggcttcatagttcatgaatttatccttgttcttgcgcgtgaatcttagttttggtacctttccagtgataaggtttgcatcttttagccttgcttctgtaggactctggtgagatgcacagttacttctctctagagaattggcatatccaatagtagaatgctttgagcaaaatgctctcagctcgacctacatggaaaacaaacaagttgaacaacagcgacctaaataaggctaatggcaaacacctgaagaaaatgatctcacattaggatacccaaattttccccatatctccatttgatgcttggactctcgtgcacatataggatgaaaaggtgttcggcatgttcctgaaaaccacatggataactagttaaaggacttaaaaaaatgtgatgctagttttaagtgccaccaaaactgacagaaaatatcaaagataattcaaatcatagaatgcttctatcctacaaaatattatatatgaacaatagtttaatatataattcactgcttactccatcttcacagctaagacttaatatgtcaactcacatgtacttagtgtcttaaaatacataattttgtaattatattgtgaactaaactttaaagcctgggttctcagtattacttattacattgttcttagcagcctttttttgaagtctgtggatatggcataagtcaattaagggtgaaattatgattaaaagcatattatgcttcctgcaatgttttttgacaaagggtcaaatacttggcaccatcacaaaaatcagagagttggaaaatattatcatatgtggcaataatatatataggcccatgccctatgtgtcattctcacatgtgatggtattttgctatttgcatatctttacgatggcgttttccaatttctcttcaaaaatggatattatggatgttcgcatacattgagaaatgtatggttttatgtatctgttcgcaaaaaatacataatgtaaaccacacttatcagaaccagaccggcctggcagtccaaaaaggaaaaaaagggaccagatcccagccagtctggcacgctgttggatcattcaagcagttagcctgacttgaacaagtaaaaccctggccaaagtggacagtttttcagtgaaccagccacaaaatgtgtgtggccccaaaagttggttcagttattaattgcaaaaaagttatacaagggtataggtataactaactaatatgcagttatccatcattaacagcagcatagtaactggttggactagaacccagttatcattttgatatgctgtcatgtaaaatgcagttacaacttacaagataacctggcatgtagagaactaaaatggatatctgtatacacatttctttttactatatatacgaaaaatatttaaataaagccaacaaaggtaacaatgtaaacccattatttattgcatgaaaaagtaccattctaccaaattcccgcatgccaaacatagaattatctttgccagcaatattccatcattgtatggtgtagcaatacttctgccacaaactacgttgagttaatgagttgagcaaagtcatccattcagatgaggattacttcctttggaaagttatcaccagaaatgagataaatggcatgtttggtagctttgctcatccttatctagcaaggtcagtggacaaggaaactgggttgccttgcttggtttggtaatggacacacaagtcagtgttccccattttttgatgaaaagacaattcagctctcctctcctagcaatgatttcattgtgcattagcaagggtagccaaggaaccaaacacacctactgcccagctattttagcaagaattttgtgctaccgtgcaacacctgatttagaattacctcctcaggtaaacctgagtgacagcatatttgcggtttttcattgaatagaccgataaagttgctacatatcttccagttcaaaggcaaatttaaaggttgcttttgaaggcccacattgaagaaaggaaaaaaaaataagcaatgactcggtcttaagaaactcgagaccgcagtagaagcatgatgcagggaaattctatgcggtggtacaaaatggaagtgtgcaagaaaaattatctgcaaaacactgattctaaataacttaaatgtatatatacatatagttcatctaactaaaatagtaaaatggagacatagggtaaaatacataccatgactacatcggacacatacaccatgcttaaccttgcaaatgctgcacaccaatttccactgattctcctggacacttccaacattagtaacaggttccattgattccatgtcttccacaagagctcccggtgtccaaaggctacaaaacaagtgcacaaatttaaggttccccccatgcgctgtttgaccaggctcccctttgacaggttttagagcgcctttctcttttgggcatagaacacaaggcatcgacaaggtgttgtccgcatctttcttcaacgactgcagtgactccaaatccttacaccaagtgcacaaccactggccatcaggcacaacatgcaaaccataacacttctggtgcacagttaccttacagcggttgcaattgagcatgctattggacaccgtactactctcccccaaacaacaaacatcacatacagaactagcctcagctcccgagcgcggtagcagaacaagctgctctaaccctgcatccacacctaaaagcttcctcttcttgttgggccgttctgaagtgagcacaaaccgttcctttgatcctagcaaccaattcagtgatgattctccctcttcttcacattttgatgatacaatgccagcactgctagtagcttgctccacttccaatggccaattctcctgttgcacaaccacctcatgtatgccctgctctacactctgctcaccgcgttccttgttaccaacgaactgtcgcacaatcacctcatgtatgccttgctcaacactttgctcacttcgctcactccgttcgctatgctccttgttactgactctttcttcaccacccagacccaagtacgagcttgtttcagccacagccacatcaaatgtctcagctgtgtccatcaattccttgccactgcccacaaatggtatgaggatgcacgaatcgagcccgccatagccgaacggaaactttggcattaacatatcaatatcatccaaattcaccggccggaaatacgcctcgaactgctcccacacgccagtcttcgcagagggctccgtggctggctgcggcgggagctccacatcagccacgtcctggggctgaatcttcttgtgcttcttccgcgcgtcgctctgccccgaccagttcacgagccgcgcgggcagcgtgggaaccctaggcgccgtcccctcgccctcgaacggcgtccgcaccgacagggccttcctggcctgcgcgtacaggtccaccccgacgcccggggcggccccctccggcaagccctcggcgcgggccatctccccgcggcggccgccgctcataaagcctcggccagggaagggggcatcgccgccgaggcccccgcggaacacggcgggggtcgggggtagggcctccggcgaggagggacggcggcggaggaccggggggcggagctagggctagggctagggcgctagggcttcgttccgcgagcccgagtattgaagagtgtctccttcgcgtctgttcttccttcgactcctttccggcccgatttttccgcgtcagtctcgctcggatccgatgggagagaggggcggggctgggagaggctcgcggcgtcaggacacgggttcggttttgcacgggaggcacgcagcatatgctctgctgctcttctcgttgggtttgttatactactactaccggcaggcacctttactcaccgtcctcttcacgctagcaataacgtgaggtatcgaagtaacttcgaaatagagtgcggtgcaagtaaaatgaaatttacattgtggtgatatttggtttaaaaacagtaataaatacgttgcggtaatgaatgagtttcaagaatctacagagtttttttagcggagaagtttcaatgaagttgacggtttaatgaactatgcatggttaagataacgattttataagggagttggtaaaggatgaagatgattgggttaggtaacatttaatttggaatatagtttcttttccacttgaccgtatatagttttgacaaaaaaaatagatgaaactttgcgagtcaattataactttttaaatggacaccttcacaaatatgccaaaataaacatgacatgtatttttatccgatctttatcaaatttatcatataacattacgagataagctccaaaatcactcacactctcttgcatgccattttgttttccagcgtgcaagcatacatgcatgcaacatagcgtttatcgtaccagtcttagtaaacgacaataattcacgtactacatttactggatatttggacattcttgtcgtttctacctttcctgctatgctcactaaggagattgtttgtcgatacaatagagcatagacaaatatttctgcatttaccggatattattgacctacagctgtaggtgtatataccaacttcatattatggtaaatattataatgttaccatattgtaaagttatgggcccatggttataagtgaatttgaccttaggtcacaaaaataatggcattaagcttgatgctaaggcccactaagttccattcactttcacctaaaaaaacacaaagataacccaacatggcatagacatgccttggctatggaccatataagggtttgctttttcacccacgataattgatgtgtttttctcatttatccctgatttatgtggcattgtaatttgaagaaaatcaagtgtcctaagtaagaaaacatttataaaacacgtaatttgataagtttgcacttgataaaacatattgtaacttgaataaaatcaagtgtcctagtaagaaaaccttacctttataaaactagtttctaagtgtcctagtgtgggcaaataggatccgaaaaacttggtgttcggagatggggtcaaaagctatgatcgcatattttagcactaaacaagctcatacacacttgatttacccaggttttcgcgcctctcgagagatgatagttatattcttgctttcttgattaatatctggacaactttttgcaccggaggtgtgttagaactggctaagtccagagctcgtacaacttctacgtgttgtgttcttgtgtatctaggagagttgaacctttcactcggtgatctatctggtgcttataagttatatactctcccacaatctacctaatcaccatgggataactgacaaaggtactatagtcatacatcattacctacaccgtacccgctatcataccatccaccacttataattcttccatgctacaagatgccaccttccacaggtctaccatagaagtgactaggcctccccctgacggtatagcttggtcagatggagagaaaggagacatgaggggtgaggcgtgatacaccaaatccctacattaaatacctttgacttgcggtgagcatgcctaattaatgtggaatgatgggagcgagctattgcacgcttcatttgtacctgttgttagagcgtggtcatgtgatcccccaccgagggcgcccacgcgaccaaccattcgcgtcctcgagcaatcctcccgcgaatgaccatgagatggacgcattggcccctgaactgtcgcctccgagcaatcttcccgtgaatggtctcgagctaggcgcgttgccacatactagacccgagcaaccttcccatggctagcctctagcgggtcgacaaccacacgtcatttcctagccagtccaacctaccaactagttttctagtcaccctttcacgcagtgttatccgtacgctatcttgtgacctgaggaaaattgtaccgatatcttagcttccagcctagtcgtagggatatcaaggaaaattatactcattactttctaaaatcaagtgttctagtagtagtatagatgatgagaggtataaagtcatgtgtataccagattcacttcctccaatgtatctagccttttcaatgtactaatgcacacctaacagaaatggtgaaatatacacaccattcaccattacaaagaggatggagattggagaataaagaggcccaagctacaaactacacagtgctgtcaaatagtttttagggtgcgtttagttctttaggcgtaaagtttttgaagtatacggatgcacatttaaagtattaaacgtagactaataacaaaacaaattacagattccgcctgtaaaatgtgagacaaatttattaagcctaattaatctatcattagcaaatgtttactgtagcaccacattgtcaaatcatgacgtaattagacttaaaagatttgtctcgcaatttacatgtaaaccgtacaattggtttttttatacatttaatgcctcatatatgtggccaaatatttaatgtgacgttttttgctaatttttttttatctatgcaaggccttatttcaaaaggacagccagcagaaaaagcgactcacagcacggcgaatatactagtagatgcagatcagatcatcagagacgacggccacggccaaatcgggttgacgcgcacggcgcacacacactctcccccgaaggcctgaaaaccatcaggcatccgtatacagagcgcacagtgtgcagccagatcgagcattccaatttccaagctctctccccacagaggccgaggccgcaagcgcatccagagcgcacccacgccacgccgcgccgcaccgtgccgtgccgcgccgcgccgcgcggatgccatccaagcggccgtcccagagcgccatggacgcgggcgccgcgcccgcctcgccatcccctcccaggtcgtcgaagaagcgctcgtcccgccccaagccccgcgcgggcgacgccgcgcgccacccggcccccaaccctagcccgccccccgccgccgccgcgcccgcctcctcccgcagccgcgagcgcgagcgcaagcgcaggcagcgcggcgcgttcgcggaccccgccgcgggaccgcgcccgccgccggggggcagcacgggggcgccgtccagaagctctggggcgacgccgacgaggtcgcgctcctcgccggcgccgccgccttccgcgcgcgcgccggccacgtcccgcgcctcccggacatgggcgcgctcttcgactccatcaggggctccctctccccgcacatcgaccaggccaaggtgtactacaagctgaagcggctcaagggcaagtacctgcacgcggcgcccggcgcgtccgcgggaccgcacgaacgccgcgtgcgcgacctctgcgcgagcgtctggggcgccgacctcgagccccttgctgagggcgacgacgaaagggccgccgccgccgccgccgccgccgccgccgaccagccgcgcactgtcccggacgccgccgccatgctgcctgtgctgactgagatgcttgatgagtactggaagacggatgggcgagcgctgtccagtgtgtccctggcgaaggggttgtcactgctagggacagaggaagcaagattcatcgagggcaagtggaggaggcagcttgattcagagatacaaacgcagatgcggcgacatgatctggccaaggaggtctacgccttgctcatggacgccatcaaggccctcgggccttagctcgggtatgactgtcatctacacgagtaatttatccaaactctgccatttccttccctagtccaacttctcgctggagaattcgttaacgcattgctcgttcgttcaattacagtagaacttatacaatctattactcggcaattgattgttcttgctgactgttggggtattttaccaaaaaggataacacgattgtgtggtctgtcgtctgttcacaaagtagcaaagaagctatttttctccatcagcacaccacagatcgaagtattaagcaattatgcttcccatagcatgatggaagtaacagtcttataatcaggaagcaagcaatatcagcttgattttggtttctgtggtcaaaaaagcctagagaatttcatgtttcatacttgctttacatattctttgcatcaaccttgagcaaagccagaaatcaaccatgccaatcctaaatggctgcaacaccccagtttttatgcactactagtatgtatattgtgtctctgactggatagtttggattttggagatggaatagtagcgtgaaaggagaatttggagatgacacacaataaattatgcataacttcatacacatctaataaccaaatacagcacatgctataagccatatgatgatgatgatctcaattaagttgtcaaaaccaacaaccaagccaacagagtatctttgctaatacttttttccttgaggtgtatcagaaaatgaatttgtgagaggtcacaaacccaggtttttaagctacttcaaataaaactgtttgaatttagaaaaaacttctccaataaagtatgtgattgccaaatcaagtccatggcatagagaattctgccatgtattttcttatgttggtctcttggctttggcaggagtaaacacataagccgtacagttgtccaaaaaaaaaagggtaaaaagagagaagaagaaatgaccccactaagatatggactagcaataattgaccccacagggccacaggatatattttctggctctgctacttggctatctcatgggcacctgaaagaccagatatagatatgtgcacctgaaattttgaattctgcttggttagggaaacaaaattatcagagagatacatctacgaaatattagacacgagctattacatatgagattgatgactaagagataacatatttgaagtaacctatagtgatcgagaattagatgaggaaggtcatatactaattagtggagtagtacataacagggtgttgaaaggaacatttaagtactgagcaccaaggtcctttaataggcatgctgcatgcagctgaatgcttcgtttgacacctatagcaaagttgattattatttcgtctcttcagagcgttagagcactacctcagttttctttttaatggaagaaccggctattgatttttgccagcctcattgccaaactttattaacgatctgatcagctttgtttaacatcatggagacgtgatgcattatatctatatgactatatctacatatatcttcattcataggatgtactgtgtttcccttttttgctgaatttttgttcttatttgatagaattatagaatgtttgatgtttaggcatatctgttgggtatcttttatatagcgaagtacctggtgcttgctgggtataagggtattactgcggtagtcaaatttgttgagctcagcagctcaatgcagcttttctatgtttggtgcactaccgttgaaaagaatcttatcaaacttcattgctctcaggatctcaatttaccttatttgcagtcagtcacattgttcacaaactgaactgacacttaccttgcagtcagtcacattgttcacaaactgaactgacacttaccaacgtccgttttgcaggtacaagatggtggtttagatagagctgggtctgggtacatatatctgcaatgccttttgtattggctggtcgaagcattgtactcggttgatgattgacgaggccagggtacatatatctgcaatgccttttgtattggctggtcgaagcattgtactcggttgatgattgacgaggccagggtacatatatctgcaatgccttttgtattggctggtcgaagcattgtactcggttgatgattgacgaggccaagaatcaagtggaactcattttcgactgtatcaaataatttaggttcataacggttgctttggccgttctcccgtcagatttagatgtgaaaatgatttagtggcttaacctgtttgtaaatcgtatgctaacttctgtatctgtcatattagtgcattttcaagtgtaaggggtcagcatttcgatatttactacatggtgtggtaaaaaacaattaggccatcttggttaatgattacaatgttgaaactatatttgcttatcattcaacttctaaactgattgttcactttgta

SEQ ID NO: 5411 - DNA, 12073 bp, Oryza sativa
cagacataatattgattctcctgtgaaataccagaaaaaatcccaaactgtttatttgctaatggaatcaatgggaggccattcatgcatttgccgatattaccactgtccagatcagcaaggcaatattccaataatattagcttctgagatttttctaatgtaccaagattttcaaaatccttgaggaaatgtcgcactgtagcaggagttactattttgagcatatacttcgaatggaacttaggaaacatatcagcaatcgcacctggtagacgaacgacaggcatgcctaacatcacaagagcctcactgagatcatcacttcttgaaaatccctcgtcatgaagcaaactctcagctggtgttatccaagtcccacctttgatctccgagtgaaatactggagaggtgtaaataaatttacagatttgttccacgagaatactccagggctcctcgtacaaaccagttggccataaggaataatatgatattttggagtccaaaactgtacgcaactgtagcagcagttctctgaacaaaggagcaacaacatcttctaacaataacatattccagtcagagcgaagcttaccacccctgtccatatcagctccataccaaatgtcacgtcggttggatgatacttcaaagtaaccattcacatgcacagataatcctgtctttactggcaaaggaagaaaacagaatgcgcggccttgtctgagaataacttcctgcaaattcagtgattactaattaccatagagtaaccacagcaaatgctaaggtgtaaaaaacacactgaaatgatgcaccacgttctgaagaacgtctgatatagcatgaagtccattagataacataaatcaaacacacattttttaagtcaaaggtattataatcaattaagttatgcagtgtacaaagtttgttcaaccagaaaaaaaaatcacatcaataaccatggtcatattgttaatgattattttaaaaatattcagcatcagataacaataggcaacgccctactgttgctaaaaaattggtgataatagccataataaagagaactgcaaaacgaactagatattacctcaggtcccacgttggagatgcaagcagcaacagaagcccaaggtagtaggtgaagatcataatccttggcagcagttgttgcaaaaataccaattttacttaatgcagatgccattccctgtacaataaaataggtatagctcttcttctcaaacttctcacccaaaaatgactttgatacaaaatccattgaaaaggaatctatctttttctcagaggactcagcagcagtgccagaaaacctgacaagggcttgtcgatgccagcgcaaattgtcatgctgtgaccctatggagcaagagtacactatctttggttcactcataccagattcccatacatacatttcaagtgacagcacatttttaaggaaaagtaaattatatacagcttcttcgtaaagttgagcaaacagagataagatatcatcttctgtgtacacttgtctcgataaccgactaagagatgcttgctcagcagtccttaaaggaaagcgaaacaaagttccctgaaatggtgctttcatgtcacaaccaaatgcacaatagggtgaaagctggtcgttgtatagtgtaattgctgaagaactgacaaaatctatacgttttccaggatttgcagctgacacattcggaagataagcaccctggggatcaaacaggacaatgtacttgccactcacaaatgatggcaagtcagtcaagtggtacaccgagttaaaaccaaccctgcggaaacagaaatcgtgagttatcgctcacagcaaaactaaataaataaataaaatcatgcgctattacagggtgaacattaaacagtgaaacataaccagttaagaacaaaggtaagtatctgttgaatcattagtggcatgtctgacaattccagggtgcttgttcaaaataaacttaggagcctagacattgatatattcactacccaaacccatcaatacctaaaacattataacggggatgacatcagaacacaatagcatagatcaggaactaaataagcgggacaccacggcgacattgatatattctataccaaacccatcattaatacctaaaacattataactgggatggcatcagaacaacaaataagcgggacgtcgcagcgacattgatatattcactacccaaaaccatggatacctaaaacattataacggggaaggcatcagaacacaatagcattgatcaggaacaaataagcgggtcgtcacgccgattttactaccaatgaagcttagcattgcaaattacagctcgaacaagcttgagagagagaaggggggcgcacccgaagcggccggtcttccagacctgggacaccttcctgctgtccccgatgcgggagatactggcgaagtcctcgtcggtgaagacggcgtcgttgtaggcgagcaacgccgggccctgccattgcgcgagggcgggcgcgagcagcgagcctgcgccgtgcgcgcggcggtcgaggcagaggcggacgcgggacgcccccgcgtcgtcggcgttctggatgagctcccgcagcgcggtggtgccctccgggtagttggcgagcacctcgcggatgcgccgcgtgaggtccacccgctgcccgaagtcctcgagcagcatcccgccgggatccatgggcgaggaggcgatcgaagcgaagctaccgtgccattggaagcgcgaggaggggaggaggaggaggctagggtttgggaggggagtaggcgaggattttttgggcgagggagaaggggtgggaattcgcggatttgggcgtgagcgctcgtaattttgcctccgccctcgctgctgctgctgcggctgcgggcgttggttggagattttgactcctccgccttttcgcggaggcttcgtcgtcgactcgttcgctcgccttctccttcctcttcaagattgcgcgaaccggacgccggaagggactcccggcacctgccgctgtctctgccgtgtggggcccacgtttggtgcctcctttccataacatttttttgatttgggtgctgctctgttgggcctttaatagtgaaacggcccaatgttgagcgctaactgggcccacgattcatcgtagatatgggccgatatggggctgcccggctggtgcggcagagcagcccatttaggctgtgttcgtagctccatgttgataataactaatccctccgtaaatagggtggctcgttagagtataattaattaattattaactaaaacctcgaacaatataataatatatattttttcaagcaggtttactattcgagtatagattattgttgtttagaaagtttgtgcatgaaaaaagaagaaagcacaagttgagaaagagggaaaacaaactcagcctttcgccatagaggcctaaccaaagcaggtacagactataagctagctataaacacatattgagaagataaatgatgagagataagagcagcgagctgcagatttgtagccagttacggcacatactacaagacgtaatgtgtgtatgacatgtgggatctaatattacttatgtagtatatgtttataggaaactattatatgaatttgatattaaactaactatagatgatttgaagatagtagttggctatactatcaaacttgctctcacaccacggatgaactaaagagtagggtgattactccgattagttgtcctaactgctgaccatcagtcttatcttttggcttatgcttatgtttataagccaaaatttgaatttccagccttaaatttgtagtttattttgggattttttcatcgtagtttattttccaacctttgcttttagattactaagaacacatatatataaaagttttatttacaaaatattttctgtttgtaaatacgttgtttcgcttattccaccaataagcgaaatgatacagtcctatggcagacagccgtagcagcagcagtagccaaagcagtcgggtcatagcaatttttttgttaaaaaaatagttaaaacccagcctttatatgcaaagagatagatgtagctgagttgtagcaatagcagctgatggtttattttcaatttaattaagttggtccttgtatactcattttattccaatatatagttagctttagttttcaacacgagtattaagaatagatccaaaaagacttagtttccttgagtgggtgaaattatagagttatactagttgaagatataataaaacaaagagttaatatggtaagtataatttagtggggaaaatcaccttttactaataaagtttaaactctaagagttattatattttataaggtatggagtaaccatttatgtcaataatgctggtggattatttcctatttaaaaccatttcagtaattatcgtatgaatggttggttttttttatgaaaagattagctcctactctcttttgtagaaaaaaagtggttttgcatttttttttaaagtcaataaaacgtagctttggtcatttcactcttttgcgtaaatataagatactcaggagcacgcaaaacgataaaactcattagcatatgattaattaagtattaattattataaatttaaaaatggattaatttgatttttaaaaaaacaacttctaaaaaaacttttttataaaaacacactatttaaccgtttgaaaatcgtgctaacagaaaataagtaagttgaagtttcgagttgagaaaaaagaactaggccttacacaagggctaacagcctcatcttttaacccatgcttatccttataagccaaaatgtgaattttcaatcttaaatttgaagttgattgtggagttttttttatcgtagtttatttttccagtctttgcttttatatcgctaaaaaaacgtatataaaatttttatttataaattattttctgtttgtaaaaatactactttacttattccgtcaataagtggaacgatagagtactaacactattatgaaagctttgattgtaacaaacctggttacgccattttttatgtccaagacatttactattccaaaaaccgtaactatggtcaaaatcaatttatattcactgcacggatttacagacgagatgtcaggcggagtatattccattccagggtccgtttattccattccacaagtcacaagttacagcttcgtgataattgttgttttcctgggcgcgagtagatgcagcctccgctggttgttggcgcgcggacgcggcgtgaccgcgtgagtcgcggcgttttcaagcccaatgatcgctgatgcgagcaatctgaccgtcttctgagttcagatatagaatcgccacaagtggagtagacgatggctcagacatgggcgccacgcacaactagcacacgtagcacaccacaccacacagcccataggtagatgtgatgtggctgcttctgccgtttgctttgctctgcaatcctgcatgctctcccaggccggatcgcgtgccatctgcaaagccaccaactttgcctttgcctgctgctagtactagttgtactactgtgatctgaacatggagctttgcactttttcttaagaagatatcaaatcatacagctagtgacaattaacaaatcagattgtgatttgtgcaatcgatccatatcgaggtcattaggaggccagagacgctgcaatttggtgcttgtagttggagaggaaatcaggaaactgaactggcacctaacagcggcactgatacagcagcagcagcatggatactgcaggcgatgaggcgtggctgcatgttttgcgaggaccgaacgaacgatatggattgcctcgtttcaatatccatcaaaaaaaaaaaaacaagatagcaaccattccatacctgtcgctccagacaaacagtggctaccaccaaacctgtcaaaactaaaatgataatgagaagtccgcaataacttcgtcaattttaacctgtgacaacacatcaagtatttgtaaaaatagagtgtgcgtgtttgtttataggatgagtatgcttgtgctgtgagcgcttacgtttacatcgtgttttttttaaaaaaaataatcgctctgttcttttcaaatttgcagcccgtgtcttttgtacgtcaggatcacatcagtaagtgaaactgggtagtagctgatgacaaaactctctgaaccaaagttgttgggaggatttcatcaaagaatggggccaccgttttctcctcatgttgcatcacctctcttaccttgacaaaggaaacaacgtcaccgtcttaagtgtgggtaggtagaacaagataaactgcattatgcgcctaaaagaaagatacttcctccgtatctagctagattcattaacattaatatgaatgtgagaaatgctagaatgacttacattgtgaaacggagagaagcatgtttcattattgacttggttcaggtaatccgatctaaattatatgtcgtgttgatgatcaccctctctcaatttgaggcaggaatcataacccctgatctgtttacagtgctctcgatgttgccagcggtgtagttgccagcaacctgtgcatctaacaaaatggacgaacggaaatggttaagtatagaagcaagggcgatgtgaattctaaatcaaccgcgttagcgaaaagccggaaaaaacggatttgtacatcatatgtgaggttgcttaattgaatgctaccttgtttggacgattagggaggtggagttttttttttgttttaaaaaggtattcaataatttggtaatcgatttgagcagttgtagacattatcaattcgctaacaggcttagtaaaacttagatcttttttagccagctgtataagagattaatatattttctatcggttataaatattctctatttataaaagaaagtcatgacagtaactaaattctttcgtgtattcttagcactaaacgaatcgactgttccactaataaaaaaacgaaaactttgctgggctacttgtaccacatctatatattcatcatccgtacttctaatccgtacctcaccttattccaaactgaatagaccacccgagcaaccttcatcgagtaaaattattttgtaccaccgatgatataatcatgctaattagttttaaaatgcggttaggataggaatggcgcgtgatgaaggaggacaagcaggctacggagatcggtctaaagagatgcaatggtagcggaggcccagaacgagcaaggtcagcaatatcatgacaagaagaacgggtcctgaaagaagggggtgatgaaaaaaaaaagacaatgatcacgatgaagtatatgccacggtaccgccgttatcaatagtcggagatagaaacgactcatcggagccaaggaaaaggggaaggcgaaggggagtataagagagagtgtaggacacaggaagatagagtgtagtgtattactaccatcttatataaaaaaggcaaaggtacattgagacaaatgcaacccaacagaatcgccataaaaagacatctgtcgatgaagaggagccacaccattatcaccaccaaacctcaaaggctcaacaagcttgagtgcaggacaccaactcgtcgtctcatggttcatgcttgacacccaacagtgtcacatttggaagcaaaatgacgctttcagcctctgccaatcctcggactggcacctaaccaccaaaacccaacgacggagagaagaaaagagagatcaaaggcgaagggcaaatcagaaaaaaacgtgcctcgtatgagctcatatatataatttttttctccgaagaaatcccatcattttctccgggggctatttaacgggctcatctggtcctccacattctccccctcctcctcctcctcttccacctccaccctaccactctccaccacccacccgcccgtccgcctccctccgctccgctgctgcagccagccaacccagccttgctgcctcgcgggcgaacaaaaacccccagaattctccgcgtcgatctcgccccgccgcgtcccggctcgacgcgggccggcgccgtgagggtggggatcgcatgtgaagcgcattggagcggataactcgtctctatttgggggaattttttttagttttttgtttggggtttccaatcctttttcttcggcggagccgcgagcgtaggtgcgtctatctgctccgtctccggtggttgttttgattttatccgatttcgaggggggttcttgtgggcggtgtgattaggcggggtgatctcggctcgatcgatcggaacatcatctgcaggggaagcggttggcctccccccctacgccctttgaggatttttttacccttggtgtgatgagatagatgtgtgctgttttggggattttggtaggtcgatcggatcatcggatgcgctatgccagcatattcttgtcgtgtttcctgatctgagcactaagcctcaggcagtgatgagagttcggtggagctcgttagtttagtcgatcgtgctgctcaccctagagcttttcccccttttgtttaatggagaaaaactcataagcatactgtttctgttgttagcttagctgtctattgggatttcttttggagagtttagatgcagcaacaagtagagtgctaggataggctattatttatcatttgtttatctgtggctgtgatcaatatggagcatcttcaccactacctgactgtaaataagtaattgatagtgttgactaattggaaacgtcactatcaattgatagtattgtcgatttctatgtatgttctccccttcaatctgaattaaacttaggctggcccgggtgaaaaagataatgctgaccaatctgtagaccctttgaccactgtgttttcatcaatacatatacaaatacttagatctcggcactactataaatgtatggcgcgaaatgaatcttacaatgtgttttttctttcacaaaacaaagcggctgaaattattgtcggtcaaatttgaacgagagaatcttcgcgccaccgccgtgtaggcacattgtgtaactgaaatttgtttcttctgatatattcacgtgcaaagcttttgcgtttccgctaataaatttgaatgagagaatcaacggtatcagttattcgaaaacggacggaatatatttttttgtcgtcttctatgctcttttcagaaatatatatttcttaaatagcttcataccatttttagattagcttatttctaatcaaaagtacttcgactttgaccttgttatatgtttagtattgttgtaaagatataattaaagaaagtaaagccaaacattgtccaaattgcaagtaaaaatacagtgagtagtgtgttcatgacatggttgtttggcccgaactgcaaaaaattgtctttgaaacattctttttcatctacttgattagtttcccctcaatgtagcacgatatgctgcggcaacctgcaagcacctctggagatgttgatagaattgcaaacaggaagcatcgtcacatagtgcctaggcgttcaacagaaaagaagaaccctcataacatccagtttgtaagtactaacttggaaagagagatatggtgtagcgtgcattttttttggagaatttatttatcctttttttttctgttttgttattttgcaggaacgtcaagtagctgcgcttgaatacaggcaggaagaacagaggaagaggtacgctgatgtgctctaaaatcaatgtgctttgataaatcattgttttgtattatctccagtatactgaacattttctagtggttttaataattgatcagtattgatttcatgtcactattattagctgttattattactctttgttcagcatgttagttgaagaactgcattaactttcttgcctggtttgttattttcagagccaatggtggtcgtttattcttcacattgtctttatcatcccatctcgtggaaaatggagatgaacttgagacatccgcatcaccatcattgttactttttcacttcaatgatccagaggatttggcaagatgtttaacttcatcaagggcgttgctagaggactcccaacaatcagacaaagcccctgataatgatttctcagtcaacaccttcagcaacgcgagtgtggacgtgaagcgaacttcacgaaagaaaagcaaaaagaaaaacaagaggcacaaaagagtgcatggcaaaaaagtatctgaggcatctgacacacagtctatgcagagcaagggtgcttctcattgcatcgatgttgctggtggtgaatccttgacactttcatccaaccatgtggctcatgctggatctgaaatgcggtgtagaaaggagacttttccttctatggctgatggaggtgaaactttgacactgcctccaaaccatgtggctgacaaattgtttggggatttgtcttctgattcttcagtgagagaagtttctgcggagagacctgatagtgaaactggtaacgatggttctttcataactctgatatcaagtacatcttgtagtgatgagatagaattgtctaggcatgcttcttattttgaatgctgtgagcaatctaacagcaataactccagatgtttggacagtgcctccacttccactcttactgattcctctttggatggccattacacagatagcagttggaacttcagtgatgataccgagaacttgttgattgacaaaaatgagtgccctccgtgtgttcagtcaaaagtgacagatctcaggggttctaaatgtggtggcagtgaaggttggctaaacaaagcaaatcatgataaattctcctgtttcagaaacagtgctgatgctagcagtggtacacaagaaatgcaatcatgcagtaatgctagtagcgatggtgatttcctcccagtaatttctagaaaaagagcccggaaaaatagaaaggtccaacctttggggggttgtaatgtggaacatatttgtggtgttgagcatggtcaaagtggaaaacaatccaaaatttcttctagaccaagtaattcttgcacacaagttgcatcaaaagattccactaaggatttcattcacccaattaaagttcgcacatggactccacatgaagttacactaaatgattacatgataggagcaaatatgaatcacctccaggatccaaaacaaaaccgtagggggaaaccacataagtactcttgtttgagtgaagtggcaaactgtggttttattgaagagaagagtgcctgtacagcgaaaatgcttcctggaattacacactcaacagaaacaggtgttggtcagatagcatcgagttcagcttctgatgtgacggtccgagagatatctgaggaaatttgtacaccaataggtcctgtgcagaaaggagggctgcagattttgcttcgagaagaaaatgttgttggcacaggttctcttgatgttttgaatcatgtttcttctgttgattccgaagaacagaagaaagtagataatgctgtaatgagcagatctcatggcatggaaggtcaccatctacaatcccaagattcaggttctcagttccctggatgcaccacagattactggaaaacttccaggcctactgaaagtggtttggaggttggctatcatggtgtatcagcttttgaagggcgctgtaacacgaaccagcaaagatctgttagttctaaattgcaattaggtgagatgatcaaggctgcaaatgatgcctgcaaagtgcaaggtgcatcagatgttcatctgatttctggtcacccccttgctgattttgagacttttatatattctgcaagtccagtcattgctaagacatcttgcatgaggaatggcaactgtttgcaggacccgcaagctggcagctcaccatatcaatatcagatatcggatgtctccttgagaaatgtgtgggaatggt

SEQ ID NO: 5412 - DNA, 28137 bp, Oryza sativa
cgaacgcgtcacgccgcgtgtaatacggtgcagcgcgctcgtttatccggtctgtgaccagtcacagaccggtcagatcgtgggttaggtggcgacaggcggtctgacgcacgcctcgccccgtccagtcaggacgagagcctccaagcactcgtccctagccggagccggcgtgttacctcctggagatgacacgttggttccggtcagatatataccaggcttcatcctaaccattacaggcaagatgttgtatgaagaagggcgaacatgcagattgttaaactgacacgtgatggacaagaatgaccgattggtgaccggtctgacaatggtcatgtcgtcagcagacagccatctcccacgtcgcgcctgcttccggtggaagtggaggtaggtatgggccgtcccgtcagaaggtgattcggatggcagcgatacaaatctccgtccattaatgaagagaagtcaagttgaaagaaagggagggagagatgatgcatgtgggatccccttgggatataaaaggaggaccttgcccacttagaaaggagaggagaaagcaatcccagaagaatcgggggctgactggcactttgtagcttcttcatacgcgaatccaccaaaacacaggagtagggtattacgcttctcagcggcccgaacctgtatacatcgcccgtgtcttgtgtgtttccgctctcgcgaaccttccacagattgggagcttagaacctcacccagggcccccggccgaactggcaaaggggggcctgcgcggtctcccggtgaggagccccacgctccgtcatctggcgcgccaggtagggggctctgtgagtgatcttctgagctctcgcactctttcgtgttcgccaagcttttcctgttcagcccaatggccgagcaagcaaaggcgcacgacctctccccgagtatgagcggtgacgacggggagctaaacccacgccgtcgagctcgtactccaccgccccctccacgccaaagtcctaggcgggagaaggcgctcgagagggccgaaggatccgcgacttcgacatccacaggaggtggagaagggcggcgagatggggagcgtcgcctcctcgtctacggcgacggcagcacgccccagggcgcgctccaagctgcgggcgcgctcctacgtcacccgcccgtcgcccatgacccggagtctccagcccaacgttggctggacgatgtggccaaattggtcatgactgcacggcagcgcctggatgctggtgggcggtcctccgccaccaaggcctctggtgctgctaccaccggctccgcgtcgtcaagacggagggcgcggcgagcggcagccgctgttcgccattcggccgccactccttcgtcaacgcctctgacccgggaagatctgcgtgggggaccggatgcccgcatcagtatcgagcgccggcgtaatggccgacgtgctccccacgcaacggagggcgcctcctcgtccggagtgtcacctcaccacagacgcggggatcagccctccgtgcccccggttggtggtgtcggctgtagagcctttgtggcgagccttcggaacgtccgttggcccccaaggttccggcccaccatcgccgaaaaatatgacgggagcgtcaaccccgccgagtttctccaggtctacacgaccgggatcgaggccgccgggggtgacgacagggtcatggcgaatttctttcccatggccctgaaaggacaggcgcggggttggctaatgaacttgccacccgcgtctgtccactcttgggaggatttgtgccaacagttcaccatgaactttcaaggcacatatccgcgcccaggtgaggaagcggacttgcacgcagtacagcgaagggatgatgagtcacttcactcgtacattcagcggttctgtcaagtccgcaacaccataccatgcatccctgcacacacggtgatttacgcgttcagggggggtgtgcggcacaatcgcatgctcgaaaagatcgcctccaaagagccccagactaccgcggagctttttcagctcgcggaccgagtggctcgtaaggaggaggcatggacctggaacccctccggttccggtgtggcagcttcggccgcccccggatccgccgctcagacagggcggcgtgacaggaggaggaagaagaggtcagcccacaccgacgacgagggtcatgtcctcgctgtcgaggacgcttcgcgggccactcgaaaggggaggcctgcgggcgacaaaaagaaggaggccggcgctcctagtagggagcgcccaaccgacaagtggtgcatcgtccacaacacttcccttcacgacctcgcggactgccgtgcagtcaaaagtttggctgagcggacgaggaagtgggaggaggagaggaggcaggagcgccgagagggcaagtccccggcggttccttccagcaatcggcgaagtgaggccaagcagaaggcccccgccgaggacatcgatgacggcgatgatgacctaggtttccaagagcctggggccaccattgccactgtcgatgggggagagtgtgctcacgtttctcgccggagcctcaaggccatgaagcgagagcttctggccgcggcccctactcatgaggcgacgcgccgggcgcggtggtcggaggttgccctcaccttcgaccagaccgaccacccaccgtgcgttgcccggggaggacagatcgcaatggtggtttcccccactgtttgcaacgtgaagctggggcgtgtcctcattgatggaggagcagccctcaacatcctttcccccgcagcctttgacgccatcaaggccccggggatggtgctccggccgtcccagccgattatcggtgtgacgccggggcacacttggccgctaggtcatatcgacctcccggtcaccttcggtggacccgccaacttccgcacggagcaggtgaactttgatgtggcggacctcagtctgccctacaacgcggtcttggggaggcccgcgttggtaaagttcatggcggcggtccactacgcctacctccagatgaagatgccgggccccgatggccccatctctgtccatggcgacctcaaagtcgcgcttgcttgtatggagcagcgcgcggaccgcctcgccgtcgcgtccaagcccgagggtggcgacgagaggcttggcacatccgccccccgccgccccgaggcagcggatagtcacatgcgacgaggtcccggtcaaggagattgccctgggcgacggcccgtccaagaccacacggatcggtggtcttctggacggcaaataggaagacgcgctcgtctctttcctgcgggcaaacgctgacgtcttcgcatggaggccggcggatatgcccggggtccccagggaggtgattgagcaccgtctcgccgtgcggccgggcgtaaggccggtccggcagaaagtgcggcgccaggccccggaacgtcaagccttcatccgcgaggaggtggcgcgacttctggaggccggattcatccgcgaggtcatccatccggagtggctggcgaacccggtggtcgttcccaaggcgaacggcaagcttcggatgtgcatcgactacaccgaccttaacaaggcatgtcctaaggatccttaccccctgcctcgcatagatcagattgtcgactccacagcggggtgcgaccttttgtgttttctagatgcatactctggttaccaacagattcgcatggctagggaggatgaggaaaaaactgcgttcattacccccataggaacttattgttatacgacaatgcccttcgggttaaagaatgcaggtcctacttttcaacgtactactcgaatttctttgggtagccaaataggacgtaatgttgaggcttatgtcgatgacttggttgtaaagacgcgcaaccaagagaccttactctcagatctagcggaaacttttgagagtctccgctccgcccgcataaaactgaaccccgataagtgcgtgttcggtgtacctgcgggcaagcttctcgggtttttagtctctgcccgaggcatcgaggccaatcccgagaagatacgagctatagagcgcatgcgccccccagcaagcttagggatgtgcaatgcgtcaccggttgcatggccgccctaagtcggtttatatcaaggctgggagagaaggcgctacccttatttaagctcctcaaacgctccggaccgtttacctggacggaggaagctgaacatgccctcgcccagttgaaggcgtatctcagctctcccccggttctggtcgccccggagccagatgaacccttgctactttacttagcggcgaccccgcaagtggttagtgcagcgttggttgtggagcgcgatgaggataatcctcattcgcgcatccccaccctgtgctggcttggcccgggagagagcagggaggagaggcccccgagccgaacggcggcccaaggcccccgacgaccggagttggccctctgcccgcttgtcagatggtgccaggtgcccccgaaccccaggatggcctgagggccactgcgggaaggccgcacctatcaccctctgaccccgaggctaatcctgtgcccgctcgactcgggagagagcagggagaagagacccccgagccgaacggtggcctaaggcccctgacgaccggagttggccctttgcccgcttgtccgacgacgccaggagcctccgacccccaggacggccccggggccactgtgggaaggccgcccctgtcgtcctctgaccccgaggtcgtcggcacagaagacgagcgcgcctcgcgaggccgcttggacgaagagcgccccagggatgtggcccctagcgaaggggatcggccccaccgaaaggtgcagcggcctgtctactttgttagtgaggccctccgggacgccaagacccgataccctcaggcccagaagatgctttacgctattctgatggcctcgaggaaactgcgccattatttccaggcgcatcgggtcatggtggttacgtcttaccccctcggccaaatcttgcataatcgagagggtactagacgggtggtgaaatgggcaatcgaactttctgagttcgatttgcactttgaaccacgccacgctatcaagagccaggccctcgccgattttgtggcagagtggaccccagctcccgagcccgtctcagtccccgaggccagctcgggcccctcacagctgcctcacaccgcccactgggtgatgcagttcgacggctccctgtctcttcagggcgctagtgcgggggtcacgttgacctcgccgagcggagacgtcctcagatatttggttcgccttgactttcgggcgaccaataatatggcagagtacgaaggactccttgcgggactcagggtggcagctggactggggatctgccgcctcctggtgttaggcgactcccagctggtcgttaaccaggtctgtaaggagtaccggtgctctgacccgcagatggacgcttacgtgcgccaagtacggcgtatggagcaccattttgacgggatagagcttcggcacgtgcccagacgggataacacggttgccgacgaactctcacgactcgcttcctcgcgagcccagaccccaccgggcgcttttgaagaaaggcttgcctagccgttggcgcgacccgaccccttaggggagacggacgcgcctgacaggcccccgatgcccgtcggagtccaggcctcgggacccgaggggagcgctcctagctcccttagattgattgcttggatcgctgagatccaagcatacctcacagataagactctacccgaggaccgcgaagggagtgaacgcgtccggcgcatttccaaacgctatgtgctggtagaagggaccctctatcggcgcgcggctaacggaatcctcctgaagtgcattcctcgggaacaaggcgtcgagcttctcgccgatatccatgaaggcgaatgcggagcccactccgcctcgcgtaccttggttggcaaagcttttcgacaaggtttctattggccgacagctctcaatgatgcggtcgacctagtccggcgatgcagagcgtgtcaattccacgccaagcaaatccatcagccggcccaggccctgcagatcataccgctttcatggccatttgctgtctgggggctcgatatcttgggaccgtttaggcgggccccgggcgggtttgagtatctgtatgtcgcgatcgacaagttcactaagtggcccgaggcttatccggttgtcaagatcgataagcactccgcacttaaattcattaagggcatcacagctcggtttggagtgcctaaccgtattattacggataacggcacccaattcactagtgaacttttcggcgattactgcgaagatatgggcatcaagctctgcttcgcctcacctgcccaccccagaagcaacggccaagtggagcgagccaatgcggaaatcctcagaggccttaaaaccaagaccttcaacatcctcaagaagcacggcgattcgtggatcgaggagttgccagcggtgctctgggcgagccgaaccacgccaagccgagcaaccggggaaacgcctttcttcctcgtctacggcgcggaagcggttctcccatccgagctcaccctgaggtcccctcgggccaccatgtactgcgaagctgatcaagatcagcttcgtagagatgacctcgactacctagaggagcgaaggcggcgcgcggccctccgagccgcgcgctaccagcagagcctgcggcgctaccatcagcgccacgtccgggcccgatcactctgcgtcgacgacctcgtcctacgccgcgtccaaacgcgtgctggattgagcaagctctcaccgatgtgggagggtccgtatcgagtgattggtgtcccccggccgggctccgttcggctggccacgagcgacggcgcagaactgcctaacccgtggaacatagaacaccttcgtcgcttctacccctaagggggatcgggtatcaggatttaggcttgggccaaccccgcacccccctcgggcgtgcagggttggccgggggctgccacatatgcatattcttatttctcttatatctgtacctcaataaaagtattttcgatttcctaaaggctgtatctgtgctgttgtttccttttgaagaatcttgacttgaaataggtcactcgtgttcaatcctgccctcgggggctcgggtcggctaaaatcgccaaacggggcccagaaccgagccgtgccccggggcgtggtgaactccgggggagaatcggcaaaaacccacaatcgggtcacccataaccctcggtcaccacgctcccggcctggccagtctcgacatgtggatctctccaggcactagccccgacccgagccatttgaggactaggacctgggcacgagcccttgttcaagccaagacacaagagaaccgcggcacagacatccttgtctcatacacacaacaaatagaattaacacaaaaaatttcctctttatttgattgcagattaaattagtctatacaagcagggggcccgaaggccttaaaaaaaaaagaagatactatttaaagattggcgggggcctgggggctcactccgacgcacccggatcgccggcctcgtcgccactattgcccactccgccgtatcatcctccccgtcggagttgagggcgaacgcgagccgaggggccgaaccctcgaagctgtggacgatatggtcggcggcgtcccggacttgcgcgcgtgcgccgtcctcggttccgggagggaactcgtccagcgccgtccatggggagaagtcgggatccctggcttggtaactcgccagtacgagctccaccgctcctcgggcgaggtccctcgaggatgacttaatcgtcctctcgagctcctcggggagccgttggagagtcccggctatctccgagaggcgctgggcgaggcccccttgggtggcggcgtacttcgcagtctgcccgccccagaggcccacctgccggccggcgcggtctagacgggagacggcatcccgaagcatgccgggccctacctcgcctgccaagcggagggcctcgacctccccggcggacgagtctagcgcgccctgcagatcggcgatggtgtgttcggcagttgcgaggcgagcggttaagtcgctttcgcccgcggccgccccgccgatccgtgccctcgcgtccagctccttctcccgcgcctcgagctcagcggcccgctggttcagcgcggtcctctcggcgcgggcatcttccagattacggcgcgcctgttcctcttgcgaagcctcgcggagggacaggctgtccgccagccgttgcgccgcggcctcggcctcctcgagagctcgctcccgctcggtgagcgcgtcctcgcggaggcggagtgcggactcttcttcggcacaggcggcttcgtgcaccgctagtgtgacctcccgaatagcaacggcggcctcgcgatccgccaggtccctctccacggcgcaggcacgctcttccagcgccatggcacgggcctcaagggcttcgtcgcgccgccgggatgccacctcggtctccgccgcccgccgttctcgggcagcggcagcgtcaaggaccccctgggcggcatcgagttttttctctagctccgcctcccagctcccgtattgaaggcggagggagtcctgcgcctcgttcatcacagtggtggcgatgagggcagccccccgctcctcctccacctccttggcgatctcctccagcaccttccgacgggcttcgagctctgagacgtgccgacggtgtgccttgcgacccacttccaccatggcctccaccgagcgtcgcccctcttcgacacgcacccatgcggcgtcgagctccgcccgctctgcttgcagggcctccacttgggcacttaacccgtccaacaccgtcgtgtttgcgacggccaaggcccgcagaaggggttctgcgctcagtggagcagcagaaggcgtggggaagagccgtctcggtgaggatgccgcgcggctcggcccgccaatggacgtgccggactcagggatatcccccggacctagcttatcctgggcgtcgcccgaggaattgggcccaagcgatgcgcccgcggcctcgtcgcaagctgcctcggaagtcgtcgccgcctcggcctggtgaagtctgacctcttcccgagcggcttcttcagctaggcgagcttggacggccacctgaacagcttcctcggcttctcgaaggcgatccgcggcctcttgccggtcagtttcacgggtcgcctcagaggatgtcgtcgcttcggcctggcggagtccggcctcctcccgaacggcttcctcggtctggcgagccagggcggcctcccgagcggcctcctcggcttcccgaaggcggtctgcggcttctcgccggtcagattcccgcctccgggcctctgtggacgccgggtcctcggactcagactggccggacttggaatggcgggagggacgcgacgggatctcgctgaaacagaagaaagaccagaagacaaaacaagatggatgagtgaaaactcgcgttaaaggaatgaatacggccatgatgggcgtgggacgaacctgcgagggggtcggttaaacgaccaccttggaggggaaataaggtttccccgggatggttctgtccccctcatcttgcggggccgtttcttcttccgctccccctcgggctgcgacgtcggcgtggccccctccgggcgcctgctgctggcacgcgccgccccgccccctcggggaggagatgagggaggggttccttcctgcttcctcttcccccgggcgtcggcagggtggccgctccccgggcccccgtcgcgaggcccagaagcacgaccccctcccggggtagatcgttcccccctgcggctcccgaccgcgccatcgtggcctcgaggagcccgctcctccgatgccccgaccgcctgcatgatggtcaagatggaggcacggtctggatcactgcagagggggaggactccttgaggaacgagggatgcctccacggagctgagattcagcacccgttggaccactatcttgaagtcctcaggagcccagtcccatcggaccccctggtgggtcctcatacagtcctcggacccggtgtactcccaggcgccccgggcgcgccgctggagtggcgcgatccggcgacgaagatagtcgccgaacaccatggcccctgtgagcccctgagatcgcaggcccgccaggcggtcgaggacggcgtcgtagccatctcccagatctaccggcgcccgccagttggaggcctgcgctggaggctggcttgggagtcggaggcgcgattcgtcggcgaggggggtgtagaaccagtcgctcttccagtcatcccacttcttgcggaggacgcagggaatgtagcggttcagcaccggcccccgcggctggaagtagcaaccaccaaccaccgacggcggcgaaaccggctgtacggtgaagaaccaccggaacagccgaagggatgggcgcaccccgatgaacatctcgcacaagtgcgcgaagatggccaatgtcattaccgcgttgggggtgaggtgcgccatctggagatcgtaaaactccagaacatccacgaagaaagaagaaaatggcggaaccagccctgccatagcaaaagggaggaagaagacggaccgccccgggtagcgtggcgccgggcatccttcgcccagcgagactatctcccggccggtcgcagattccggcatgaagcggcgcagcagcccggcctgtctctcgctcacgatgcgggaaggcggcagcacgctaccgtcaagcggagcggagccccgtgccatgacgccggaagaagagatgtttgagagcgagcgcgtgtggcggaggtagggcacaggaaacaaggagttagggcgcaagcggcgaagacaaggggaataatggcgaaagaaaggaagcaaatctcttcctcggcaactttatacccttgccaacgctgtgcccggctcctcgtttctcgcgcccactatcttgccccctcgtttctcgcgcccactcttccactaatcccattcgcccgtttacggtgcatgaggtggatatgcggctgtggcagtcgagatggaacatctcgtgcgcgcgttaattacgctcgccgaccgaagcgccatcaccatatctccaggcaaaacgaaccggcacgtcccgattcacacgttactcgagtaatgtggcagtcttgaagagaccgttcattattgacagccgagtaaccgttgccgatgtgcgtgatttgcgactgatgggtttctgcccaactgtggagaccggtcccacctgtcaccaggccttaggaagtggcgtcacgcccgaccgcttccctcgaggagggtaatcgccccggcataacgccgggggctactgtcgatgacatgggaccgggagtatcgtgactagaggcttgaggcagacacaatcgcccacgtggcctggcacccaccggggggggggggggggtcgggcccgagggtggtgtgttcgccctcctctttgtctccccgagggggtcggaccgctcccgccttggccccgagggctggggcgccccgaccccttgtggattttgcgccgcgtgtatgggttaggtgagcacagcggcgctcacctaaccgcatttattgcggtttggacgaacgcgtcacgccgcgtgtaatacggtgcagcgcgctcgtttatccggtctgtgaccagtcacagaccggtcagatcgtgggttaggtggcgacaggcggtctgacgcacgcctcgccccgtccagtcaggacgagagcctccaagcactcgtccctagccggagccggcgtgttacctcctggagatgacacgttggttccggtcagatatataccaggcttcatcctaaccattacaggcaagatgttgtatgaagaagggcgaacatgcagattgttaaactgacacgtgatggacaagaatgaccgattggtgaccggtctgacaatggtcatgtcgtcagcagacagccatctcccacgtcgcgcctgcttccggtgaaagtggaggtaggtatgggccgtcccgtcagaaggtgattcggatggcagcgatacaaatctccgtccattaatgaagagaagtcaagttgaaagaaagggagggagagatggtgcatgtgggatccccttgggatataaaaggaggaccttgcccacttagaaaggagaggagaaagcaatcccagaagaatcgggggctgactggcactttgtagcttcttcatacgcgaatccaccaaaacacaggagtagggtattacgcttctcagcggcccgaacctgtatacatcgcccgtgtcttgtgtgtttccgctcttgcgaaccttccacagattgggagcttagaacctcacccagggcccccggccgaactggcaaaggggggcctgcgcggtctcccggtgaggagccccacgctccgtcagttctaaattacccgatgagaaagggaggggggggggaaaatctgccttgtttatttacgatccaacggatttggtcgacaccgatgaggtgtcttaccagttaccacgagctagattatagtactaattacttgaggattcggttcctaattttttacccgatcgacttcgccatggaaaattttttattcgggggagaatatccaccctgtttcgctcctaattaagataggaattgttacgattagcaacctaattcagatcagaattgttagttagcggcgttggatccctcacctcatcccatcccaattcccaaacccaaactcctcttccagtcgccgacccaaacacgcatccgccgcctataaatcccacccgcatcgagcctatcaagcccaaaaaaccacaaacccaacgaagaaggaaaaaaaaaggaggaaaagaaaagaggaggaaagcgaagaggttggagagagacgctcgtctccacgtcgccgccatggccgcccgcgccgccgccgccgcgttcctgctgctgctcatcgtcggcgcggccaccgcggcgccggacatgtcgatcatctcctacaacgcggagcacggggcgcgggggctggaggaggggcccacggaggccgaggcgcgcgccgcgtacgacctctggctcgccgagaacggcggcggctcgcccaacgcgctcggcggcgagcacgagcgccggttcctcgtgttctgggacaacctcaagttcgtcgacgcccacaacgcccgcgccgacgagcgcggcgggttccgcctcgggatgaaccgcttcgccgatctcaccaacgaggagttccgcgcgaccttcctcggcgccaaggtcgccgagaggagccgcgccgccggggagaggtaccgccacgacggggtggaggagctgccggagtccgtcgactggagggagaagggcgccgtcgcccccgtcaagaaccagggccaatgcggtaaggaatttcttctctttcctcatctcatctcccttgtgcgattatttaccattgaaagcttagatgcgattatctatttgtcacgctaatctcggatctaagtagggcaatttcacaacagttaattcaggttcacagctagtaatcttttgcccctacttgcaaaacagtgcagatttccttctgatatatacataatataatagtagattatgattatatagtcacacaccgtctagtctctagaaaagatgggtcatttttctagctaaagctgactttcccccctgaatgagcatatctgatttaatgacagagttattgttcttttaatacgatgataatttactggaccgaataattgtttggaattctatggtaaggatttattacgtagtggatgcaggatgtattcttggaaaatcctctcattgggttaactgtgtaaggtatttgttctcttcgttctttgcttctggagttggcaacggctgtgacttgtgaatcgtgcagtgacagcggtgtggacttgaacagattcaaagcccgccgttggttggggctgacttgctcagtgtggtttccttgtttccaggattgtagtttagcttagcttgttttttcctgattttaggactgccgtttctgtggttgtgctgcttttgtctttatatttttaaaggtctttttcggtgcatctatcagtcaaatactttggacaaggtgaccctgtaaccaactactaagacattaaaccgatttgatgatgttgctttgcattgcaactattttgggcctttaagacttttaagggatatcacaccttatcaacctttcgtgttcagtcgagcaaactttttatcctgtgctgggagctgtttgctgatattagcctacaggtgtcttcaaactgcttttgtgggtaaaaacaggggtgaaacaaatgtctgcaaatatcttactatccatcttgatcttgataatattgatacaattaaacagtttagggttcttgcctcatattacaattggttgcttgcggtatgattgcagttgttgctctcttggatgacactagttattttgatggttactgacatctttggtcttgaatggtgggatgcaggaagctgctgggccttctccgcagtaagcacagtagaaagcatcaaccaacttgttactggtgagatgatcacattgtcggaacaagaacttgtagaatgctcaaccaatggacagaacagtggctgcaacggtgggctcatggatgatgcctttgacttcatcattaagaatggaggcattgatactgaagatgactatccttacaaagctgtagatggcaagtgtgacatcaacagggtattaacttattttctgatgaataacttcatacattcatctttcagttcccacattatgcaaatcgctaatgtttcaacgggtgcattgttttaggaaaatgctaaggttgtgagcatcgatggctttgaggatgtacctcaaaatgatgagaaatcacttcagaaggcggttgctcaccaaccagtcagtgttgctattgaggctggtggccgcgagttccagctctatcattcggtaaatgaacttgcagatatcaccccatgcatataggaggttttggtcgtaacaactattgatttttacattacagggcgtcttcagcggtaggtgtggcacaagccttgaccatggtgtggttgccgtcggttatggcactgacaatggcaaagactactggattgtccgcaactcttggggcccgaagtggggtgagtctggatacgttcgcatggagcgcaatatcaatgtgaccacggggaagtgtggcattgccatgatggcatcataccctaccaagagcggagcaaacccacccaagccatctccgactcctccaactcctccaacaccacctcccccatccgcccctgaccatgtctgcgatgataacttctcttgcccagcgggcagcacctgctgctgcgcattcggcttcaggaatctctgcttggtttggggctgttgcccagttgaaggtgcaacctgctgcaaggatcatgccagctgctgcccgcctgactaccctgtctgcaacacccgggctggaacctgctcagcggtaatctcctcgctttcttgttcgttcttactgcaactttatactgcctacattctattccaaagattgttttcatcatagtattctgctccgacaagctatacggttttgaaaaggcacgaggctttcatgatctgaactcagcaaatatttgtcatcatgctttttctgaaaaaactagacattaaggttgctttggctccaaagatagttcagataactgtaatgcactaactgacctttcttctgttggaattgtgcaagatatttgaacgtacgaactgaccttccttttgttggaattgtgcagagcaagaacagcccattgagcgtgaaggctttgaagcgcacgctcgctaagctgaacaccgcatgagctcatcgataacatgtaatcggcgaggagaggggatgaggcagcgtggagcctttctgaaatttctgcttccgtgcctccatatatcgttgtcgcattttgaggggacagcttatttactctactgcctgccttttatcttacagtgatctgtgtacatagctcgatccaatttgtactcttatttatcttctccaatttgtactctatataatttatcatctcaagaatacattaacgaagatcctgttttaccgttccaaattctcattattcacttctgtcgaaatatagctacaactagtacatctgatcagtgaatttcagaacactgattacttgtaaggatacaatggaaggatgcaagaatgttcgtgtttgcatccttccctcttattgcgatgtgatatcagattgttgtcagcaatgcgtcaggctgagatttgcggcacaaattggtaggccgttttccgtttattgaccaacagttacaaagtttggaatcatgcgatctgaacgacaaaacgctgacaaagttggtgatcgctgatcagttcagttgccaccacctccgccgccgccgccttcttcagctgccacagccgaaggcaacgccgccgccggcggcctgaagcccggcaggtcgcaggggatgtgcggcacgaaggggcagtgctgcggcgggtcggcgtagaagcgggcgcactcgagcgccggccgctggtgggggaagttggggatgcagttgaggcgcacgtcgagcaccttgctccggacgagctcgaggcaatggcggcggccgacggagtggaagtagttgtcggagagggagaggttctgcagcttcccggtcttggccagcgcgcagagcacgtcggggatgtggccgtacagctggttcccggcgaggttgagctcctcgacgagccccaggcagccgagggagagcgggatgggtccggtgatgtcgttgccgccggcgtcgaacacggtgagcccctccaccaatccgatctcgtaggggaggcatcccgagaggtggttgttgaggaagagcacctcggagaggttcgccgacgtgttgtagatggagcgcgggatcgggccggtgaactggttgttggccaccaccaggtactccgccgtggtgctcccgaagttgtccgggatgttgccgtagaagccgttgttgttgaggaagagcgcgacgacggtgaggtcgaacaccggcggcggcaccgtgccgacgaagcggttgaagcggaggtcgaggaagaggaggcggccgagcgggacgacggtggccgggaacgcgccggagaagttgttgttggagaggtcgagctcgtagaagtacgggaggccggtgaggtcggggacctcgccggagaagttgttggagttggcgtggaagagcgctaggtccgggaacgcgtcgacgaagccggagaggctgggcgcgccgaggccgtagccgttgaagtcgatggacgcgatggtgagcgtggtgttgtccttcggcgtcgttgcacccggcggcgccggcgggtgctcgcagtagaagcccttgtacatgtcgccgccgaagtagctgtcgcagaggttggggccgacccacgacgccgtcacgccgcgcgggtcgctggtgatggtcgccttgaacgcctggatcaccgggtacagcgcctgcaggttctcgttcaggaagtcctccggcgacggcgccgataccttcccttgtccaccgcgatcgggcctccacgacggcgcattgcgcgacaccatggcgaagtgagtatggctggggtcacacaccacgccgtgcaggtgcagcgcggcgagcaggagcgcgagcgcgagcgcaagcaggcgcgcattatggcctgaagccgccgccatggacgcacgttagatggtggtgagacgtgggggggaagacgagttttaaggaggaggaggaggagatgggtccatggctccatgaactccattgacatggaatggatcagcacaagtggagcgtgctttatgggaaaaactatattcattttttaaggggatatcatctcgtttttacatgtcactcccaaaataagtgcagttttaacaccgttcatgctcaacgtttgaccgttcgtcttatttgaaaaacaattatgactagtatttttattgttattagatgataatacatgaatagtactttatgcgtgactaatatttttattttttttataattttttcaaataagacggacagtcaaaacgctggacacggatatctatggttgcacttattttgggacggaggtggtaaaaaatttagtgtagcagattatggctcggtttagttccaaactttgaatcccaaaaacgtcacatcgaacttttctacacacacaaactttcaacttttccgttacatcatttcaatttcaatcaaactttcaactttagcgtggaactaaacacaccctatatgtgatatgtcacttcaaacatgcatattcaaattcaacttatacaagtaaaaacaaaaatagcaaatttaactgtgaaaagaacacgtaatttacggttaaatttgtttgttatttttgtttcaaattacatatgtcgaattttaacttgcatgtttgcgaaaagatatatcatatattgatcacaatatatatcttgataattttttttaaaaaaattttgataactttttaaacgatacgcacaaaacgagaggatgtcccgacaaaaatccacttccgctttatgggtgaaaagaggtgggaataggagagaagttgttttgccggggaagagaggaggcaatggcagccagcaaagagagaggcggtagtggggttggcggttaattagtcgtcatcgacggtaggagtgaagaagaagaagaaatgaagcagcgctcgtgcgtgcaggcagcggcggcgtgcagctcgcgaccactggccgagccgagcggggcgtgcacttgattccagggcgaagtggctacgtgcctagctcgcgaagtgaatacacacataatagtatggcagtgtgcggtcaaggcgttttgtgattttgagttgagttgttgatgatgggtcagtgcggggaaggcaatagcgtcggctttcctcggcaggagggcagaggctgcctcacgaccgggctcagtgctctgtagtctgtacataccggtagtatatgattggggcactggggcatgacaaaaggcacaatgtgtgtatgtagcaagtggaacatcatcatcttctgggccaggagcaaagatatgttcatatagcatattagcgtttgctaaacatgaagtcagcatgacatgactcggccggaagcaatatttgccgtctgattcataatagcaaaccagaaaaaaaaaggtgtcttctctttgccagaataatgcttactatattccatatcacaaataagtgtgcagatatgtgtactgtggagtatagaaaaagaatgttggaagatggagaacttatctgcttgacccagtgagtagtgaccctacaatttggatacccacccaagtttttatgttagtgtcccaaaaaggctctgcactggtagtcttgtaccataatgctcacacatattgaattgccaataggcgtcccctttcggatatgcctaagccaatttgtccactggtgcccgtaatggccttagcccctctaaagagaggtgttgcatactggagcctgagcagacaacttaagtttgaaaatatgttatcaaggctggctcatgcataatttgtttctacaatgaactgcacagaatttccaaatatgcatgtggttgctctgacttgtcttgttaatttttcttaatttctagcatagcgattttacaccaacacaaaatacttacatgatacataagttttgcagcaaattaatacaccagaatagtaaaaactgaacacaacggttcataagtagtagagaaaaatggctggccctagacgattaccaaagattcaggtatgcatgtgtgcagtttggcatcgaatgagctcactaaagtttattagggaactatttaacaatgagaatcaagaacactaaaaaaacggtttagtgcaccagcaaccaacatatttgtatatgccggctacagaaaatgatttcaggggaaaagtatatatcattatccacaagatatgtgcccatgataaacctcagcatgtgtcatgttacttgaaaaaatatacaaagcattccatttctcaaattgaacagagtgcatgtaaactacatcagcagtcaaacatgacatcttcgatatccaagaatatttccagtggtggttcacaggtatggagagtaactgacgaggttcatgaccaaccacatatgacaaaagaggttcctgataagacaaaagatgatcattatagagaagtatcatttctcaggaacaacagaagatggtctcagaacatttgtaaatttcatgtgtggtaacagttcaactccagaaaaacaaacttctgaaagtgattacttggttgtatttagagtgccttgaatgccattcctgggctggtggtttctctttttattaacaaagggaggacatcactgcctcgcctttctaagaaagaccatttttgccttagaaaaatacaacagaaatacagaatacggtgagaagtaactctatccatttgttcaacgagaatttatctcatctttgctgcccttagcccttaggtttttgtgggacttttcgagtaacaaagatccactggcattgccgttatagcatcttaaaggttttttgaactattgcaacattatgtaaacttgagattgcaagagttaaacaaaaatgttgtccatgctatcatgttaacgaaatgtgtagcatactaaatatgtgaaacacaaaagctattagtggtttgttggatttagagtataccatgaactagtaaaaaagattcaaaccgtcttagaagctcacccaatgtagcaaaaacaccggttactcagtcttcttttgcttggttgattctccagtcttgctaatgatggtatctaagtgccttgatagtacactgtgcgccataccaatcttttcatcgacttggtcctggtacttctcatacaatggtggaactaacagagaaaacattacacctagagaaaagccagaatgatacaattattacatatgagctatcataaaagaacgattgatccatacatgaataggtccaggaagttaaagagtaacaaattcagtagtactcaccaatgtaaatgagcgtaaggaagttgaagagcattccaatgtatgaaaccacccataaaatcaatataacctatatgaccaaacaaaataaggggcataagaagaaagcatacaaaggcaggtacagccatatagacgtacagttgtgtgtgtactagtgggcatggatgtgtgtgtataagagagagacctttataaaaacactcctatctctcttgatggcaatatcatggccaacagccaacaccttgttgatccatacaagagcccgatctgcagctttctcaacaaccacatctgagacctctagtttagggagtggtggaagaggcctgcaaaaatcacaactttgtgtcaaacttggatagatgatatgggcaatggaagtacaatgccagtcacagagaacaacataaaacaaccaaagtgccaaaaacagctctttctttttcggtttagcgatacaatcgcagagacactgcataaatgcatatcaattctaggcaacaatcaagtcagatggggaacacaaactcataaatgagccgataaggaatggcaagcgcggtgattgaccatgtaatgtaaatctaggaaaaaaaccttgtggattgcttgcagaagagaccatatagcacagttacaagctctagagaaaatgacacatgctagcagaattaacttatcgaactgctatcgcggcttagctttaaagtaaagcagcctctttactttgtagataagggatcggatagatgcattattggtaatgtaataaaaacgaaatatgcaggtttcaggaaaagggataattaggaaaccccgacatatgcagagttcaaacctttgaacaatctctaatcttaggagatcatcggatcacttccaattacaaactgctctggcctgaagtttagtttcttactgcaacccgtaattcaaaaatgctaagcaagttagtgtatgaaacagtttggcagtgagcttcttgaagccaaaaagatgcaacaaccaaacggttggggaaaagaaagtccacattattcagcaaaacctcatacacattacagtgaacaccgcagttacaactacagcgaatcagggccgcagggcgcggcgcgactctacatgagatcagaaacacgcggtgctgtagagccagggcaaaaacccacctgttgagcagcgaggcggacttggcccagaagaagaggatggcgacgaggaggagcagggcgttggccatgactgacgggaagctgtaccccgcgcgctcgaagaggaaccacaccgccgtggcgcccgccacggccgccgcggacacgttcctccgccgccacagcaccaagtcggcgactgcgagacgagagaacacgagtgaggagaaaaccgaacccaaattctcgacccggatcggagagcgccgggaatgcgcgtgcgtacctgcgccgccgccgaggagggcgtggagggatcggcgggaggtggtggccatcgggatcgccgcgggagggttagggtttggggccgcggccgaagcgaggagaggaagtggggtaggtgagtggagctcacgaggcggaggcgacgaggacgagatgggatctctctctgtgtcctttgctggatcaggaaatggattcggtttcggagacggcgcgagcgaatgaattccgtcgaattattttgaaatattatggtgagttattgcaattttgcgggcaagtgatgcccgatggtgttggaataactccttccatttctatacttttaagatttaaattttacaccataatattcttatttttcactgatttttgtgattcccatcatttcaataattttaaagctaatcaaatgcttggaaagagagaataagtaaatttcatttaaccacccgtattatgatctacctcttaatcacaaataataataacctataactagatgggatacattatagtactacgaatttgaacatagagcatataatacccaacgaatttctgtcgagatttatagtactatgatgtgtcctatctagtactaaattttagaacaaattgagtaaattaaaaaaacatacgattttttagcacataaacatatgtattatggtcatttcaaaaaacacaatatttatcattctaactttgaattaccataattttaagttatacaatcgcatctcgaatttatgagttatttatccatcatataaatgttacatccatggccttttaaaaatttgatatatgagtatgtcaaattggttacaatgtggttttgtggaactttatatccatagtacctatgggtcatgtgctatgtgtcaaaatccttgtagttttgtgtaattttgatcataacgagtgtatttttacaaaatttcccaaaagaaatacaagtaattcgaaattcaaatgctaacaactgaagtgaaaaaaataaattatttattgtaacaatccttatattttaaaattgatggagtaattatgtgcttggaccttctagtacattcagtaaatatatactgtttagaatgatttttttctcttaaatatatcatggccataaatacgtttggtcatgcaagctactagtttcatgccgttcaatttggaggactggcactttcatgctgctttgtttagatacgatgtcatttcgaagaaaacaagtatccaaaccaacagattagtggatgctagcatttgacgacgacatgtttaaatcaagccgaattatgggtccaaacatggacatattcttcctatttgttgaaaacaacagcgtggaacatgagtacccgttccaacgccaaccgagtaatcggtccgatgctaccttggctgtgtttagttcagcgcaaagtttggattttggctgaaattgaagatgatgtgactgaaaagttacgtgtgtataacaggtggaggtggatgtgatggaaaatgattgaagtttggatccaaacacagcccataccaactcacatagttcgtggaagggagacaataattgtgatcctctaaaatatcacagtaaatttctatttttataataaacacacaaacgaacctgaacagtaaccgtttcatattaaatgaatatacggtccttacctgagacctgttttttcagcaaaactatatagtcatggcatgtatctatatatagaagaacaagatgcacttatagaatggaatgtgtgatttcaattttgagaccccgtgttcaatatctaacgcgcttacaattttttttaaaaatgtgtttggaatccaaatatcgtcttttatctatagaagaacattttgttcagtacaccatattgagtctggtggatatcctagaaaattccaactccaactgacggtacgccagtacaccgccattggcagctagcctgaagtgatccaatttttaatttttaatttttctgatctttttaactcttatctcatcatactttaagtgaacaaacacttatccaaaattatatcagaaatgctattacattttaaaatggagaaggtatggcacgaaaagcaccaaatccaatagctagaagccgcattcagttcaagatttgaagcaatatattcaaaactcaaaaatagcctgaactcctcaagattagctcacacgatgatgacatgactcaactgaagaatcctggccttgtaccaaaaacaagtccaggttcagagaaccgcccccttccgcggaaacggcagctgttacaaatcccacccgagcagcagccactttcaacacacacgctcacccgatttcccgcttcgccgccggcgctcgcatcggtcaagtcaactcgacgcccacacacgcaccggccatggccgcggcggcggagcagcagcagcagcagcagcagcagggcttccgcccgctcgacgaggcgtccctggtggcctacatcaaggccacgcccgccctcgccgcgcgcctcggcggcagcctcgacgccctcaccatcaaggaggtcggcgacggcaacctcaacttcgtctacatcgtcctctccgacgccggctccgtcgtcatcaagcaggtccctatctcctccacgcgccgccgccgcgccacacatgtacgcatcttctctctccgttcctccgctgacgacgctgcaatccaggcgctgccgtacatccgctgcgtgggggattcgtggccgatgacgagggagcgcgcctacttcgaggcctccgcgctgcagaagcaccgcggcctctgcccggaccatgtccccgaggtctaccacttcgaccgggccatgtcgctgatcgggatgcgctacatcgagccgccgcacatcatcctccgcaagggcctcatcgctggcgtcgagtacccgctgctcgccgagcacatggcggattacatggccaagacgctcttcttcacctcccttctctacaactccaccactgatcacaagaaaggaggttggttgatttattatacaggtttggtttgcctgtgaaaagggagaaaaatgagaaccaaattgatagaatgttgtgttctgtgactatgaaaagggagaaaaatgataaccaaattgatggaatgtttgtgttctgtgaactgcagttgctcagtactgcgataatgtggagatgtgtaggctcacagagcaagtcgtgttctcagacccatacatgctcgccaaatacaatcgttgcacatcacccttccttgataatgatgctgcagcggttcgagaggatgctgagcttaagttggagattgctgaattaaaatcaatgtaactagctctcctgattaaaccagcgtttctctttccttttcattggagatgatggacatgatttgcatatgcaggtttattgagagagcacaagcttttcttcatggagatctccacactagttccatcatggtgacaccagattctactcaagtgattgatccagaatttgctttctatggcccaatgggttacgatattggggccttcctggggaacttgattttggcatatttttcacaagatggacatgctgatcaagcaaatgatcgtaaggtgtgtatggatttattggctaataatagtaaatgaaagtgcgtaatcttacctgggtggttaagttgttttgcgtttgctaagataatggcaaccacatgtcttcctgtgtactaatttcgataggatagaagtttggaacatgatacttgtatcctatagaataactagcaattgatattgttgatatatgccgtatgtaacagagggaggagggtgctcagcagacgatgaatgtccctgagtattactccctccgtttcatattataagttgtttgatttttttcttagtcaattttttttaagtttaaccaaatctgtagaaaaatagaataacattttcaatacaaaacaaacatattatcaaaatatattctatgttaaatttaattaaactaatttgctgttgtaaatgttgctaatttttttctataaatctggtcaaacctaaagaactttgactaagaaaaaagtcaaacgacttataatatgaaatggagggagtacttaatgggaactgcagaaatgacaagttatgatatggcaaagtgcaattgcaacatctagattctagaaggtattttcatgatgtttcgccaggcataaaataagttctatgtctgtacatattttgcaggcttacaagaaatggatcttgaagacaattgaagattcatggaattttttccacaagaagtttgtcgaattatggaataaacacaaagatgggaatggggaagcatacctgccccctatatacaacagctcagagcttttgagccttgtacagaagaagtacatgacaagcctatttcatgacagtcttggatttggttcagcaaaaatgatcaggtaattaaacagtacaattatgtagagtctgtactactaagtcaatttgctgaatcttatttacgtctagactatgaagatatactagacctgccctttttaaatgtaagaagctcaaaggcacagtaagttagtccaaagtagaggtttccgatgccaattttgatgcagcacttctttttcataaatgtatatcagtatgtgctatcctaaaagagatgttccagaagaccacctttgacgattataagtatgactgaaaaccgtcataaatggttaaattggaggctattcaggatattatgttgtgagaagctaagtgtaaagaacttaaaatcacatttaaacgccattttcaaattttttatctgtgttccgatgccttgtgcatgatcctcacgcgacttctgtttactaaattggaccatacatatgtaggagaattgttggaattgctcatgttgaggattttgagtcgattgaggatgccagcaagagagcttcgtgtgagcgacgtgcccttaattgtgcaaaggcaatcctgaagggaagacgccagtttgaaagcatcgagcaagtgattgtgcatgtacaatcgtttgatcgggactgataaggctaaccatctacacaacctttctgattgaggagacaaaagttttcatctgtttaccatcagcgattatctgtgcctattataaagcagaattggccggttatatgtgggctgggcaacaacaatgtatatagccaaagtagtccatacagat

SEQ ID NO: 5413 - DNA, 15918 bp, Oryza sativa
ttttattcaacagaatgtttgtgatcctcttttgcatttctacacaaaacatagtgcctcgagattcaactaatgcataagccaataattcctgtgaaaatcaatgcacgtgcaaaaaccatttagcttcaaatacagaacatgacagattctcagatacagcattatttattgttaaccaataaaatataacatggtacctgctctaaaattaagcctaccaactttgtaggcaaaggaggtgtacaacccataagagagtggtacagaaggggagcactatcaacactttcatcatccttagcatctttgtgtgttatctgtagtgtgaataaccaattaaatgaaatcaatagtggtcttggtagcaacataattcttttcagatcagtaccttaacccacaacttgatgaggactaatgaactgttcaaaaattcggatgtgctatcattagccagcaattcagacaagctcttcacaataatatcaggtattatttttactccacatctatggagaatgtcaaccatcttggtaatcttagcaaacgcatccatactgatgtccttcaatgtatctttcggtatatcctcaataattctctgttcgtcctggcttgcagatagtctatggtaagaaagcctggcatacacccatactgtttgacaacatagctctaaagcctttggtgcctaaaatagagaaaatggttttgaatttgtggttaaaactcaaaagcatgttcaagtaaatggatcaacatctcagaatggtacctcatccaaatgtccaatattgtaaagcgtcacaccgatgttaccaagtgaggacatgagaaatttgatctcatcaagttttatccatgtacttgaaatggcacatttgatgaaggacacgctcttctggactatgaaagcaagatacattaataggtgataaggatgcaattctaattagtaaacagcaggctatgtaaaggcaatactccactaatgtcctttggataggagaacaacaaacagatttacttgtaagtcaactgtttctatatgtaataaaatgatatcaatattaaaaaccaacaggctgaaacaaggcatactgtagttgcaaaagacatagtgtcagtgataaatggtgtccgttcaaattaatcagattcaatctatgtgtaaatacttcacatggtcccaaccatcacccattgctcaaatcagtcctccaacttaagaaacaagtcatactagcacatgacctttattagttggcccattctcgtccatattctgggtcagcagccaaggttacccaacaagaactatgagaaacgaatgaaataccctctaattatttcactgcatggttttatgcatcatgcacaaacacaacagacgctctgttgggtctatgagcaatggaaattaaaaaaatgttaatggagagcaaatttggtcatttcatgtactctaggttggctggagatcctaggtgctgactcagcatagagatgtgtgatgccacatacacacaaggactaaaagagctaattaatgaaattcgaggattgatttgactagttgaaggaccaacgtgaaccacaaacagtaattaagtgaccaaacgaacaattaactccaagatagatacaggaaaagcgaatggggtacctggataccttcattggtaataaaagaaactttcattgctgaaactagggctctcagcaaggttccatgttgttcatgctgtttatccttgtctccttcaggcatttctgtacagctgtcacaagaaaattcaacacgcagaatcagggatcccttttgtttcatctatatcaacataactattttgcaaatttgctcatataaacataggtgggaaccctattgactaagaacatatcaataattgaaaataacttgcaacatagtgtagagctgacaaatgctgcctgtgtatttctgatgaacctacctataagctgcaatgctggaattgataaactgatgcagtgctgttaacacataggtcatgtttatagaataattgggtgttattccttcagagaagttcttccaaactgcattcacgtactgtgataatatcttgcaaagaaactctagcgaatccaggtatgccacaaaagatatatggtcatcagagtgagacaaactgttcttcttattagaatgcccaggctgcattgatgaactagaagctttacccatagtatcaagtggaatggatctaccattggcaaaacaaaaaagatgtgccagtgtggcaagggcactctttaaagtttgtagatgcttttcatcattaagaaaatctgtggatttatgaggccgctctctattttcaatttgctgagcactacagtataatccaatggcataaagaataagtactgaggcagttgcaggggttgaggaaacctacacacagcaagtaattgaattaatcaaaagcactgcttgcattgggatggtatgcattcacattaaatgatgctaacgaaatagtacagcatgtacctcagagaaataaccaccttgttcataaattagctcagcagcaccaacagataaatcccaatttgaagaaacaaagcttcgagaaaaatatgctacaaattctacaagcccatttacagcccttggtaagtcagcctgaaaaaggttacatcacttacatgacaacattacacaggtaaagatgccttggcagaaaaacaggttgttggctatttatggaatgaaagaatagacagatgaaggtgtcattgcacattacaaataaacaaatcaggccagagtgcgccacaaatctgctctccatgacctagttgtttctagtcattatcacttagcccatcagatggcacatgactacattactcaaaagagggggaaaatgatacagtgaaacagcaccgatcagtcctcgatgatatttaacataaaggaataacaagcactggaaatggtcctatataaggggcattcatggttaccagtttaagcaaattaaaatgtaagagaaactacaaactagaaagaggtttccagctgcataaaaacaaaggaagcatgaaaatacctttagacatgcagcagacccaacaacggtctttaagacatcaagcaaaagctgagtgcccccaccccaactcacatctacagatgaacaaatcttgcgagcaacctgatccataaaaatatagtaacatcattgactagccacgttttttagcaaattcgagagggtaatcaattgtgtaatgatacatactgccggcaagcgttcaatagtttgcgccttcatacactcccccaaggttgcacgacagaattcacacacaaggttggtattgaacactgaatattcagcaaccaagagaatggcacagcgacttaatgcattcacaagcagtgtcagatacttcctgctgacatcctcagccagaatcctgcgcacacagaagtacactttaaaccactcatttcctattttattaatcaaactgaatgcaaagcttagctgagcacacaatctcaccgaagccatggctggagttggtcaacaaggctgacaacccgttcgtatggggcagcttccttcaccttgcacttgctggcacaattagcaaagcacacggtgagctcaatcgcgaggatggtgacttcagggtccgcaccagcctcccctgagatgccaggatcaggaaggagggaagcaaaactcgcagtcgcagcacggcgagactttgaggccgtcggcactgacagcacagaccgaagcgaatccagagtggcagcagcgtccgcctcggcgcgtgcgtagtgtccgcgcgactcgaggcagcacacgaatcggccgcgctggagcagcacggagtagggcttcccggcgaggcacgccgatatgaccgcgaggcagtcaaggaggagggcgtaaacgtcgagcagctcgtcggtgcacccggcgtcgcctgagctagggttggggcggagtagcagcgggagtacctggagcgcgcggcacaggaaggggaggaaccgcttagcgagcgggcggaccgtggccgcgtcgggtggcggcggcggcggctgctgcttgcgctgcttcgccgtcctcttcgccggcggtttggcgctagggtttagcgtgggtaggtagggggagaagggctcgaggtaggcggcgaagcgggaggtcaggccggattgggaggacggggaggagagcgcggcgaggaggtcggcggcggcggcctccattgccgtggtgcggattgcgcttgcggcgccgcgtgtggggaaatttttgtgcgcgtatttggggatttcggggacggggatgggcgggaaaggaggaggatttcggagctctgcgcgctggacagaggagataggacggtggggaccggcgaggaggaggcgtacgctggaagatttgattaatgggctggtaaattatcttgtgggctgccagtgggcctattctgatgacctctatatgggcctcacttcaattcaacaatttggttagtgatgcaagaagaaaacattagccatttccaaacatttgaaaaatatcaggcagaggagtgagttttgccgacagtcaacacaatgtaataacagattgttacagtcgtagtaatatctcggttttatttgctctagtatgaccaatgaaatatacatcttgattctcaaatgaaccatgtgcacaaccatccatcaatctacactctacactttttccatggccatcgaatgcgaccgccgcgcgctactccgatgtaccggaactcgagagagctccaaactttgaattaaaatttatgcaactatgctacgtatatgtacagtttttgcagtgtcgtacactacacacgtcacgtttcagaagacgaggcaggacttgtcgaggtcatagcccatcttctccaggcccggccgcaccgtgcactcgaccatcgccggcggcccgcacacgagcgcgagcgtctcgccgtcgcccggcggcaggtgctccctgagcgtccgctcgtccaccctccccacgccgtactcccacccgtcctccggccgcgccaccttgctcaccacgtaccacaccttgagccgcgccgggtgcgccgccgcccaccggtcgatctcctcccggaggagcatgtcgtcctccgtccggttcgcgtacaccacgtgcatctccgttccgtcgtcgggctggtcccagagcacggcctggatcacctggtacaccggcgtgatccccgtcccgccggccaccatggcgagccgccgcgcgaaccggcgctcgccgttcaccgtgaaggcgccgcggccggcgtactcgatgtgcccgatcgggcccttgatgtcgatggtggcgccgagcggcaggtagtccaggtactgcgacatgagcccgccgtcggggaacttggggtcctcgcccttgaagtatatcttgatcaggagctcgatgtagccgacctcgtcgacggagctcgtcggcgtgtacgcgcgcatgcagagcttgccgccgatcgacgcgcacacgtacacgtgcttgccgaccggtagcccgagcttctggtccggcgacggcagcgcgaaccggaacaggcgcacgttgtaggacaggctcttcttgtccatgagccggcatttcaccttctcccgcgggttggacagcgcgacggtcgacaccggcacggcgggcgccgccgctgccgtagggctctcaacgatggacgtgaggtcagcactgctgctctgcggcgagtagtcgctgccggtgacgatgagctcgccgatgcggtacatctcgaggaggccacgggccttgtcggagtggatggcgtcgaattcctcggtgcagtcggtgccggcgttgatcatgatgctgtcggcgccgccggggtggtccttgaggaaccccgtgcagtcgtagacatggccgtgcacgatgatccaggcggactccggcgtcgtgtggcggcgcacctcggacatggtgtactgcgtggtggccgtgttgaggaacggcgtggacgtgctgcgcttcagcgtgctcaccgcgctctccgacgtctcgaggtgcttctgcctcgccatccacccgccggcctggttgcccggctgcgtcgggtgctcgaacaccagcccgatctcccccttgtgcggcctgcacgtcttcgtcttcaccctgaaccagcagttgttcatcatgccctgcacacacgcacacgaaccaaaacgtaagcacatcgtcgtcgttgaaacggatggcgttgccgttgctggtgcttagtgcttaccatgagattccaaatgagcttctccggctgggtgttgagggactcgtcccaggcgcggacggcgatctccttggcggcgagcagctcgagcacctcgacatcgacggaccagaagcaccagcaccagtactttccgtacttggtcggcctctccgggtggtcaaggttgcacacctgccacgtctcgccgccgtccagggtcacctctacccttgtaactttccggccaccgcctggcaacagaaaatcatcaccgttaatcacccattcaccatcagtacaaagatactgatattataacggcccagtaaaagcataaagtgatcatggtgggcttttagaacgagcaggccgaagcccaaaaacaaacaacatgatagatgagatgggcttggggcttaccggagtaggcgtatcccttcatcgtatacggccgctgcgtcgtcagcgcattgatggggagcacctcatcgtgtcccggcgtggtgatcaccgagtttatgttcagctcgtttatcatgtactccggcttgtaccaccaagctgcacataatccaaaaaaaaaacacacaagttaagatcacaaagatgcaacaatgtgtgtctcgtgcagtgcgttcgaggaagatatggttggttaattaccttcggcattggcgagctcggcgtcgacgtgagacgggaggacgcggttgtcgcggtaatggtagtagctctccgactcgctggacgcgacgatgatgcgcttgagccatttcaccatgcggccgccgatgaagcccgggacgatgacccggacggggaagccgtggtcgggcgtgagcggctcgccgttctgcatgtaggcgaggatgacgtcgtgggcggggtccatggccacctcgcggcgcaggctggtgccgtacttgcacccgccgccgcctgggaggtcctcggcgccctcgaagcacacgttggccgcgccggcggaggcgcccatgacaccgcaccaccgcagcacgtcgcgcagccgcacgccgcgccacacggaggtggagatggcgccggggccccagttgaagcccacggtctggcgcaccatgttctgctccttgcgccggttgcccgcgcacaccagcgtgacggggagctccacggcctcgaacccggtcacgagctgctccatgttgagcctcgcggggcgcttgacgagcccggtcacctccacggcccacgtcgaccagtccgccttgggcacggcgccgtggttgcgcacgtagtggagcggcgccggcgtgatgaagccgtgcgacatgaggcgcggcagcggcggctcggagttgaacgggtgcttgccggtgagccggacgagcgccgggtggcgacgcacccacgcgtcggaggtggcctcgtcgcgggggtccttgacggccggctccgccacctccagccgcgggtggtacagcgacctccagtccggtggtatgctgtcctcgtcgtcggagtcggtctcggagcccgaacggcgcttgccgccgccggacgggaacaagtcgaggttgctcgacggagcattgctcgcccacgggtgcggagccagcttgtactccaccgaggccgccattgttgccgatggaaggacacaatgttacaattttgcggacactgtaagctgtaggttgtagctgtggttactgagctagaagaagagatcactcgcgagctagaagctcaggatggcatctgttcttggaagcagtggaggtggtggtctggggtttatatagggacgaggaacgcgaggtcgtagtagttgcctctgctctgatgcatgcacggacccaagcaggccacgagctggcgtcaccacacgcgcaggcgcgcgatgggatttctagggggattcggccggattttttttcttcattttccagattaataccggcgacgtgacgtccatccctgtagcagcctcccatctaatacgtcctttcaattcctcttgtactagatagaaaatgacctatttcttttggagtttcagactgttgggagtgaattttgatcactctagggatggtcgatctctcgttatctgtatgttacttaaaaaactagcatggttgccccatgcagattgtgcggctagcatcattatattttctttcatataatagcatatatgttttctcattatattatttaaatatattaaaatgacaacataattttaaattttgcaataactttataaaaccactaatgtgtaatattcatattgtattttatatacgtgttagttattaattatttttaatatcaaattttagttatttgtaaattatatatattcctatatggactctacactcgtcttttaatatttctttttttaattctgaattttcagtgctcttctttcaatattatttatttttatttctgaatttttattatttataattgtatttctatgtggactttaaacttatctttcaatattatttaatttttaatttcgaattttagttacttctaaattgtattcctatattgactttaaactcttcttcctatgtttttcttaaattcgaattttagttatttgtaaattgtatttttatacggactctaaactctacttttaattttattatgtttattccaaattttagttagttttaaattcatatatgaactctatactctacttctaatattccttattttttaattcataatttctatttttttcttaattgtatttctatatggactctatactctacttctaatattccttatttttaattccaactttctattacttcctaattgtatttctatatggactctatactctacttctaatattccttatttaaattatatatattcctgtatagactctagactcgtcttttaatatttctttttttaattccgaattttctataaattgtatttctatatagacgctatgctcttcttccaatattatttatttttatttctgaatttttattatttctaattatatttctatgtggactctaaacttatcttttaatattctttaattttcaatttcgaatttcagttacttctaaattgtattcctatattgactttaagctcttctgctcatatttttcttaatttcgaattttagttatttgtaaattgtatttttatacggactctaaactctacttttaattttattatgtttattccaaattttagttagttttaaattcctatatggactctatactctacttctaatattccttattttttaattcataatttctatttttttcttaattgtatttctatatggactctatactctacttctaatattccttatttttaattccaaatttctattattttctaatcgtatttctatacggactctatactctacttctaatattccttatttttaattccgaatttcagttatttcctaatcgtatttctatatggactttatactctacttctaatattccttatttttaattctgaatttcagttatttcctaactgtatttctatatggactctagtctcctcttctaatattccttattttttaattctgaatttcaactatttctaaattgtatttatatatggtctctagtctcctcttctaatatttcttattttttaattccgaatttcagctatttctaaattctatttctacatgaactctgctttttctttttctccgattaatgtgagaatttataggccatgagagcgaacgtggaggctcctttttctattcctttaataatataatagattataaaaaataaaaaaaataaaaagatgtattaacatatgatatatcgctccataaacatacaagtttaaattcaacttatacatctcgaaaaaaaacagacttgatcatgaatatgatgtactttaatttgtttttttcgttgcaggatatagaagttgaatttgaacttgcgtggagtgatatgtcacatgttaatacatcttctcaaaatttttcaatttttttataactatttaagtgacatgcaaattatgagaggagatcaaaatagttttctcaaactgttgcactattttcacatctgcattgttaactctggtgagaatgagcagctcggactgttcaacctctcgtaaatcagacacgtgcatacgtgcctggtaaatgccgtggccgtgttatgctaaacacaggctgatggattagttgatcgaggttcaaaaaagaagtttttttcctgacctcctaataaccccagctttaggtgcaagaaaaggagacggcatttggtggctgccggatccagccacccccgaatgcagcttgcctgagaaatgacctcgcccaggtgaatcctggggagctcatggacacggacaccgggcatgcacacacgcacgagccccactcggagatcctgcctgtacactctcgtcgcttctttcctgcttcctttacgcttctctgaatgatcaacgccaatatactaatcaggggcacggacccgcgttccatggtggatggatacgtgcatcggcaaattcgaccagccgacctccattagatcggctgtgatgcagcattggagcgatcataatttagtagctttctttgttgattccccccgtgttccaggacatgcgtcaggggcaaatatttttagcaggtgaaagcctgcaagatcatgcatgagcttgcagcaaacgtcctatgggagttgttcagaactggttgattaacagcggcttggttagtttgagaagccgagtattgtagttatggaaatggcctctaggatctacagagcaggcaccctgtggttttaattactgtaaaggcaagttctacttgcatcattttctcacataattaagtcaaaagtcagagcacaaagtcataagcacacagcaaattcccagctctctcgagtcgacacactaaaataaaccaaagccttgatgcatgaccagcaccccgattccctgtaaattaatataaaccagacagaacaatactaatccaagcatgatgcagagagtatcttatcacaggacataacatagaaagatactttcccattcaaaaggaaatgaaaaaccaaatgattgacttaacccaaagtataagcagcaacagcaggtcgggtggtaattaacaatggcttggcgcatggcattttccaatggccaagtaaccggtgggaagctcggaggatacttcatcacatcacttgctggctggtttctttcagcagcagctgagctgcctactgtagctgcatcttctcaatatcccaaagccggccggctccaaagcaggagttgcctcccgccatcgccaagggccaactggaccaagccctggtccagaggcaggcaggagagtagtagtagtagtagctagtagtagcagcggtggcttgttagctagcttctggagtccagccttccccagttggcgactctgccgctgcgtgccattttgatttcttgagagatctctctttttcatggatttggtgttttgcgagatgcatggaggcaacaacctcctgttactgacgttaaagtgttcgactcgccatcagaaacgtggtctgccagtatggtttgtcgacattgtgactttgtgaggctgacacttcattcacttggctttaggtctagtagtatcctaatgtaaggtggttaaatatctatcatttcctgtatagaattttttgtttgcacattacaaaacagtcattgcttcgcttattctgattataagccacaacagcttattagcaatcaaaaaaatatataaataaaaattatatatatgtgttcttaattagcaatttaaaagcaaatggtgaaaaataagctacaatgaaaagacccccaaaatcaactttaaatttaagtttttaaatccaaaattttgctgcagcttacgagctgagggtaaacaatgggagttttaagagagtaagtgttttctaattggtgcagccctgagaccctatttgagagaactattagaccgtagcccctgtggagaagagtgttgtcacgccccgaactaatcccgaccggaactagcccgtgacgctctaaattaacctgttaatcgatatcagtcccaggaaacagtgctggtatcacagggagacagaatatcacagcaacagaggtctttttattatagagtagaggtacagtcatgttgggctgcggacagatcccgagctcacaactgcaatacaaaagggaaacggaagccaggacttggaccaaacaacacaggcgcgacttgggaactaggccgaaaccctaaaactcatcgtagccggcttgctcctggaagaactcctcatcggcaggttccgcttcatcttcttcagcaactgggggggattatttatatagagcaagggtgagtacgggagtactcagcaagccatgggaaataagtgtttaatgcaggcttcaaggaaaggctgttgtttttgcaattgatttttatttgaactcttttctgaaaacaactaagtgagtgcttctcaaacgacacggatgggacagtgcgtctcgtccggtcggagtatgtgcaatgtatcagtctttagaattgaaacaaggttggcacccggccaacagcttttcaaacggccacccgggccaaccactttcaaacggccacccgggcctagctgatcccatcagctgcagattttttttttaaacatcgaacccctttccacaacagtaatttcgcaagcagtagtcaaacaaaactacgctaggaatcacctcacatccgcccatgaccgtgggcacggctgttcgaacagtttgttaatctctgcagagggggtacactttacccacacgacattactaacccggatcacccagcccgtggggatcagccacgtcgggagacctccaagctttcatgacaaggcatttccaaagccgacacaggtttaccatatgccgacgagaggggtcccagaccaacaacaggttaggtcccagaccatactgtgacaggaagcccaggggtcctccccgacaccaccccggcgaatccacatgtctctcggcatcaagactcccctgataagctagttactcagccaggggtgtcccattccacccatgtggtcgtacttgtgttatgtttggatgaaattccaaggaaacggtccttaagtgcaagagcggaaaaccgtacacccggtacgttccccggtccgcggttttggaaattcatttagttcacaagcaccgacccaggtgtcgggttttccaagtcttttgtaaaacccaagttttacccaagttgttattcagattttaagtttgaaggcgtccgtcgatactcgcacagggtgcacgaatatcgagacgcaactagatggatacaaggagacatgatataacaattaacaaaggaaggatcaaatgcaacaaattaggtaggtccgccaatctgccttgcagacgggacaacagattaagtgcgatcctatcaatgcataatattttacaagcaacataattaaatttcaaatataggctcaagatgttcaaaggtggcttgccttgctcgagatctggagcttgatcctcgaaatcctcgcactgcgggtcttcgggctccgaaactatacgcaaaacgggacaactcaacaaacggcgaaaaataaagccctattaatgacctctaagtgtgccattagttagatctcgagatttgaggaattttggaagttgaacggagtcaaacggatttacggttgggaagatattgaatttctaagattattggatttttggtctaaaggaaaaaggatttaattaaatcctttttggaaaagaaaagaaaagaaaagagggagggaaattagactttcctcgggcggctagggcgcggcccgagagaaatggagcggttcggccgagctaaatgggccggccggcccaaggcggcccaaggcacgcgcgcgcgggaggggaggagagagagagccggtggaccgggctcaccacgcgtggtcccgagtgggacccgcttgtcggtgacacggttcaccgtgcggagcgagcacgcggcacacgcgcgcgggcgggggagggacgcggtgcacgcgcgcggttcgcggtggatgcggatgcggcgggcccacgcgcagcctcacggctcgcggtggaacgcttggccgagctggcgccgacgtggcgcctacgtggctgccacgcgggccggcgggaggtagacgacgacgccggccggaatggacggcggacgacagcggcgagcggcggagcgaaccacggcgatacaggcgaaagcgagcacaccgggtggttgcacaggacgaggggagacgagccaacggctcggattcgccggagggagcttgacggcggcgaattgcggcggcggcaaccggcggcgggagaaggggaaaacggcgacgaggtcacgaggggccgattcccggtggcgagagcatctacgcggctacgggaatccaatgctagcgttggattaggaggaaacgcatcgagggaggccggcgacgagaggcgcttccgagctcgggcggcgacggcggcgggcacatggcgagcggcggcaacggtcggggcggcgccggctagctatggggaggctactcgtgctactacccgagtctaagggaaggagatggaacgaggaggaagaacggagggaggctctaccgagatgaggtggggcgctgtgacgagaggccgacggcgcaggagtgatctatccggcctcgggcaggggaagaggaaggagacgagcgcccggagtccccttccgcgtcctcgctcgtgccggctcctccgacgcgcgcgacgacgaacggcgacggcgaaacagaggggtggcaataatggagtggaggcgatgggaggagaagagagggagggcgcccggggctttaagggcggcaatgtcggtttggaaaccgactttgggcggtcaaggcgcgagctggcgctcggcgctcgtggccaaatcggcgacaggacggagggaggatgatgccggcgggaggaaaaggggaaaaggagggagagaaaggggcttgcctccttgccgctttggaaaaaggaggaggggagcgggggcgtcgcggcagagggaggaggggctctgcctccgtcccttggcggcttgcacgcggagtggcggggccgaggcgatgacaacggcgatgacggcggggcggtgtggagcggagcggcgacacgggcgacaggcgtgggcaggcgctgacgacggcgacgaccaggcggtcggccaccacggcacgcgcgcgcggcttgcacgggagacgcggcggattgagtgccacggctcgggcacgcgcgctggctgcggggccgagcggcggcgcggctgcaggcggcagggcagcgggaccgggtgacgcggacggcgcagacagcgcggcacgggcggcaaccacgcgggcgcgcgcgcgcgaacgacgcgcggggagcggcagcgagggagcggagagg

SEQ ID NO: 5414 - DNA, 14379 bp, Oryza sativa
cggtggtagggaaaggcggcggtgccggtgggatcgccggcgaaggggaagaagggaagagaaagagagagaagggagtgagggaggaggaaggaggactgacatgtgggccccacatgctagtgggcccacatttttttttgtgtgaatgactaatgggtcctacgcatattttttatttctactgccacgtaggtgccacgtcaacgccacgtgtaacaaagactcggtcaatattgccacgtaggcgccacgtggcgccacatcagcaaaaccgctcagggagtcaaattgcaccggttttagaagtttaggggtcgagatatctggttttgtagtttagggtcatggtttagatttcgatcacatttgagggtcatggagtgaacttattccttatactgggcgccgtatcgagggaagtatcgaccatgtattgatgccgtatcgctcatttttttttatttttttggctaacaaatcagcgatacttctccgataccgtatcgctcgcgtatcccacgtatcgccgtatcggatacgtatcccatacgggaacggcggcaaactgccgtatcggtgcatcacaggtgaacactcaaaggcaaccctttgggtcacatgaatttcagaaacaatattattgccttgatccatgtactaactccacgttttaatgcatgcaatatttctttttccccattagatgtggatgctgaactgccggcatcaaccgtatcgcgaagaggatggtgagctaaggattgttggtcctccacaccagcacgctcatctcaaacgcgttcgcatcagtggtttctttggccacaaagaccaggtggagctagcacttcacatccttcgcagctccatgaccctcgagcagatggtgatcaccccaaagctagagattggcaacgatctggcgttttcagacccttgtgctgatgagtacgagaagaagcattacgtggatggccatcgagtcgccactgaatttgtttgcaagacagaccatcgcaatgttgtcactgtggaacgggtggtgccagagcctgccgacggcgaggtggagcgaaaacggagaagggcaaattagacttttgtctagaatgttaaatttgttagatgtgctcatttttagtttttactggtagtatcaaacaaatgcaactggtaaaaagatgaagattagttctacctccgttctaaatataaaatactataaggagttctcgttatgtgttatgtcactacagaaattgtgatttgtagtgagtgtgtggccctttttatggcactgttcttcttttttggaataatgactcaataggttgataattatttgaaggcaccaacaaatgagttagtaaatactataaagttaaaaataaatttaaagtgatattataaaaataataaaatatctttcttcgtcctgcattagttgccgttttatgttatttaaaaaactaaggtttagtaaaaatgactacaatgtcttctattaaatgatataagattgagaatgagaggataattagacttggaatgtgtatggtgtcttgattaatgtgatttaaattatacttggtcttgatatataaacatatatgatgatcaatttgataaggagggagtacttgaaggtgataagctttttaagataagttttgaattaaaacgatgactattttagaacgaagggagtataaaggtcccattcatttctccaataagagtttgatgcagataaagatttttgtgacacgcttttaaaattgctaaacggtgtgtttcgtgcgaaatctttctatatgaaagttactctaaaatatcatattaatctactccctccgttttagcatttcccgtattcatattgatgttaatgaatctaaacatatataatatctagattcattaacatgaatataaatatgaaaaatgctagaatgcattacattgtgaaacggaggaagtatttttcaagtttacaataattaaaactcaatcaatcatgcgttagtactactttattttttattttttaaaaaaacttaatcttcatcttcgaaagaaaaagaacaccaccaaagtttgtttaaaggttcgaaactcaggaaacatatgcctctttcgtaatccatggccgtttgatgcagatctcgcttggcaaagcaaatctccaaattacttcaccttcactattatgcctttgcaaactgcaacctccgctaatcattcatgacggccggcgcatggccggccgccgccgccgccgccacctccgcgccactgtccgccgcggtgcgcggggccatgcgcacgctcggccacctccttccccgcccccaaccctccgccgccgccgccgccgccttctcctcctctccccacaccctccacgactacaaccgcctcctggatgccttcgcccgcgacggcgacggcgacgcggcgctgcgggtgctccgccgcatgcgccactcctccccggcgtgcgcgcccacggccgcctcctacacctccgccatgtcggcgctcgccaaggccggccgccccgccgacgccgcggccctcttcgacgacatgctcgccaatggcgtcgcccccgaccggtgcgccttctccttcctcctccacgtctactcctcccacctccacctcccgtcggccgcgcactccgtcctcgtctggatgtcccgcctcggccttcccccgactcccatcgactacgcggacctcgtcttctccttctgccgcgcgggccgcctcccggacgcgctccagctgctcgacgaaatgcgcgccctcaattacccgctcaccctgcacagctacacaccgatcctccaggtgtactgtgccaatgctgatatgcagtcggctgatgcgctcatcagctccatgcgctccactggatgccaccccgatgtcgtattttacaacatctacgtaaatgggttatgtaaggttggggattttgatgctgtccagaggaccattgatgagagtggccggaatgggtgggtgccagatgcagttacatacagcacctacattgctgggctttgccggttcgggtatgtcgaagaggcactccggcagctggaaatcatggtaacgatggggttacagccgacagtagttggtctgaacatactgctcgactatgttgcccaggaccttgatatgtgggcaggcaaggaggtgctggaacgatgccaggagcttggctttgtggtagatgtcgtgacatacaatacggtcatggatcatttctgcaagaagaggaaatggctgcgtgttctaaaactgttcacagatcttctcaagaagcccataacacccaatgtgcaaacgtgcaacatttttatttcatgcttgtgccgagctggaaagtttcagtttgccaagtttgtgttcagcagcaaggggttcatggcagacactgtgacttgtaacattctaattcatgcattctatgaggccgggaaggaggatgagcttggttttctgttcgctgatgtgaatgcgggtaaaattgccccagatacgatcacatacaatacgctggttgattgcctctttaggtcagggaggagagccgaggctgtcaatttgatcagacatattgatgatggctatcctgttgagcctgttgcacgcttggcgtattggttggttaggagtggaaatgttcgtgaggcattgaggttgtttgatgatatgctagaaaaaggattgttattagatagtaggatttttgctaatgtcatcaaggcattctgcagaaagggtccaggggaatgcacagaaatgctgcagctgtgttctgtattagataggatgcttggaattgggtgatccttctgtttaatgtgtttataacttggaagtgcttgattggagttaaggaaaaaaaagggacaacttgagagtgctcataggtctgccaagtctttttcactactttacatggtagtggcattgtttttggacatgtactatcagtgaatagccaatgaaggtaaaattcctgttgcttttgtcatgcaaattttcattaatatactctgctgatataatctgtcagccaacacttgtaaagtacttgctgtaaaagccccggtgttataatttttttgataaagcatatctggaataaatacccacttgcatggcattctttttcttccttcataaatgtgggatcatgtgcttgtgatcctgtccaatgcttgtcttatggtgttactttgacagtcttcagagttgtgggagcagataaatagcttgctcctagaacttcatatagggtaatccaggaggtcagtacctccagtaaaaagcattggctcttgtagtcttgttggtgctccaatgaatatgttctgaccatgcaatccttgtgatccaacacaaaaatgataattgtgtttattttttaggaacagctggtttcactaattatcagaggaagtgttagtcatgaaacgtgcttctagtcctggtttgttgcattctcattatcttccccccatcttgtctagcacttgcattatacatgctcctttaagaaaccactcgcttgacctgattttgcaaactgcaagcgctgaagactaattcatttgcagttagatgcaatcccggataatcatggatgttccacctgatgatccttataggcaaggtctgatttggtagagctagtcctaacaaaaaagcaagagatctccgtgtttatgaattaaatcaggtagtgttctactaatacttacttttatctgttttttcccatcatggaggaaatactgacttggctgttacttaattcatggcataattatatagctcaattctttctgttgtcctgctactgcagagtaggcgatacttcctccttggtataaatgctacatcaactttaagtcacaaggaaagctttttcttgatcaaggattgacactaaaactctagtactattttgcttcaaaggtattaatgattgatttttcaggtatattataagaatatacaattatctttttaaaagtgaatatacaatgaaacttaactctgctaataacgatgaattaactactccatttagtatggccgaaataaaacatgatgccttttagatagaactaatgaattaaataaggctgctaggctatgggtttcgaattgaattttatccagtgttctggtcttctgggatatcatctgtcaagagttatatatgctctccttgttgactttatatggtttgggtgtcagttgtacagatcttacgtgttatgtgtgctgttgtgaataactgaacagttgggctggttcgctgtaaggaagatctccaggccagcgtggagctacttcaacagacaccagtgtgtcactgaaggccgatagcgtctttgtatggatgacagagggatagtcatagagagttgtcagtgttgatggacctctgaagttctgattatctgtcatcatgtagaaagatagtgttttggttttaaacatcatctgttctatctttttgttggttatcttgtgttttgcgttttggttatcaaatttagcagcagatctaccagctttagtttcaggttctggatcgaggtaataacaaaccatcagggcttggattctcagccatgttgttcctacttgtattccgtgaagctgtgggcagaatgtacttccagttaatggacttcaccaatgtgagcctgattcatgggatgaatctactgaagattagataaagacaagtacgggtcgttgggggattgtaattcagaaaataactgaacttgcaagaaacctcaatggataatttgcattgtggttgtatcaaaactagctgggaattccgtgtactcacattgtttgtatcttcagtaccttgccatctcaagtgtcttttttttttcaggatctgttttttggagagatttgatgttgttcttgaaaaaattagatacagtaaaaatctactgatagcagcgagccgcgagcgacgtgtctcccgccctctccagccaatggcctgcggcgattcaagtggggcccagtttccagcgtcacagaggcgcctacgtgggggctcccacgtcagcacttgcatggcccacatgtcagtgtaaccatcgcgtcgtcatccccgtgcgcttgactctgctctcgtcttcctcctcctcgatctcccagatccaaaccgaacccaaccaagcggccgcggcgctctaaaacctctcccgctccacgcgcggggcgcatgaaaccctagcgagaggcgccagatctcccgcatccggatcgccgccatggccgccgccaccgcgctggactcgctgccggcgccgctccggtcgctgcggctgaagacgaagcagcaggagctcctgctccgggtctcggcgctggcgctcatctacgtgctcgcgttcgtcgtccgcctcttctccgtgctccgctacgagtccatgatccacgagttcgatccctacttcaactaccgcaccacgctcttcctctccgaccatggattcagcgagttctggaactggttcgatttcgagagctggtacccgctcggccgcgtcgtcggcggcaccctcttcccgggcctcatggtcaccgccgcgctgctccaccgcctcctccgcgcgctctccctcgccgtccacatccgcgaggtctgcgtcctcaccgcccccttcttcgccgccaacaccacgctcgtcgcctacgccttcggccgcgagatctgggactccggcgcgggcctcgtcgccgccgcgctcatcgccgtctgccccggctacatctcccgctccgtcgcgggctcctacgacaacgagggcgtcgccatcttcgcgctgctgctcaccttctacctcttcgtgcgcgccgtcaacacgggatctctcgcatggtcgctcgcctcggcgttcggctacttctacatggtctccgcgtggggaggctatgtcttcatcatcaatctgttgccgctgtacgtgctcgtgctgctcgtcacggggaggtactcgcagaggctctacgtggcctacaattccacgtatgtgcttggaatgctacttgcgatgcagatccggttcgttgggttccaacacgtccagtctggggagcacatggccgctatgggagtattcttccttttgcaggtatttcttacacatattgttatgaaatgatgtaacaattcatccgtagcgatgaaagtgccttctaagattagtagctagttacagctctggtttattagatggctagtttagtaaattagcaacagttgacataaaaaggtatgattcagatgaaaagtcccgccactttaggaaatttgcaccacccgtcttaattgtcctggaaatgagttaggattatttgtaactgagaaagggcgaaacacttaattgaaggcaacccgatcttggtttgtaggcaaactatggagtaaattggacaggtaattttgtagaacagttaagatcaaatgacctgttagtacttattgttagtttcatataacccagatgattagatggaacattggcatttgtgtcagattgctgctactctcattttgcctcttcagatagatcatgtttactgggtagacatgttatggaactgtgaattcttgtatgtttgcagtgtgattggtggcccatttatgcctggctgtaaaatgtgagatgctatactctttactcttgaatatgtcccacagccaacataactcaatgtcgttattgtgtttgttgtgtgtatatatcaaacatagcgtacctttgttatttgttaatatgaatgctttgacaaatatctattctattatgaggtactttgtgtactttgtatagatagagcagtatagcacatgtataagagagctatcataaaccatttcctctttttgcaggttttctttttcttggactgggtgaagtacctgctgaatgatgccaaactattcaagtcattcctgagaatcaccctgacatgtgtgataactgttggcaccctagctcttggaattggtaccgcgtcaggttacatctccccttggacagggcggttttactccctgcttgatccaacctatgcaaaggaccatataccaatcattgcatcagtatctgagcatcaaccaacagcgtggtcttcgttcatgtttgatttccacatccttcttttcctgttcccagcaggcctctacttctgtttcaagcgcttgtcagatgccacaatatttatagttatgtatggcctcacgagtatgtactttgctggtgtgatggttcggttaattcttgttgcagcgccagctgtttgccttattagtgccattgcagcatcagctacaataaaaaatctgactaccttgattcggacaaaaagcaaaagtccacaaactgtctctggaaaatcatctggctcaaaggcagctgcaaaggtattcccttttttttttttgtctatgcttgcttgcatgctttatattttgtatatggatagttgaaataaataaatttgatggagcttgaaatctgaaacatacttagataaaatcaagtggtacaattgaaatcctttgtttccgccaatcaataccctccagagtattgtgccatttgaaatgctggattgcaattttccagtttaccatgtgcatggctgataagaatataaaggatttgcgccttttctctgacaattctaattccagtaggttcaattgcacataattttgtggttttcagtttgcttgtatcaattattttaagtttctggttttcacatcactcagaagctgacttggtttcttgtgtaaacagggtgcagttgatcaatccttgcctttccagcagaatgtggccattgctttacttctgggtgctttctacttgcttagtagatatgctgtacactgcacttgggtgacatctgaagcttactcttctccttccattgttctggccgcaaggggtcataatggaggcagggtcatatttgatgattatcgtgaagcgtattattggcttcgtcagaacactccttctgatgcaaagattatgtcatggtgggattatggataccaaatcacagctatggggaacagaactgttattgttgataacaacacatggaataatacacatatagctacagttgggcgtgcaatgtcatcctatgaagatgaagcgtatgagataatgcagtcactggatgtgaattatgtgcttgtcgtatttggtggtgttactggttattcttcagatgacattaacaagtaagtttatccactgaatctagagcaaattttaataaatcgatgttattggttttattcgaattagtattgaacattttttcaaaaactgaactacaaaatggattcttacttagctgcttatttccaggttcttatggatggtgcgcattggtggtggagtttttcctgtaatcaaagagcctgattaccttgttaatggggagtatcgtgtcgacaagggggcagcaccaaaaatgttgaattgcttaatgtaagtatgaaacacactaatgagacttatttgtcaacacatgtactattttgttatttatccgtgttacttctatccttccatcacctctaattgtttcctctcttgtttgacaggtacaagctttgttattaccgttttggagaactgaccacagaatatggaaaacctccagggtatggcacatccttgccattgttattgcttttacttcattgatttatttaaatagatattacattgtactctgtattatattttggttatgaatggtttccctaataagccaggcaccataatttgctggttgtagcttgcattgtcctatttgtataacaagcctgtttttgatatggtaatggatgctagctctgctatttattttgtatgtagatacgatcgagtacgaggagtggagattggcaacaaagacattaagcttgagtacttggaggaggcattcacaacttcgaactggatagtgcgcatatacaaggtcaaacccccgaagaataggtcttgaggagaggaatcatctcttggttagtatctggtgctattaccttgaggtacattgtgtcaagtcaaaacgtattggagttcctacaggagacgggcaattgatttgaaaatctgcatcagctgcccccaagtgcgatcttttgttttggtgagactgacggaagtagaccataggtcagtttgaagtaacgatcatccgtcttcccctatatcattttgttagatgtaatcaggtgccattcagaactagcaattgcgacgaccgagtactttttgattgctgagcatggtatgacagtactccagatgtttttgtaagcacaacagcttatttgcgtagtaactttagatcgggttacacgggacacttgcaattttctggtgttgaagacaacaatgaataacttaactgtggttgctctgttttcctctgtgagctctcatcatcttgtggcaatcgcagtagtcgtttttatgttaataaatgatgcctataaacttgcatcatctcattagttagtactcagtactcgctgcctcataaaaaacagcagttcttgcaccctacaagagaactgatttctcgtccaaaccacataagctgaatgctatacgtctcgtacatttcattttgctctactttatatctcattttttcaccactaataaattccttaattgcagtaacctttatatacatgcatctatactactatgtatacttcatctatcctatgtatctttatgtcatcgtgaataaatcatgtattcgcttcatttcctgaagttcacttcgctcctcgcgagaaactgaatgaatccggcaatcgccgcgccgatgatgaaccatgtcacggaggctaggacgatcttgagctcgaagctgttcacgagacccagagcggcggcgccaccgacgtgctcctggatgccgccgccgccgactccggccacctcctccctgttgtaacccacgaacccggccgagatgatcgccatcagcagcggcgccgtcaggtcgatgctgcccaatgtcaccccgccatcgccggtgggggttgctcgccgcgtctggctgcggggaggagaagcgctctgcctccggtgaggtcgctccggcggcgatgctagggacggcaggttcagctgcggagtccagtagtcgtcgcggcgggcgtacgaagccaccgtcctcgccgccgtcgcgcctcccgctttgcgtcgagctgccgcttcttggagcctgtccgtcaccgggtcggcgggcatggaaggagaaggcggcggcgccggcaggtggagagaagcgagtacggtggtcgccggagctctgaacggctgccagtaccaccagttcgagatcgacctgatcgtctgaactgccgagctcctcgattgccttgctgcctccgactcctgcacgcacgcgagcgagcgagattagttaacccgagcttactgtgctcagcttcagctctgcttgttaatggtgattagtgagtcccttatgaaatcacaaggctacttgaatactggatcaaatcatcagatttactacctcggattctctcgtggcagacttctgcttcatctcctggaacctcttctgaaacttgcttacctcgttgaagatgtcgggtgcgcgagcgcccacggtgttgccttccgagacccggactctgccgcgcggctgtttggacatcaagaactcgagagccgcgagatctgacctctcgaccatcctaatcaaccgtacaaaccgaaccaaatcaaccatggagatgaacaaatcaggacaaatcaacaagcagaacacggattaattgggggatttagaggtgtgttggattacgagatgcagtcgacggggcatgtctggatggcgtcgaggatcttgtcctcggcgtcggcccactgcgcgacgacgcgggcgcggccgtagacggactcgacggcgaacgtcttgttggcgtagagcgcgcacttgaggcagccgacgcacctcacctcgtccacgaacaccgcgcgctgctcggcctcgccgccgaaccacgccgagtagagcggcttccccgtgtacccgacgaactccgactgcttcgcttgctcctgcatgcgttccgtgcagatcgattgcctcatcaataattgtacgaacagttggtgtgcgtacgtatatgcgagagatcgatcgatgaagcaacgtacctggtcgtaggcgaggcgggcggcggggtcggagaggagggagtagacctcgttgaggacgatggccatgtcgtggcccttggcgccggcgacgtcggggtggcaccgcttctgcagcgaccggtacgcggccttgatctccgactgcggcgacgaccgctccacgcccagcagcccgtacaggtcgtactccgtcacccacgtcgtcgacccaccgcgcccgctcctcccgcggtagctctcgccgcctccttcgttgctgctaccgccgctagatgaagcctggcatctgcttctgctggttcgccgtcgcgcggcggtgcgcgtggtggggaagggcatcgagacagcgccggtgttcatgagaagcgcagccatggctgccgcgggattaacttgaaattgaacggaattatctcgtctcccggacggctggagctcaattaatgggggagaagagcaagtaagtgactggtcactggccagtagtacagcagaagtgatcgctgggtggcgtcttccggggcgagagctacgtgaggtgagatatttcgcggcggcgttgcgcttttcgctttttgctcttgctgcttggcacagatattttccccttgctgtttgccccggttgcggcaacgcctggactatcgatggccatatggccggacccgacggcacggcccacggcacgtccatttggcttggccccggtccaacagttggactgtgcctgggctgatgccttggcatgttgggttggcccggcatggcacagtcaataaaaatactacaaggatcgaaaatagacttaattcagccagacaagtcgcagcccaaagacaaggaatacaaatttcagccatataagacaaaacccaaagagatgagggaagaaaaacagaattattctatggagaaacacgatgaactgttgtgccttcggaccggaccggcacagccctgcttgggccgtaggtgtagcccgtgggtagacatggcacagcctagctcggcgtgtagatcgggttgtgtcagcccaactgacctcgacccaagccgggttgtgcctagaccgtgccggatcgggtagctcgtttggccatctatagcctggaccaaccatgcaacaatttgctaagagaatgattgtacttcgaaatttgctgttttgaattttgcccctccactgagcggcttataactatatatatttcgcctcaaactgaaaccaaacacttcaattttttaaagaatctacacagtaaaatgcatcgtagctgtacatggaccataatgtatatttacacccatgatttacgggcctatagttttccagttaagcaactaccgtgactacatacaagtagcagcgaaagttgtatacacagacccttaaaaaaaatcaaggtggctaaatgagcatcttgaaaccgaacttgagcatcgattacaaagaacgttaccacatgttattatagtcacgatacctctgcattaaggcatatacggcatgaccatgctgacttggcaacatcagcttccctaactgcagtaattttgctaaaaaaaaaatgcaacatacgctgatcgagcagttatgtttggaaaaaaataccgagttgttaacgttgtattttaaaaaaactagagaactagctgaactatatattagaaaatcaacatagtaatatattatcttacagaggatagataatttgaaagtattagaaattggatttgttttctttttttattggttattttttcttatgcataatttcttattttcaaatttaacaccgctatatggatcaataagattaagttttttatgcaaaacaaggtggcattaacgtatgattgatttagttttaattattataaacttaaaaaatatattaatactccctccgttttttaatagatgacgccgttgactttttatcacatgtttgaccatttgtcttattcaaaaattttatgcaaatgcataagatataaatctcacttaaagtaatatgaatgctaaaacaactcataataaaataaattataatta

SEQ ID NO: 5415 - DNA, 21464 bp, Oryza sativa
cagctatatttgttataacttatagaagttgaattttaacctgtatgtttgtggagtgatacatttcatgttaatctatatcttagcattttgtttcaatttttttatgactatttagatgatatgtacaaaacgaatgaatatcctctcgagggattaataaattttcccccataatgcttcatatgctgcctctaaaaatgtcacattggatagagtgatgaggtgaaggacagaagtgaggagagagattatgagctacttctaaattaagaggtaacctccacacaaacttaaaaaaagatgtgtgagtattagatgattgacatttgtgtgttggaagtgacatattgtatatgttgccttttagtttattaatgaataatatggataaaattaaaggtggcatttacgtctatcatagtatttgctcttgtagtcgccgcggagtccggcaaataactgtcataactttttcttttcttttcatcttctttatatatggctgggtgcttaattgtacatagttactaagtatatatagttagcttaattatcatgcctggtttatgtatcggtatgtctctgaattggtctcgtgtaaaagatttgccgtttgatggaatttcagaagttgccgtacaagaccggtactactagtgttggacatgtcaactgaaagtcgtttggcccaactgagaaagtcgaaactggctcttaacagactagataccttaagaaagcaaaagaaggaacagcatactgacctaattaaaagctttctgtgtcactctatggttcaattcccgcgttttgggttacttgtgcacaacaaaagtactagatcctggagcacaaaaatccaagctgcaaccgagggaggctcaatctacagagtatatattcctgattatctaaccggcctgtcataggtggtgtttggttggagggactaaagtggagctaaactttagtccctctcacaaaaatataagtccctatggtagggacttatgtttttgtaagagggactaaatttagtccctagttcccaaacacccccatagtattttcaggctgaactcttgttgcttgggtcatgtgttgcttgctgttgattaatgagggtgctctgcttttttgagcacttgtctgcatcacatcatatgccaaagtctctccacttaaagtaagctagagacggtactccaaaacaatcatcaaattccagctctattgatggagctccctgtcccctttagcttttggatgagactttggatgctgccgcttgggaccaaacatgcagctagccacagcccaattaaaccttgaacgcagtaatcaggatgtgtccttttccttcttttcgtgtgccatcaatcccattgcctcatagatctatgcatcaacaagcatcagaaatataatacattttcttagtgaaaaggcaaaccgaaagaagatcagaatccctgaagaaaccgacatgcacaccatgcagatagtactaaactggagcacgatttaacacgttgccactacaagataatcgttgtggatccaccagtttattccagataaattaacactgttactctgatagatactcctcctatctctcacctgtctctaccatatatatatacgtggtcatgaggtgatcactaatagtactactatatatagttgacggcaaatttttttggcacagaagatctgaagatgcacacatatgctgacaactgcaggggcagtgtcaagctgttaatgcagatagggaaggaggtaggctttgccaaaggctttttggtggtgttcttctcaaagcataaatatgggtctgatcttgctgtcgggaaggagatctccaatcctccaaacctaggaccacacctactatatggcgcagctagtcatcggctcacctcctctcatcacccttcaggctcagatcaatctgcatgcacaaacaagcaagattcaactagaaagagcaatagtagctggtgggtgtggagtggactcgtaccgctcacatgacccatgggtgtgagcaagagctggagatatttaattagtctgctttgattggttgggaagagccatagaagccacaacggtgggggtagaaagttgctttcaataactgtccacaactggttggagtacccttgtcgttgttgaaattgcacccctaaggctaggattagttcctaactttttcttcaaacttctaactttttcatcacatcaaaaaacttttctatatacataaactttcaattttagcgtagaactaaacacaccctaattatgtctaaggggaggcaggaatgtccaaataacaagatgaaacactctgtgattttacgctgtttggtcacttaaacatcgatctgatctcttttttttccaacaggccgctagaaattgaattaattggatgatctgaaagctctgtttatctgaaaattactgtatcagagcatgcagaatatatatatatatatatatacaacgaagaactagtataattaattaagttgttttcgggggagcatatatgtttctgttcccgagaagactcgatcaggttgtcatcgccgtaaccaatcacgtcttatcccttaatgccagcatgtacgtacggaaaacatagtaggatcagagtagttgctactccagctagctcatgtaaattctctcccggccgggcacgttcgagacaagatagtacacccaccccacagttcatacccaattcaaactcgcatctgtcgagctatagcttagctagctacctgcttcacaactcaggagttcaacatcatcatcgttagctcccttgaatgaatccccgtgacccggagaacgtgtcgtcgtccgaccgtttcagcgtcgatcgatccaacgacaaaagacgctgcggccggcggtggagccagcgcgctagctagctgcacgtactggagttacgtacgtacgcgcgcggcactgcaccgcggtcgacgacgtcgtacccgctccatccgtgcatgcacgagttgcgccccctccccccctactacccctgctccggctggtaggggacacccctcacatcaacccgcgcgccgcagcaaatccatccatccatccatgcaaatgttaggttcaccggccggctcgtttcgctacagatgcgcggattgcgccaccaccgcgagcgcctgatcgctctcgcgtgtcccgcgagatgttgggcttgtggctctcgcgtgagatgccggtgcgagccgtggagtacgtgggatttgcgtgtgagacgccgtaaattcacccgacccaccagcagtccaggcgtccagcacgttggatagggtgggggatgctttgcttattaagggaagaacatatgagcagtagtactgggcgggcgcgcttgctaattaattggtttttgcgcttgctcgtgctcgcatgtggccgcgaactaccgtgaattaatgtgtttggaatttcgacgtgatcgtcgcgagtcgttattcaaaatggagtactgcgtactagtaccagtgtgtaactgtagtgtgttcggttaggttcctgtacgtggaaccagctccagcaactggtgacctaagcttttctctagtttctttgtacttgttgctatttgcacggctgcctgcagttatactaccaagcactttaggtacggtacgtgcattgtagatgtcacttgtttgttactgcttcgtggagaagtgataccgatttcccaggagttaaaacttagcaaatcttgtacaaaaaagtgctctcgtttgaaaagaaaaaggtccatcaaaatagcatatactagatgccatatatacgattttctatcaatcagaaagatattagaaaaacgtaaaactatgtacagttacaggctacaacaatctgaatgtctatgtaaaaaaaggtgaaacaacctttctaatctactttcacaggtcacaacgaatacgaaataaccattgctcggacagggagtacagtacatcagcatccccattcaccggtctcgaaagctatctctacgcaatttatgagaacgacagcgcgcacagatcaaagtttgtacaccccgtccttgatttcagtacacaaaggcccggaattcaattcctttgccggaatccgtaggtggtaggaaaagccgtgcatggccgggaccccggcttgtagtactcgtacacagtagtcgtactctacatcagtagtagatcaggccgtttgctgaacatgcccatgacgcccattcaatgatacactggctgtagaggagtagctttttttttttctatctcaaacgacatgcacagcactctgagcatcatttaaacgtggtcccaaatgtaagcgctaccctctgcatgcatgcccgattcattcgtcacttgcttcatctgtttcattgcatcatgcatggcacacaaaaggcaacgacacatgcataacaagcacaaaaagacgcaaacgaagagaggatagggtccaagtgctttgcactagggtcttctatataattttagaaccgaatgtaggagaaagattttcatcatctaactatctaagggatatctcctcatttttttcatattatttatatagttaaaaaaataaaacaagatatatcaatatgagatatatcactctacatgtcaaactcaaattttacaagttgtaaaaaaacttatattaaagtttgaggcgcattttattattaaagttttattttggatcaatcttaaaccaatctctttttactttggactgaataattttgtcctttttttttgattcaccaactcttcaatataaaaacaaagcctatcaaagatatgaccagtgtatagatggggaagtttattggtgtgctagagccgatttacttgaggtttgtgtgtatggaacaagttgtttgtggtggtccaaactgtgataaaattatttggtttaaagtgaaactttagtagtaaaataatctcagttcagttttaagtttttgaattaaaactaaagacatgtccattgtactgcggataacacatgaaaaaatagttcataatttccaatgacaggttttatataataagagttttgaatatatactatctatgaccattataaggcaacccacctaatcagtggatatgtcccacgaaaaaatagttcacagtttccaacccacgatcgagtgagcaatggattttttttttgcgggagagagtgggaagtggatttggttgaataggtggggctagaagagtatttttcatattttgttagtcaattatctgttttctttacctcacttaatttgggaccaccgaacggacatccaatctaggggtaaatggattattcagttcagaaaagtgagggcaaatcgcaaagtctgaaaagtaagggtaaaatcacaattgcactaaaaaaacatgagtaagaacacaattgtctcttccttaattagaggagatataatagcatactacaagtcagctataaacacatatccagaagaaaaaaaatagagagatatgactagcgggctacagatttgtagtcacctgcagcacagactctatgacgcaatgtgtgtatgacaggtggtaccaactattaatagcgtagttatttatatgtaactattgtatgaattggctattaaattgattatagatgatttgaaactggtagttggctatactattaaactttaaaattgctcttaatctcaaatgaaatttatgacgcgcgaagttgcactccgttctttattcagtgtctgccttgtacatgttcctgctccatgtttgtaggatctgaaaatcaaactgcctgattaaattctgcatctgacgttgtaagatgggaaatgtttacacacagttaaaatacagacaacgtacatggatgctatatatgctacgacacaccaattcaccactatgcatgcaagcaacagcatcgtcccttgtccctagcttatctggaaaaattaattcaataagaacttcgtagcccgagtcccgatcgatcgactactatcgcacagcgcacaatatttgccagtgccggcatgagagcgacaccttagctaatgcatatgcaagcttcctcttccgagaacatggccctggtccaacaataatgtgaaagtactgcatctgttgatgcatggttaggtgcttgatgtggcttgtgtcttggcgtaatcctgagtttagttgccttcattaacgccaaaaaatctactcgatcgatctcactgattggataccatccccctgcatgatgcacggacagtcggcggaggtcactgctgttgagatggttctagcccaaccacaccacccatggggacaacatctcatatcgatctaatcagatcattaccacttcgtcattggtcacacccacacacatatattcccctgtagccgacgttgatatgacagtctaggaacatacaaaccctgatcctttcatcaccagtactaaccagctggtgtaccctctctcgtcacgttcccacttttcccaaagatgggagagaattgagaaaagagagaaaagaaaggaaaagaacaactagcttgatctgtcaatcagatggatctatcaaaccttttttcttaaagagagcacgaatttaggacgcaaaccatgtatatttcagtcttgtctttcttggatctgcagctcgcagccgtcgccgtcgtcgcgtttgcatgatcgagccgtggtacgcggtgccgcgcatgtgtggcgcttcgcgggcctctcggactacaccgcgcgcgccgccgggggcgtacgtcgtcgtcgtcgatggcgagtaaacgtcagagagagatacggaaaacgaacgcacgctgctctcgtcggtttcaccgtctcgttggctcgtcgtgaggcatacgttgcgttgttgttttttattttccccggcttgaaaggcacagcgcttgcagagggggaggcgagctagggagtcgatcgggccggccgggcgtacgactccgaaaagtcgcatttgcgttttggggcaacgtcgctgtgcggctgagtccacacaagtgggggggggggggggggggggaggcaaaaggtgaggaataatgagagatcgctgtcccgggaaggcaaatcacatcaggattgcagcagctgagggcaaccagaatggagcctttcagggcttaagctcaaagtttttttccttctttctcagatatatgcatgcatgtgtgcctgtttgtggcaaagcctgtgtcgggtctgtgctgttcacaccactggctggctgaatcttcaggagaaaaaaaaataaaaaaggtgcacatcttgtgttacttttatctcgcaacaacttgatgataattctgctctgatttgattcgggcctaactcgccagacacgctggcccacctgtcagtgatctagcacgtggtttgcagctgcaacgcgtaggacacaataacacaaatccctctctctgactgcccccaaacatgccattagagcacctcgctggaattcagagctagtaggatatggttgttggtgatgcctgtcagcgatcgagcttaattagtccaacgctggcacaccactgcttcctgaatggagcagcgaagtactccaagaagcatcacgagggagtagggacggccggggttttggcaactgggcatgcaccccagtttcccgggcgcgacaggcaacggctgtacgcacagcgaagcctgctgctgcaaggccgatctagctactcactacacaactgaccgtggccaatggatccatcgttaatgccgaattagatgtcggttctttgtcctgccgtggacgattgcaccgtacgttccctgtgcttctgctgtttttaacctttgccgagttgtaaaaaaaatccgtggtttgtacacgtgtcgtgaactgcaactgagaaagaacacaaacaaaggcccaagccaatgaagcaaggcccacttgatgcaagcccagattagcccacatcctgaagcccaatcataaccactgcctaaaaaaagctcaaacctatccgtatcagtatcatgattcatgagtacttctctaagaaaaatcagtatcatgagtatggtattgattgtcaatatttttggggccataactcaagaaacataactgaacttttgcaccatcattatatcatgctaagaaaagaatttgctgatacaccatcatcgtcacatcgatcgctgccatgtccatggaagcaaatgagtacacatatcatttctacatcacaaatatagcccagctagttctttgatccagtcgcggttggtgccgaggcagacggacagtactcgcagtcacaaccaactggaccgaagcaggtgccggtgcccttgtacatcctggagcagtccgcgttgcatttggcggcgctgcatgccttgcccggattcaggataactgaactacagttcggggttaaggcagatatgtctgcagatctcgccaccatcactgcagatacaagcgatagatttcttgcttaggagttgcgtgatctatgtttgcgaaatcaacggcgagagaaggtgcttaattacctgatgatagagacatgagggcaatggcgaccagcagcaactgaacagtcctcatcctttgtttggtgttggtgtcgaaagctagaattggaagactgatgagtgattttttcgcgaacgcactgatgagtgatgagatgagatgcgttgttgatctatatggcaaatgccatgattttatagtggatccatggggatgctctatttttagaatcacttccaagaaagacaacagattaatatggattacattacaatcaataggcttatatatgaattataatgcttctaaatacaaatcatctatttttggtagctttgatggctgtgattatatactactaattcccaacaatggatagggttatccggttcatatatgtgtcttgcattaatttttgcccatacctaaacgaggctagtaccggagagactacatgcaagaaccttcaaaaggcctaacttgtcataggcataggatggcagaatacaattcagaccatgccttgtccagagtcgggccaagctggttaactcatgctggagtcgtccggctttggaatcttgagaaagatgtcggtcctgtttggactttggagctggttaactatggataatcgtgggagctataattttagaagaaactgtagctgttaaaagctacagggaatgccactgcttctgctgaaagaaagtggcaagagtgaagtatcctaatttcccaccggttgcttgagcattcgtcactggaaaatgccatgcgccaattcactattcccttcattccaaaatataagttataaccacccttaatccaaagaccaagaaataattattatcatcttgtagtttggaacattctaataaatataatgcatgcatctaatagaattatataaggatttaaaatagtaataatttaatagagaaaatgtcataattaattgcatgcttgcatgcatgacttatattatagaacatctaagaaaagtggttgtgccttatattatggaatggagggagtatagtttctaatgtgctaaaaagacaactcaaaccattatttttatataaccttgagccaccttagcaggatttaaggttaaacaaatttttttgcttaatcaaaagtgtgcaccttcacaaaatatattttgcaatatatactgcagagcaagataccgcaatacgaggatcacaaatggattaattccatgctactgcttgatctctgctttgccacctacgatctcaaatctcaaattacgtttttgtacatctccatgcgcctgagctcagattcaacccaactcttcttgaagcccccctcaattctcaccaaagttgcgtggaggctctcgggcatggtggcgagctgctcatcggtgaagcgatcgaggaaccggtatcggtccggcatctcggtaatctgcctgactcgcaaaaagggctgcggcacgaggggcatcctgtcgccatagcccctcgccgccacagcggcctcatggcgctggcgcaccacggcgccgtcgctcgtcactgtggcctccaccttgagtcgcttgttcgcgcacgccgcctcgccctcgccgtcgctcgtcactgtatcctcccccttggggcgcttgttcacgctcacgcacgcctcctcctcctcctcgaggaggcttatccacggatctggggtcatccacgccatcgctctctattggaacttggaaggcgaaacctattagtaccagatttaattgcgaaagcaatctgtagatttgggtgaaaggggaacggaggacacggacatataaagtccggcccaacccaacctctatcgggtcggattctgtctcgcaggctgagctcggaacagcggccatcaatgattaggccggccgcaggccgatgataattttgacagccctaacctaatatcctttatgcacggccatgctgactgttcatgtgcttgactaattttgacagccttcctcgggagaattaattctgcttcactctacgtaattttaatttgagcaaaggtagcatgatgtaccaaattttacactagatttttagtacctcgtggtatctcctcaaaaaccatagaattgctcttttaatttaggttacatagttacatcattgataaaataggaattaagattgcaacgaagatgcggcataccgatgtggcattttcattggttttttttattaaaaaacacagtacaaacataaggctggattggatcggtatatctaaggttgacaaagtcaccatgaatgcatcgtctaccactgaaaaataattagatataaatgcgagcattgaattggatcggtatattttgagattgacgaagtctacataaacgtctcgtctaccactgataaaataattagccataaatgcaagggtaaattgattctatcacaagcaacctaatcagttgaactaagttcacttcgcacattttcgttgaatctagagactaatattgagctatatgataaattttgaagatttttttataatataaaatgttaggaactaaattgaggaccatattaactaaattcactctaaaagaaaatctgcaaaaacaaagcaactgaactctctcgtggccaacgctgtaatgaagcacatgagaccccccccccccccacacaccaaaaaaaaaacagagagaggttcacacagcgttctatttagcgctgctgaaaataggacaatcccatataaatagtctctttatttaatcatcaacatctctccaggcatcacaaaatttaacaatcgcacgcgtcacactgtatgtaaaatttaagcctgatcgacgcgtgagtgatgatcggcccctgtgcacacagtactgcacatcgtcgtcgatcgaccaccgatcgatcggccggccggccgggttattagttgctcgccggcgccggggaagcgcaggtgtagacgcacttgcactgcgtgccgatgcactggcccacgccgcctttgtactgccgcgggcaattggtcgcgcactcgccgctgtcgcacgacggggcgcccgggttcaacaccgccgagcaggtgtcctggaagtacttgggccccgctatcttggccgccatcacgcctgccatttcgttcaatttttttgaattttgaagcgatttcgttcaaggttcaaaccaagctgatcacaagccagagagagagagagagagagagagagagagagagagagagagagagagagagagtagtagctccgagtgttgtgtactacctgatgaagatgatgcgacgaggaccatggccaggaggaggagcagtgctgcgtggaaggccttcatctctgactctgacgccattggcttttttttttccttgtgacttctgctactgctaccggtgcttagctgcagctttgtttcttttaggtgtaccgaatgggagtgtggcgtttatagtgttgttgttcgtattatttttggaatcacttactacagtaagttgtatggatatggataacgggaacgggtttaatttcaggagtaattggcattgatactgctatattcgtttgtgctgatctttaggattatatagtggccttgtattaagggttgtaccaaattggtacctaatcaatagtaccaattaaaggtgatatttcggtgcattttaatttgtcaattttcacgagaaaaaaaaagcgcatatgctccgtatggcatggaaaatgtttagatgggtcatagtcaatccaaagcatatgttaaagatgttatagcccataatgcaagtagccagaacccaacagtcatagagaggtaatttctagccttaccaaataacgaagtgagattagggcgagaggtcaatcttgtactacgtactgattggaacgaggggaccgcaacaccaagctcaagccatgagctcctagacacgctgccccaacccgcaccctcatctcgcagctgcgccatgctccggggtgttgcgtcctttcttgtagaagagtcatgtctccttgcataaggacacaaggcgttgcttgtttggcctgattcctacaaggagtgccggggtacgtgacacgatggagcattggccatggactaattcaccaaatggataataataaaggaattgctacacttcagtcaacaaaaaacctacctctaaatcttgcaaattttagttcactggatgtgtttcgcaattcgtgctccagctgcttcttctccaactccgacgaactcctcttcttttccggtgccggcgacaacccaaactccggcgaagaattagggtcctggggtggggtggggtgggaagggtgggagggggaaggggaagaaagaagagttcgccgggcttaaagggatggccgggggaggcggcagcccggcggtgggcggcgaggcaccggcggcggcaccggattcgcggggctggaggacggcggtgggccggcgttggtggcgggggcatcttgccgccgacggctcgaggaggatggaggggggaggaggaggggaaggacgagggggaggaggctggccgaggggcctcgccggcgccgttgacgccctctggccagccggcgaggcgggcagcggcgcggtagggcggtggcggctgggaatcgcgtgcgagagacaggagtagcggtggcggcgcgatctggatgggggaggaggagaggagttagggttaaggggtctgcacgaatcttgaagcatatccaatgatctaaaatttgaaagataggaggtgggattttctgtcaacatatgtgtagatgcactcttataaaagacaataaacatcacctgatctatgattccttcaaaaaaaaaacttacttgaatgtaacagtcgacacttgacaccactctcataaacttgcttcattgagcagttggctcaaatgacgttctgacgttgataggcatgtgattgtttcattctcaattaagttgaatcaaataggccctttttccctttttgagtcaaacattcttagaaaaaccttccgcatgctttaatatcttgttggctaagtcgagcttctaatgagacatgcatacaattgtattactttgtttttttaatataagacatagttgtcattcacatgctccatggctcttggattgtcacggagtcgtcctagagctcgggtgagaaggagtgggtaactcacccaccacggtggcgacgagtttcccctgacagcggtggaggtgacctcggacgataaaactccagcagaggacctaggttttatagttttagggttagaagttggtgccatggtggagcagggtaggggttttggagggtggctttagagggatggatggggtggtggaaacatcttagtgggtgcagagacaggtaggtgacttgggtgctgcttgagccgtgaggatggaaggtgacggttggcggaggggatggatttagtggcgctagccgtcggagatgagaaaggaccgggacattgctggaatgggagaaaaaaaatcaaacaagagaggggtagaagggaggagttgaattgcatgcttggaaggggcatgccagagccattggcggcttccggtgccgacaaggctgagcggtggcgcactgggatgggtagtcagcagcgcagggtggggatgtagtgaaatcgtattgtgaaatcccttctttttcgtgcacgagaaattccgaatcattgaataagttgttatttttcttggttggtgtgattgtgtcatcttttcatgtacctttgtttatttctgtcgtgtttgagtttcaagccaaaaactttgtaataagtggatttagctttagttgaagcaaaggtcaagtttaatattaattattaaaaaaaggtatgttactatgaaaatataattattgtagccaatacttaggaggtcaaatggccttccacttgaggggtgaaacgactagctttcccatgcaaaccgatgtataccatgagaacgggaaccctttctttcatttatttgttcatcaaacgcctctccgagcataacaatactgacaacgcgcgggtcaccctgtactaaaacacaggagtaaatatattaatcctgattcaacctctgtaagctaagtacgtgacacgcgccgccgtgctttcccatcgtcgaccaaccggttagtttctcgccgtcgccggtggcggcggcggcggcaggaaggcgcaggagtagtcgcacttgcacttgttgccgacgcactggccaatgccgcccctgtactgccgctggcagttcgccacgcacaagccgctgtcgcacgtcgggtattcccggttgatcacctccgtgcaggtttccagctgcgccgtcacgccacctgccatttcgttcaacccaaccatgcagctgatcacaagctagcctcgatcaccaaaaaaaaccagagatggatacaagctagcgccaagtattgcgtacctggtggtgatgatgatgaagcgacgaggacgatggccaggatgagcagtgctgcgtggatggccttcatctctgacgctgttgatttttttttttcacttgtgctgatcgatgctactgctaacggtgctagctttgtttggtggttatagtgttgtttgcagttttatttttggaatcacttactcaaataggatatggatagcaggaattaatcgcggtgtaatcccaggagtaattagcattgatatggtatattcgtttgcgctgatctttttaaagggttgtatagtagtatcaactaatggtgatgtatcggtgcttatcgtcaattttcacaaggaatggaaagcgcatgtaccgcgtgacatggagaacgtttggaatataaatcatcgaagagataagtagtaggagtaaaggctgcgctcgttctgcctgtcaaccgaaatttgcggtggcagtcaaaaacaagataagtcactcatgtatgattaatccgatattaattgttataaactttaaaaataaatttgttttttataaaaacttttatataaagacttttgcacgaaatacactatttcgtggttgttaacgaccaaatttggtaatatcaacatcggaggtgaagatgggatcgagatcggctacgactagaatcggctaaatctgaatcagactgggttaggtgatatagccgattccagcaatatgactcgtatccaacattgggtttgagttgatatgcttcaagatgattgctgcacgtgcatagagtcctgaaaaggcaattgtatctattaattaggatgttttatgtaatttccttagagatatgcttagggcaaaagtctgccgcaaagacttatggtatcttagagtttgttagagataatagtcgtgtccgatatggacatatcttgtaattctcgggtataaatagaccctgagccctatgtaaaaaagacacacacgttcaatacaatttcggcgcatcgccatctttttgctttagttttatttcgacgagttcttgctttcgggttgagctgcatcggtttcgatcttcaacaagaggtaaaacttgttatgacggcttgtgttctcgggattagtgcttccatctttatgatactctaatcttgtttacgtaattcgtcgagttatcatatatcatacataatctctggcaatatcgctatctaacctataatcggctaacatctgttagtagagggcagccgattaggttagattttgatgttgatttagattatataagaaatctaccactctatgaaacttccagcggcttgattgtctagatattgttcttcttttcatacttaatgctgcatcagttgagtttgatctattaagtcgtgcttagaatatcaatctctagcctgccttctggttgccgattagggtagtatcggagtttcagcctatcttatttgatttaactatattcgctctatatgcttcaatgacatgttaaatccgccctttatgtcaaagatcttattatatttaagtatattaagcttttatttgatatattatacttgttttaatatcctgatatagagtagtatcggagtattagccgatacatgctagatctatatgatcggctatgctataaacatatatagtcctgttattaatatatatttcgatccaggtgatttatactgtctcggcatggcgaccgatctatcccaatcacttgatttaaatatatatcgatataagaactatatattggtaatatctacagccaatcgagtaggtttagttctttattatctatttatagtcgccgaacgattcacatatgacatcggctcaaagataaatgatatgtcatcggcacttagccgatcggctattatttatagaattaaccgcgatttctttatttctatttcttgttgattgcaggatcaaatcaactggcacgctaacacacccaaaggcaagctttggacctgcactggagttaagcaaatctcccaggcctcgtgttttacgtcaacagtggtttgggaaatgtgtttacgaagaacaagtaagctaccgtatctaagggtgtgttcggtagtatgggatgtgaagtaatccctcccgcacgaaaaacggagtggcccattaacacgtgattaattaagtattagctaatttattttttaaaaatggatcagtatgaatttttttaaacagctttcatatagattttttttaaaaaaatacaccgtttaacagtttgaaaaacgtgcgcgtgaaaaaagtggtgagtgggttcccaactcgttttggctaacacagcctaattaagtaccgtttagaatacaacttaagtaagtgacacgcgtacattttagtagcttccattttttatatagagtaaagtccatcaccggtccctaaacttgtaccgatgtgtcatcccggtccctaaactcgcaaatcaaccgttcaggtccttaaacttgttcgactgtgtcatcccggtccctaaactcgcagatcactcgtttaggtcctccaagttgttcagttgtgtcaccccggtccctaaacaggacagtctaaaaactttatatcaaaaaataattcataactttttcatgtgaactctaatgaagacaaactttatatcaaaattgtagccctcgacgcgacctacaactttgtagttgaaaagtttttgaattaaaactgtttagggtcccaaaatattgttgcatgtttatagattttgcaattttgattttaaaattacattttgggacaaaaaatgacttaaaataaaaaaaattcaactacaaagttgtagatcgtgttgagggctacaagtttgatataaagtttatcttcattagagttcacatgaaaaagttatgaattatttttaaatataaagtctttagaccgtcctatttgacccagatgatattcaaatccaaatttagggaccgaggtggcacaactgaacaagttggaggacctaaacgagtgatctataagtttagggatcgggatgacatagtcgaataagtttgaggacatgaacggtcgatttacgagtttagggaccaggatgacacagcggtacaagtttagggaccggtgatggactttactcttttatatatattgccccccaacactactgcacgcacagaccggagtcctaagggaatgacagtccaaccgaaaaccaccttatcccattggacggctcaggccaaaccgccatagcatatggatccggatcgtttacagtctgttcgtgtgaagggcagtgaattaatgccatgaacagtgatgctttactataactatagggtcgaaaatactgtagcgcatgacttgatccttccgttctcgatcggacggtttacagtatccctaatacgcagtactactcatcctctgcgttagtacccctctaatgcagaagatatatgaattccatagcatggcccaggtgcctgtgcaggttcattgctgcgtggaaagattggtaagattaaacacgaacaacttaaattaaaaacagtccatctgaatggagcggtaactctttgaaagaaagaaatgattcttattcatcaatcattatatatatatacaggcaaaacaaagcaaccagtagcatcatatagttcttcaaaacctgatcacatcacatgtctatgtgagacgatcagaagaagaagaagacacgaagttctaacaagcaaagcttgatgtgcagtagcacatggacatgtataaacgtcatttccatatcatatcagttcgctgggaggcgggggcgacgccttgggcggattaaagccgcagccaaaggcgcaactgcatgtgttctcgtcgaggcaggtgcctatcccgtccgagtacgagcgaatgcattccgagaagcaccgttggcacggcactttcagtatcttccgcccaatgcactcgtccgtattcacgccacctgcacaaatggaggatcaagcggctctcgctcagggctctgcccaacaatttccaataacttttttttttgcgatgaacaattctgagaaaaaaaaactatatacagagaaaaacatacacacgtgtgtgtatacttggtgtagagatgatcaaattaaagcgtcttaaaaaatagtactacctccgtttttaaaagggactttactttgttagatgaatatggataaatattcggggaataaattcttttttagacgcaggtaacatatatgtacgagactacctgaatctgaaggtgttgcttccgccgcaagaacgacagcaagagcaaagagcagtgctagtagttggctagtcttcatctccagcaaacgttggccgagcgttggatcagtagttgctatcctgaattttgcttgtgtctgatggtgctctacctccggtagtactatatacagtgtgtgtaatggaggtgttttatactgatgttgtgtttaccatatcggaatgttattatttttcatgggataagatataccatcaatactttgattctaataaagatctaaaacatatgtttatgccaaaataaggcatgctattttacaccttatttatttttggacataaggcgtgtgctacctcttaatttatgattaggatatcactttgtgatacttcacggaaatcttacctcgtcatatttccacttcatctaaccttacatcgaaattcatattgagttaacggatatcgtcaaaacaagacaatggtactgctgaaaccgaactttaacttgagtcttggaccttgtaatagttaagcctcatctcaagtgtgaacctttctccacccccacgaccagagctcgtccctagctctattttcctctaaaattattgggctttatttaccaagtgtcatttatcttgtctcagatactcaatcatttagtccgcgattataaatttagaggctccaataattggtgtgttgatttgcagggtcaattaagtctatcacttcgatcacaactattttaagaagcatgtggtgattagttagctggtgataatacaaaaagatgagcttcccaacttttaccttctagtttattttctgaattttataatacatactctcataatctgaataaaatcttggactgttgagagaattagagattctgaaagaagccacacctattataagacaaccccaaatagggcccatatactagtatatctgccatcaagatcaaggatattccaatggaggaagaatggtgatgtggtatgcatctttaaatccatagaagatggtcaattgttatatatgtttcttacactcaataacttatcatgctcaaggattttataaagagaaattttatggttcttgaaaaagtacttcgaggcatctaaattttacactaaattttatgtgcctcgaggtatcaaattttatactagaaaatatggcaactccggtacttttttaaggataaaaaaattacccttttataaaactaaggtccgcacatcaagtatgttccttaggttacttttgaatttacataccgtcatttttactttttctgtaatatcttagaagtttacgaattttaaaattttaataagtttttttttgtttctcaagtattgcctgtgtaacatcatttaatttgatgaatttaaggtaatctagttaatcttttttttttcgcgtcaatcgcttttcatggtctgtctgatcctttttctttttctttgaaaactcagtccgatccattcatcttcggtgttagtgctgaagaaaatgacaatcctaccactaccaagtttaattgcaggacatggtggtttgtccacgaaaccacacgatcgattgtttctttcatgtgcgagtccagatcataactttaaacctttcatgctacttcagagttcaaaaccctctttcaaataaacttcagagttcatcagaatcctctctcagtgacaaaaaaaaatcagagttcagaagcagtaagaacagaaaatgaaaacttcagcgttcgatctcccattcctggctggattcatgcggctacggcttgcagcagtaggagcacttgcacccttgctgagggaagcactggccttcgcctacgcccttgtacgccgcggcgcagtccgcgtatcacttggacggctcgcacgcgcccctgtagatgaacgcggtgcaggtgtactccggcgtgcacttggccagctggccgcgaatcctacacaaacattgcagatcacaaggtcattgcgcagaagaaattactactactacacttcattgttgagttg

SEQ ID NO: 5416 - DNA, 19976 bp, Oryza sativa
acccctgagtcattacattcagagtctcagagacttgataatgcagtagtgtcctggtatgcgggaaggagacatgcagtgtagtactgaaatcagtgatacacaagctcacccacgtacgtccgcacgcacggccccaggaaaaacggggcacaagctagcagctgcataacgtggccagtatacaacgtccagtacagcagtagcatggactagtacagtagtagtactgtactgcaacaatctgactatttttttttggaactgaaatcatctgactgcgtcctccttttcatttcctttttctttaagccagaaagatctctgactgcctcttcgacaagaatgcaatgacgctattttctttgtgtgtttatttagctggtcaagtcgccgtcacacaaatgtaaaatactccctccgtccaaaaaaaaaaacaaaccctgattttcgtgtgtaatgtttgaccgtccgtcttatttaaaaaattataaaaaaattaaaaagataagtcacgtataaagtattaatcatgttttatcatctaacaataataaaaataccaaatataaaaaaatttcatataagacgaacggtcaaacgttgacacggaaatccagggtttgcttttttttttggacgaagggagtatacagtaacgtacgtacaagcgtcacacaaaggtaaaacatactgtaacgtacaagcaatatatgccccctacaagtgtccaaactgcagagaatctgcaaaactaattaattggtgcccagttcgccaatgtgccactgatcatgatttatatattgatgtaggagtactaaatgtgcatgctgtatcgggaaggaatcctatcgaaaaagataaaacaaaacatgccaagacactcgttatttggagtgtataattagggacaagctgggtgcatgaacgatttgtctcatccatgcatacgcgatcatatcagtatcatagtatcatgtggaacagggtcatgcatggcagagtgtgagcatgcacgtacgtacctctcactgcaacagtattcagcagagatcactgcgacaggggcccatgatgtgctccatcacagacacaggtggcccacacatagtactcggcgttgtgtgcccatactgccattgccattaacgccagctacgtacgcaagagataccatgctccccaaagccccccccccccccccctctattgttttcttgttgccctcctcctcctgagcttgtaaaccctagctaacacagctaatgctatagcagtgtgacaatttatgaggttttttacacacacatagctgctatattctcagtgatgcaaattttcccaaaccatacctatatacttcatccgttttatattataaatagtttgatttttttttcttagtcaaagtgctttaggtttgaccaagtttataggaaaaaaaagtagtaacatttacaatactaaattggtgccaaatctgtagttttgcaacattgtgttttgattctgaagtatataggccgagtttagttccaaactttttcttcaaacttccaactttttcatcacatcaaaactttactacacatacaaacttccaacttttccgttacatcattccaatttcaaccaaactttcaattttggcgtgaactaaacacacccataattttgtgatactctattttagatattaactggcgagagtttggttaaagtatttatactcatgtggaatttactatattcacaatgactacaactacacacactggtatatctctttctattcaccatgacacccatgagctagctagctactctgaggggttgtttagatggggctaaaactttttaatcattttcacatcggatgtttggacgctaatttggagtattaaacatagactaataaaaaactaatttcataaatgagagttaatccgcgagacgaattttttaagcctaaataatccataattattaaaagtttactgtagcatcacattgtcaaatcatggcgtaattaggctcaaaagattcatctcgcgaattagtctaaggttatgaaatgtgtgtaattagtctagtaataagtcccagttgagctctatggctggttagcgtatttaaggagggcagaggtgccatgtcgtcagggctactcccctcttttctctcctgtcacactcaagaagacttgtacgtcctggattatcagtggcctactgttgttggaaaagacatggggaaagaaatttgtcaccgcatgcagctgtgtgcgcttggatgcttgcatatgccacttgcccacaattatgcgcgcatcattccgcctagaagctcgaatgattgcatgataatgcgtattgtagaaaaacacttctcctctagctaggtactccttcccctcatatctagtaatctctcttcgttgccgatcaagaaaccatgcagggagatcaaagaatgacgaaacatacatttttgcaggtaagtagtaaaacccttactagttagttaacgctgcaagaacaaatgtatgcgtaattaatggatcagtagtgttagcatgttgatcaatcatcttcagactcccaagcaagttcgtgctgaattactacctgctgtctgaaactacgtactagctagctgacttgcaatctagacgaagacagatcgaagagctaactgcagagcaattgggcgtcgatctaaaactacctaataacctagcatgcggtagatcaattgtcaaacagtcaaagggatgaagccaagagaggcagagagcatatgttaagcttaccgtctgtcggcagtggattgttggacagtgtgaggtcgacgacgacgcgcggtgatcgatcgcaaagaagactagatcatcgaattgacaggacaatatgccgcatggttaaagggattgaagcctggtccgaggctccgagctcgccggaaattaggcgcctccagtaggaaaggagaaaccggagtcccggatgcctcgagccagacaacaaaccccttaacctaatccaagcaaatacacacacactacagatcgagacgccatggatgcatcggcttgcgaggaatgaagcctggtccgacgcttccacacgcccgagccggctcgatcgccggagaggaattaagatgtggatacctcgagccagccaacattccccacaagccaccatggccaatgaatttaatgaagaagagcacggacatggcgagccatgaaagagcagcagctagcagtgataccacatgctagcagcgcgttgcaatggatggatcgttgggcaagaaaggagaaggatgcgagggttttgaagaggagagggatcgatggggcagggaagcgaggacaggggcagtaatggcaatttatggtgacatgccccatttggcacagcgggtgccctaatgcccaataactgcgctactctacgtccagcccccggcctgtctttacgttgctcgagccagtgaagggctttgcagttctgctgctgcttgctagctgcgcgcatctctcactttcctcgctcagagagaggccacagctgactcactccactgctttgaattcccacaaaatgcctcgtgaagtgcaccccttctctccctagctctctctcgtctcttcagggcctggaatgtcttggacaagcttgtggtgaaaatttacttttcatctgaaattcagaattgaggaagtactcttctaaaaaaagttcagaagagatgaacggcaaaattcatattttcagaactgaggaaaagactactcttctaacaatgggctcacacgagatgaatgtcaaaattcggaaatgaaaagaaaaaaatggtatacttatatgcagtgatcaatacactttcaggacatgatcggtcggtgcttttaattctgatccgacctgagcatattcattctctttaagacagcattgaagtgcccttatatatatcaagagatgaggtatagctttacgatcttgtgtgtaatactacatatacagtactcctactgttcactgtttgtaagacagcattgaagtgcgatagcttaaaaaaagtgcattcatttacatttttttccccttaagacaagcagtgtatggagtccattttgcctcgtgaaatgaaccaatttagtgtaaattaaagtcagtggaatgtctgtgaaaggcttgtaggaagaaagccttcattaaaaccacaccaaatataacctcatctagtcacctgcgatctactagcccctcttccatgttttactgttctgcagttacctgccccaaaactaaaggtcttctacacacatacctctactagcagtagatagtagctcaaacttctaaacgttttccatcttggaaaggatggagaataggaatgagacttggatgacttgacgcaagcaagtgctacaagaatcaaaatgtcctttatgacaagctagctagctcgccagccaaaaagggcttgtaattgcatcaccgaaatgtcaacaccactccccgaaagagtattcaaaggctttctagctctgggttcttgggttcttcctgttcttgggttcttcctgtatatacacatgtatatgtctcagcttattcaaaaacatgtccatcaacacacggatacacagtgcacgcacgcatgcagtccacgcattttggaaaattcaaatttcaaaaatgaatgtgtactatatacatatacacataaactaatttgccaaatggtctgaagatcgacctggcctacattgtatattttgtatatacgtctagggctgtcaaaaaagtttgagactcacgagttgctcaagttctattcatcttaggctcgattcaagctcggctcgagctccagtcgagccgatcccaagcctctcttcaagctcacgagctttatcgagacgagctcaatcttccaacgagcatagcaatatattatttttattgtttatttaataaattatgtatcaaatatactatttgtaagtatcctataaaatgaagtattttgtattggcatcatatgtttattttattcattttctcttttattaatgtgatgaactaaaaataattaattttttaaacagattattcttgaaatatacatagttctacttacaaaccgaactcgatagtcaagctcgccccaagcctatctaaaagctggaaggtttcgtaggctcggctcgagcttaagcataggcaagcgagctcggcgccacgcctcggctcgttgacagccaatacacctaatactagcttgaaactgatcaagatgcctgtgtatatgaatgcatgtgcagttttgtaccacagtagcagttactctcagtcaaccttgcagtgttgaccaatgaccaccagcctattacacacaagtacacagtgcctttggcctcccacgtagcccgacagagcttgtgatgatcaccatcattacctgttgatttgctcagctcccactccctggcacgtgcctcgtgcgagagagccacagctacagctagggcctccacggcctgcagctagctagctagccactggctcgagcattctctgctttcctttaatatgagtgagaaacacgcgtgaatgacgctccggccccgtgccatcagcagtactcgcgcgctagcttgagactatatgcatgctacatgcaatgcttgcacgcttccgatctgcctaccttttgatctttttttgttctgaacgcttgcacatggtcaaagtgtacatgtacgctcagctggtacgacgtagctcccctattgatatcgttgctcatcacaagcaatgaaccaatcgtggctctccatgtatgtaaaaaaaaacaacgagaaaaaaacactatggcatttggcaggtgaacacgcgcgaggacaggcagagttacgttgcagatgcagacatatggaccggtgcggcggtgcgtcgttgccggctggtacgtacgtttgccttgcccgcgggaatgggcaaccgggcgcagcgcagcgctgcctccgcggattcgcaggggcgcgcggttccgtggcgcgcgcgcgcgcgtccgcgtccgcgtccgggaacgcgagagtgtgcctgcctcgcctgcgcggcgcgcggcgacacagcgggcagcgactggcattgtcggcgtggccggaggggtcggggcgcgcgcgcgcagcagcagcagcagcagcgccggggtgggccgggtcccgaggcacggcaccggccggacacgcccgttcggccgtggcatcacgcgttgcaggggcggtccagtggagagcagcagataccgtactgtgcgagataatagctgtatgtaaggtatgcctgcctgactgactgactgccttcaatccttgtaggtggtgtgacattatgtaatggactattccatttcttctcctggctagctagcttctcctcaaggaagaaaacatgcgtatgtccatcagtccatatgtctacacatgccatggaaccaacgctttctgatattagttgattagtattacaaaaacaatatccatttgaatatgttgttttcagaatttaccggtgttctttcctgcatgatgagcgcctcaaaatgtacgtagtgtagtaatattccccgtatttcgtggccaaaaagagagtgaacaaaaaatctggtgaatctggtgtgtttagttcgtgggtgtcacatcggatgtttgactgatgatggaaggggttttcgaacacaaataaaaaataactcgcctggaaactgcgagatgaatttattaagcctaattaatctatcattagtacatatgagttactgtaacactttatggctaatcatagactaattaagctccaaagatttgtctcgtgatttccatgcaaactgtgcaattagttctttttatctatatttaatgctccatgcaagtgtccaaaaatttgatgtgatgtttttggaagagattagctatataactgtcgataactttttagatgaaaaactttcaaatgtaactccactataattacaacgtagttacattgtaactagactatagttacaatgtaactggcacaaaaacgctcagaatcacgttgttgcttagttggttaacatatgcaccgtgagatcgtgggttcgatccatgccccaagtgtggatgtgatttttttaatctgcttgtgcgcatcttgatgtcgaataaggcctaactcgcaaaagaagtggacatcaatatgttagagaaaaaaaatgatgaatcaccgtccttggacggaaaatttagtccgttggacttggaggcgtccctcgcttacggagtcaacaaaaagttgatctcgagatccgcgtgcaacgtcgggtttgaacggccacgattaagtgacgatcacacgcgaccgaccggccctggcccacgcccacgcccacgcatggcgaattggcgatgcttgatgcttgcaagttggtgaaggattctcccggtcgtacgggctcttttcgcggtgaacgcgcgcgagaaaaagaaaagcaacggtttaactcttgtgcatggcttgtggaccatagaccacagtacacgtggccaacggctgttctactgctccagcatgtactagtgggtactactcctgccagtttcacatgcatgtgagcccctggtttcacccagaattttatcgagcagacggtgcacacttgttgggtgaactgatgatgaccagttgagtgtccattgtccatcaacttggacataaacatacacatgctgcataagagacaaaaaaaaggtgatcagtaaccagcttaccgagaagcgagtggttgcagcttgcaggttctgactctatcaacttgctaaaatgggggatcgattgaacgattccccttgtcatttcctgttccacgcacgcgcgcgctcgatcgttcgggccagctgctgcttgtatggttcaagccacatagccatgcaaagccaaagcaaacctctctgaactctgggtagatgtctccattatttttgctagctaggttaacagtggcgcataatgcagcaacgggacaaggaggtagccggaggagcccaagagagagacagagagggagagagttgagacagggtcatgtgcggcggtcagaagagccttggccgccgggtagactggcgctgtggcagcagcagcagctgcgcggcgcggccggtcaattatggacaaatgatggcgccggtgattaggtgaggggacgacgcgggccacaacgccagtacgtacgtcttcggcttcgatcagtcgcttcccgccgcgcgacgacgccacacggcgccagttaccagttggccgtttgggctttaggaaattaataattttatgattaagtttatttcgggcggtgtactgcttcctcttctcgcggccatcggctgctgaagtgctgatcatgtataagccccggcccgttgagaagttatgatgtacattgaatattctgggacggaaggaaaccgtggtactaaactcctcatcagtgacggaaattaaaccagcactactaaactttcggcactaccatccttaagcgtgtatataggaagacgcaaaacccctacttacttttcttcaagtccaatatacacattttgaaataattgatagaagttatcacggagcgaagatatgatatgaactcatggcgagtttacacggtgagtgcgcaaacttgtgacatgttcgcaatgttagcgcggagagaagtgaactatcgaagttagtggctcgtatatacgagaacttgaaattatcataaattttgacaatttgatcttttccgaaaactaattttacaaatgaaccgcggccaaaacttattttagaaataatcttttttatcagcaccaaatcgtatggcgctgaacgttattttttaaataagttttggccgcgatttatttataaaattagtttttggaaagggtcaaattgtcaaaatttgtgtgaaattatccgaatcgaagttaacagcggttagtcacctacatcgatctagatagtcggtgttgatctacatgtgcatactgactacaactttgtctcgttggttaattagctatccatccgcaatggataagcaaaagagtacgcaaggaggaaagaagtgagaggggttattaatttcgtctgcatccggtccagctagggcaatctaagcatggagatcggccaggtgaaacaagcagccggagtacagcccgtccaccgctgctcaccggtgcccaaagggagacgggcgtttgcgatgaagcggcacatgtacgcaggattggggacccacgcccacgcttgcgacatcgtcgtgcgcaaccggttcggcgtgtggtcacggcgaaaccaaaagtacatcaggaagacgcggtatttcaagttcgtcgcgctcggttcggcgatgtccaaggtgagacggaagctccaggagtggatcaagcagcacggcttgttaacgtgggctcagtactcggcgcggcgggaggagttggaggccgctgaggcaggtctgcagaagcttttccaccgtcgcatgcccgctcggtttaggaagctgaagcggcgagtcgtgaaagagcgcgagtgggagcggcgtctcttgttgaagaagcaggcccacgcggcgcagggtgcacccataacacgcgccctattcgtgtatatgtcttcatgtctagttcaactgttttactatctgagaagacttatgcttggtagtgtcacgcccagaaatttccgaatagaatttcaagtaaaatgtgcattaaaatccccgtccaggaccggccggggtacacaaacgacaaagttgacatacagatccatgtcttacaaacattataaaagtcttacataaatgcagcggaaaataaaaagataactggagctaagccttgacttgcaccgcagcgggaacaccactccacaggcatcctcgacggcacggacgaagcctactcggagaagccaccatctgacgcatacttaaactttggggttttggggaaaatagagcaagattgagtactacccactgtactcagcaagtcataccggaataggggtatgatgcagggaattatcaagggatagctataatggttcatttgcataaagcggtcatttataaccagaagttgaaagtagtaaacagttgtaataattaatcaatattaatcatccactgtccaacgctataccacgttgcaacaggcccaaccatccacctatactattcaattccaaaagactagtctagggtgagtctaatcacggtgaatctggttgaccgcccataaccgcgggcacggctattcgaatagttttactccgatcagaggtgtacaactgtaccaacaagacacagccccacgacatgtttccatgcgccgacatgccaccacgacataccggaaagaggccgtgacaggacccttcgcataaccccctctaaccaagcacaccacacttcaggtttcacccccactcctcgcaaggcagcgggcagtcccctctcgtgcctaggcgaatccggaagccgcataggccgtcgcagggcccatccaaactccatcacgcccacccttgcctggatgcgtcggctagaggaaagctacactacaagcccagccgttgcccacgctggcttgtggtaagtacgaggaattcttccagggtttcccgcgaaccggtccttaattgccatgggcgcgaccatcaaaatcatgcacccacagcccaccatttaatatattttaattaagcaacaccagaacggtggcactaatccaatcattaacataaggacctacagtctatacattaatatgatttcccccattgtgtgctagttgaactaatcatggctaagcactccctagtccaatctctagtcatgttatatcccaagctaacaaaggaacatggtacaaaatagcatggctatgacagtaggtaaacattccacagtaatattataaaacaatgcagtatttgaagaaaaacaatagagcatttgcaatataggatcaacatgttcaagtgacaagcatgacttgccttgctctgctgctggaggaatctcgacgactatctcaaagtacaccggagcgtcgggagagccggaatctaagcgacatacaaagcaaataatacaaacaggctataagactactgaaacagagaacaaaaccatttttaatggattctacacatttttcttgatttactgagacttgaatggacttaaacggagctcggatgaattagttatgatttttagaagattctctgtgtttttactagtaaagaaaagtccttaatgaattattgcgcaataaagcatcccagggctgacgtcataggggggcaggcggcgccgacatgcgggccccacgggtcagcggctcgagagagagagggaggggcgccggcacgtgggccctactggcagtggcacaaggcgggagggggtgcggctggcaggcgggccctaccggtcgcggctccaaaaaggggggggtggcgagacgccggccgggcccgacatcaagccggccggcctgccatggcaagggcggcggagcgcgcgcgtcgccagcgacggcaaccggcggcggaagacggcggcgcgaaggcggcggcccgacccggctcggcgctaggagggagaggaaggggaaaagaggaggaggggcgcctcaccatgagttggccggcgcgggggaagacgacggcgaacggcgacggcgacgaccggggaaatgacggtgacggcggacgggctccgagacaccctaagagagaaaaagagacaggttagagggagagagggagtccatggcgagcgggaaccgtggccgacggcggcagctatggaaaggctcaccggcgcacggcggacggcggcctccgatggcggaattcgacggaggaggggtggacgaggtggagctcggccacgcgaacccgacggcggcgacggcgtggtgcggcggcgaccctagcggcggctagaggcggctggagcaatgaaaaaaaggcggcggcgggtgggagcacggtgcgggagcgatggggagcttgggagaggccgacggaaaaaaggaaaatgaggaggaggatgtggggatgaattatataggggcggagaggtcgggaacggccgggagtggctcgatttcgccggagttagtgggggaagttggaggtggggagagagagagaggcgggattcgaatttgaatcccgaccatctcgtgacgtgggcgcgagcgggagtgagggcgtggacgcggggaaggcggggcgtgtgggggtggggcgcggggaaggcggagaaggtgggcggcgcgcgcgtggcgtggctgtcgccggctcggggaggcggccggaggttggggaagggactgacaggtgggccccacctgtcagcgcccgagggagatagggggaggcggcctggacttcgggaggagaaggggaagcggaccggcccgatatgggaaggggcgcgggaggaggaggaaatgggccgacagcccatttggggaaaagaaggggaaaaaaggaaaaaggaaaagaatttccagggattaaatattgcttgtgctcaattttaattggttaaaattatttctagagctctgaaaattccactaaaaatcttgttagcgtatttcgacatgtagaactcaagaaaaattccacatgccaaatccgattattatttgcattaattcattagggttttctcttgcttttacaccgatattttctctggtggattataaattcaatttaggcttgggaaagaacttcagggtgtgacaggtagcttgtgaagttgtatttggataaagtgaagacaattaatgtgtgtatttttctatttcttggtatctccaaaaaaaattatatatggaatagtactacatgtaaaatctcatttacaactagaattgttactataagagaaactcttctttaagagaagctaatgttttttttttttccataagggactttctagaagtacagtttgttaaatgtatacaactacaatggtcgacgttccagttcgcatgcacacccagcagcccagaatgaattgaacccgtggtcggcggcggcgcatcccgccggcaagccaaaggggaaagtttcaccggagcaaacgcaagaccgattcgtcacgggctcgcggctagggcatcctctagggttcatgataccatttcaagcatcctcatggcatggcgcggcgcatctaggtggccaacggcgaattagcggcggaaccaggtgaacacgagtgtggggaaatatggcgagcaacaagacacagcggtaagctagctagctagtagcctttggaaggtgtatgagctagggaaaaaggattgggagactaccgagacgaagggcgcgtagtgaagaaatgccagcagagcggaagtaatcttccgacctcggcgcgaaccaattaaggtcggggtaagggaagacgacctcgccccagtcgccaggaacgcaccggcacctcgggcgagccacgcggtggacgagagcggagtggtggaagcgatcggcgagctctagggatggtgaaggagtggaagctaggagggagaaagagagccctggggcggctttcatagttcatagagctatcggtctggaggagaccgagccagcggtgtgtgccgagcttgttgtaaaagttagtcgatatagtggaacgacgactaaccttcccgatcgtttcagtcgttgatcgcccaagacatgccagatgacgacacaggaacacacgatatttgttaacgaggttcagccgaagcctacatccccggggctctgattatgggcgctcctccccaaccaacatagcacctagccgctacgagtccatggccacgccgccatcctctccctgcgtgtctacgctacattgtagtcgtcatggttacatcgtggtgcccccctctctatttaagagagttgccgggttacagagtccaactctaactccacccctaacacctattacaactccaagtccaactgtaaccaaataggactagtatattcgacacctattctaacaaactccaccttggaaaatatacgtcacctagaagtagtagaatcaccatgccgatccacctgtcctccagacttggattatttccttttgcagcttcaccacgagccgcccgacgagcgtacaccagactcaccgtcttcaagagactccactctccctgtaatttcttcctcttgactccacctgcaacagcgctccgccttctcatctatcatcacggtcgtcttgccaagcgaaattggattccttcctagttgtcccatcatagactccccaaagaccatgttcacctccacattccgtctttgatttgattcaatctaatccatggccagataaccaatgtcatcactaaatagacaaatcaaactcaccaggcatgaagaactgaaccctttcttccttgttgtcttatgaaccaagctaacaaatccaacatccacgcttcttgcatctgtagactgaatccatgatattttgagaaaattcaccgtcgcctcgaatcacttgaagaattaccatgatagccttcgctcttactccttcagtgacgcagatttccatatatcccatcatgccgacccgcatattctggatatatcctgtactgccaaacagtatcgttgaccccatcaacgatatttgacccgatgttgcccgggacttctcgcatagcaaaccacccgtttgccactgccgcaccggtccaaccaatctgctacacggccggtctacctccgtcctgcttctggttcggtccggccaacactctagcatactccttgttcctgagccatacctcgccaccttgctgagcaacctcgtcaccgtgagactatctctacagagttcccaaggagccttctcgccaagtcactattttgcgccgatttctgccaattttgtgccatatcgaatcttcccaagccagcttttaccattgcccaagaaagtcccagtcaaactgaattccaaacaaccgagtctgactctgatggacttatgcaatccgattgcacaacttgactctaatggccacagaaaaagatacaactcagccaccgtgtccgcctagacctctgttgcgttttcctcacgtccaacttcctctcagcaaatagcttgccacaccacgctcatacacaaattatgcacctgcttgcatctagcctcccatgcattagggcctttttctttccgcttaggatttattataatccagcttattagaagtaagctgaaagaaacaggaagattatttttacagcttattataatctagatgatgggttattgtaatctaataagctcaccaaagggagctttttctggattattagatggcaaaagacccactgcccctgattaattctaattatttacctgaattgccaccgcgtaccgcttcgtttctttttttcgttgaccgtgtgaccgcttcgtatcctgcgcgggagtcgcgagatcccctttcccctccactttctcttcttccaccgagaagatcggcaggcgagggggctgtgcgacggcatcggcctaggcgagcagagggcgtccggtgcgcggcagcagcgaactcgggggcatgctgcgtgcggcggcgaggtccatagcccattccgacggagatggatcctgcagatggtgaggactccctctcgaaagcatttcgataccgtgatgatgtggtgaataagcgatcccaatcaggaggcaaccatggcgtctctggcctacatggctccggcagcttctctgatggattttggggcgacggcgtcggcgaagatggacatataggcgatcttcatggctcacccggcgtccacggccaccatgtctcgcctgccccccatggcgccggcagttctggcggatcacccgtcttccatggagccggtgccgggcaccgcgacgccactgtgttccaagcggtggcagatgtgtctccccctggcagaggccgtggacggcgtggcgggcatggtggtggacctggacgtggtaagagatcggccacacaaccttccgcacgtggtggccgaggaaacaaggtgccatacaagccaccaaggccatccagcagtgcaactgttgtcggcgacgccgagggagcagctggtgtagacaatgacttcacagaagaaacaatggacagtgcgcctcatggaatggtacgtctacttcatttctctacttcaaaaattaaggtttaatgcatttatctactgcaaggattaggttgaatctaattgaatttaacgtgtatgtgtactacatatgaaaaattaatgtgtatgtgtctatgctaattggtcatgtatttaccatttctaatatagaaatacttgtgaatatataaacactagtggtgtaaaacaacatgtaaatctgaaccttgatgtgtttgatttatcaaatagaaggaggagcttgataaagcagattggtctagcacacacaataggatattttgtgaactatgcgtacaacaaattgaagacggcaataggcctatcgggataatgactactagatggtaccagatcatagccaaaaagtacttccaaaagacagggctaagacacaataagacacaactgaagaaccggtgggatgtgctgaaatccatgtacagcttttggcttggtctccttaacgacacagggcttggatgggatcatgcaaaaggaacagttgctgcacctgttgagtactggaaaaaagtcaccaaggtaataattcatgtctcatgtacatgattttcatgaaaatgttttaagtgcttgcaataattgaagatttgatgttttatttttagggacattctgaatggaagaagctacaacatggaccaccagaatgtttagaattgctggatgaaatgtttggtactattgctgttgatggttcttctgcttgtgcacctggagaaaatgctggaggggatgatgcaagtggtgatgtacaggaccttggcgacacaccagtagattgctcattgggtaaaaaaccagtgaagcgagggtcttccagcaccgccactagtccatacaagaaggttaagaaccccatggttaggataatgaggaatattcaaaccactatggataccaattgtgatattgccaacaaggtgatgcaaggtgaatttaggttcaattccattaaggaggtgatggatttggtggtggattgcggggcagcagaaggaagtgcggagcatttcatggctacaagattatttgtgaaagctgaacatcgtgatatgttcaagactcttaccaccaaggtgggaaggctctcttggttgcagagatggtgcgagaaggaagggcagcagtagaaaattgctaattatttatatgcatgaactagttatctctgtttttactttgtcagacaatatgtattagcaagattgctacttatttattcgcatgaacttatgtactgcctggccatgtaatatggcgccttaattttgattggatgaactactgtttagtgatccatcaacatggtctttctgtgactattgaggtgatatcatttgttgcattgtttgtagatgggcatgtatggaagtgatgatgacgatgaggaggaggatgaaactattattgttgctagcagacaactagatatgatgagaaaatttggaccggtgttgacatcatttggtatgttctacgctgaaaattatttgaacaagtccaagtatagaaaagctaatttagcgggtcatgcttgggttatgagaaaccttgaagttccacaagattgttatgacatgtttagaatgagtaggccactctttgagaggttacataatttgttggtctcatcttatggtctgaagtcaactagtaagatggattcagttgaagctttagaaatgtttttgtggaccattggggctccacaatcatttgttcaagttaagaaccgatttgagaggtcaaaaggaaaaattagtagaaaattcaatgaagtgttgcagagtatctatctcctttcaaaagatcttgtcaaacctagagacccaaacttcacaactattcacccaagactacttgatgatcggtttgagccccatttcaacaattgcataggtgcaatagatgggacacatataccagtagttgtgcccgcatcaaaggtggttcaacatgtgggtagaaataaatatccgacgcaaaatggcttggccatttgtgactttgacatgaggtttgcattaattgttgcggggtggcctggatcggcacatgatatgagggtgttcaatgatgctttgcgcaaatatgccgctatcttccctcatccaccacctggtaacttctcttatccgtttaatagtctcgtcgaactagcatcaattataaaataatgtctcatggtttatgtttatgctaacagggaaattttaccttgttgactcgggctatccaaatcgactaggatatctatctccatataaagggaccaaataccatttaccggaatttcgagagggtccacgtcctagtggcaagaaggaggtgttcaaccacttacattcatcgcttcgtaatgtgattgagcgctcttttggtgttttaaaaatgaaatggagaattctattggacttaccaagttatccaatgctcaagcaaacaaaaataatacatgcttgcatggcgctgcataattttattcgagatagcaaattgagtgatgaagagtttgatctgtgtgataatgatgaaaactacatgccgatgccttcatctcaagggaatgccagtcacatgggagacgaagatggggacgcaaatgccttccgtgatagtattgctgatgctttatttgctaggagataataatttggttttaagtctaatatatatgtggaagaaatattcatgaatgtataattataaatatttgtcaaatttttatttatctacatcaaatttatatctattgtataaagtcaccgaatgatgacaaaggcatccaaaaaaatagttgagggcattctagactttagccatgcaaactcaataatccaggtttccaataatctagagaaagaaacagctcacagcttattttcctctagcttataataatccagcttataataatctgactcaataagttggattataataatcctaagctgaaaaaaacagggccttaatctcagcactgtaacatgcagcttgtgcatatgcctgacgaccaccatgcactagccatcctatattttaatgcatgcagccatgatgattgtatacaaatcgtgccgcatgaaagtgtcttctccgatccatgcgatttgctcgactccgttcaagttgtacgcaaagaacagcatccgtactgttcgtctgtacctccgcacgcaccgcagtcgcagccctcgtgttcaccgtctacgaccccgtcatcatcggccatgcacgtccgccgcgccgcgccacgctcgccggcttcgcccttccatcactagcctccctgccgccgcggatccgcgatcgccgcgtgcgtcgggcgcgccgtccatggcgctacccctccgatctctccgaacgccttcggccacgcccggcctcgtcttccagtcacgctccgccatcgtcggtctgatcgcgagtgaggtcgtcgcctccgcaacgtcctcgttgtcgccatcgatctcatcgccatgactgacgatctcctgtcgatgcacgatcctcacctcgtgtttcctcctccacatgtcttctcgatccaatactgaaaccttctgctcgatgggt

SEQ ID NO: 5417 - DNA, 49387 bp, Oryza sativa
ttttgaccatcaaagttcaaagagattttttgattctttgttaataagtggaaaggtggaatctaatttcaaagaataagctaactcttgtagaaatcttactgtatcaacaacatgttatctctttccataacatataattaatcatttactgtaaattaagggcatgttcaaattgtaaccaaaataaaccttaccaaattttggcattgtcaaaattttgacaattttacaatattgccaaattttggcatgatttcttatttatttactagagtttggtaagaaactaaatggatgcatatatttagcaactttaccaaaaaaatggtatggcttgaaatggcattaatctgaacaagccctaagataataatgttccctttgacatcactacctaggctgtgtttgattctactggttgggaactcattccttctgcacagaaaacggagcagttcattagcgtgtgattaattaagtatattagttttttttcaaaaatggatcaatatgattttttaagcaactttcgtatataaactttttgcaaaaaaaaacatatcatttagcagtttgaaagtatgcgcgcggaaaaagagagaagtgagttaggaaccatgggtatcgaactctgcctagtgttacatctacatcactactccttccgtaccgaaaaaaacgaatctaaaactagatgtgacatattctagtacaatgaatttggacagaattatgtccagattcgtaatactaggatgtgtcatagccagtactaggttggggcctcatcggatagaggtatgggctgaggcttttcagccaaagcccattgaattgcttattgggctgaggactttaagccgaattgcttattgggctgaagactttaggcctcattaagccaaataagctaatcaatggcttttctttagcttaagaagaaaaggcaactttggcttatcagtcaaagctctagaataaccgatgagggccttggttttttatgggacgaaggaagtacatggatatatactatatcaaagattagccatataatatccaatatatataatataatctttcatgttttccttactactaactgccaaatactgcaacagttagacacatcatacatgactactcgtgtactcagggataaatggctaacataatttatggtttcttactaatatatttttctaacctaaatgaaggaagaaaaacaaatagaacagtggtgagcagggtattgcaactagggacatataacgtggaaaccatcgaataattgaaaacccgtaaaaaccgaatctacaaatttgtgtaaattcatggaaaaaattgctactacctctattctaaaataattcaaactagataaaatgtgacatatttatttatccggatatattgttgtagaatagataatattactagggccctgtttaaattccaacttttttcttcaaacttttaacttttttcatcacatcgaactttcctacacacacaaacttctaacttttccatcacatcgtttcaatttcttcaaactttcaattttggcatggaattaaacacaacctagaaatagatatatgcatggatagattactagaaatagaaatacatatataccttccttgttggtatgaatgtatttcatgcatatatttatttctaataatctttttacgaactagaaaggtagccctcacacgtgcgtgggttaccttatttaatgtgcgtaaaattttattacgaatatctatgggtggatgactttgtattaaaatattcttttactatatctaaactaaaactaaacatattttaatgtgctctgaacgttggttacaattttcttctagttataaccttacaatacatatataaattctaaactaaaattacttgaaaccgtgcagtgttcaaaataaataaaatgccctaactaaagctccgttcccatgctgcaggcctgtttgacacagctccagctccagctccacccttcgtggagctgaagctcagccaaaaagtgtcagcttcattcaaaatggaagcggagctgggtggagttttctcacaaaataaactggagttgtggagctgggtttaggcagttccataactctactacagacccaacttctgaagctaaatttagaagttggagttgtaacaaacaggatatcaacgcgctaaggaactgtcattaggacgtgccgtcgagctgtctctttgagatggcaccggagcaaggagacactgaggaagcctttgtgagttgctaatattataaacagaaaatggcatacctcctgaactttctagaaacatagctggtaaatgttagtaaaagaaacatcgctgtaataaaatagaatccagaaactccccagatctcactactgaatagtataaaaatcaaactcaaaattccaaaaaaattctcaaaaagtggaggcgaccagttcatcctccgctcgctgcacacccgacccgctcaagtgcggagacccccccccccccccccccgcgtcgccgacggccgacggcgatggacggcgacgaccggcggaccccgctgctgggcggcgagggcggcagcacccgcccgccgtcgctgcggcgccgcgactcggcgcgctcgctgcggagcaccttcctgtcgcggctgcccgacaaggtgcgcggcggcggcgaccccgagcgccccgccgccgacgtcgacctcacccgcgccaaaggcctctcccaaggtagtacctgatttcctcgctaagctcgcgcttaatccatggaggaaagtcgcaaagctttgttctacacttctacttagtgaatagtagaagtgattgcttcttcccttgtgagtaggtgaaaaggagtactatgagaagcagttggctacactgaaaatcttcgaggaggtggaggcgctgtgcatgcccggcgaattcgagtcggatgccgaggtgctcgagctcgaggacaaggagcagaagcagagcgagtccgccatgaagatatcaaactacgccaatatcatcctcttggttttcaaggtgaattgattttgatttctcgcatcagggtagcggagtcaagagtcagagtgacaattgatcgttgggacacggatgcgaaaggttgagaagcacagtttgaatgatccgtttggttggcatatgcaggtttatgccacgatcaagacgggctccatggcgattgctgcatccacgcttgattccttgctggatttcttggctgggggtatcctttatttcacacatcttacaatgaagagtgtgaacatttacaagtatccgatcgggaaattgcgtgttcagcctgttgggatcatcgtcttcgcggccatcatggccactctaggtgtgagatccacctccattaggagactgatattagtcaactgcaatttgcacgctagaagtttagagttatgaatatctttgcattctttttaggtttccaagtcttgatccaagctattgaacaactggtggagaacaaggcgggagagaagatgacaccggagcagttgatatggttgtactcgatcatgctttcagcaactgtggtgaaacttgccctctacatatactgcagaagctcagggaatagcattgtccaggcatatgcaaaggtatacctgccttgactatataataatcaattttgaagcaattgcagaagagcgtcacttgatttattcgaacgcaagagtgaaactatgaattgccttattgaaccggtgaaaactttgctgctctaaaattcagttgcctttgtgccgctcaggaccattacttcgatgtcgtaaccaatgttgttggtttagtggctgctgtgcttggagataagttcttctggtggattgacccagtaggggctgtgctacttgctgtgtataccattgtgaattggtctggaactgtatacgaaaatgcaggtttgccctctagatttcttaatacttcgctcccctttttttaaaccagctcttttcgtttttttttaaccaagtgagattttttcattagcaaaagagtgaaactgaaacgactcataaaagaatgtgaaccacttaacaaggaaaatgatgtttagagtttaatggcagattgctcggcctcaattgcaccagttgtcaatagttttggcaccacaaatcttgacagtttgtggttgtaaatctttatgcagttacactggtgggtcagtgtgccccttcagatatgctgcagaaactgacatacctcgccatgaagcacgatccacgtgtgaggcgggttgacacggttcgagcttacagctttggagctctctactttgtcgaggtcagccattgcagctattcagaattacagattctgcaccaataagtttgttttttttttaatttttcgtgccactccatatcttcctcatgctagccaatacaacttaggatatttctgataatctgaatacacaggttgacatcgagctatctgaggatatgcgcttgggtgaggcgcactccattggtgaatcgctgcaggacaagatcgagaagcttccagaagttgagcgtgcttttgttcatgtggattttgagagcactcataagccggagcacagggttcggagcagattgccctctactgagccttgagcccttgacagctccagttttactcttgtgcagtgtactgaaattctggtactgtagtacagtcttccactggtttggtttgtcgctgaggcagcagaaggcttatggttacacgtacacggtgacggtaggtcggtagctggcttttgggtagaggaatctgtatgtctgagtgaaataatactggattcgccatttggtgcgtttccttttttgtttccttttggctggcctgctttcttgcttcgtaacttgaccaaaaagttctggccgtcgcaaagagctggaactgtgaatacattttctactgcataaaacgttacacgcatcatgcatcacctacacggttacacccgatagaattcggttacagttcaattacaaggcactcccgagtcccagaagctagcacgtcgagcagacaaaccctacagataaaatttctcctcgccatgcttttaagctttacgctaaccacatgcttataataataacgagcattgccgcgtcatttccagattgaagtggcagtgaagggcaacaaaatgatcatcaccttgctgaaattagtgggcagcagcaaccatagccgtgcgagcacccgtgaaagttgatatcagcgcccccagctgtaacttgtcattgcaagcaaagcttagccggtacctgcacacagacgccatgaacaacgtgccatcttaagggaaaaggccataaatggttatactacctacctttccaagaagactaaaggctaaaaatatttggaatatttcataatattaatcagttattatacttccataagtattccagatagccaaaggtcaactttaggtaattgcatcatgaaagcaacccaaagactcattttccccccaaatgcaaacattccacaaggcacaaataagcaattccaacatgtgaggtttgcttaacaactattgctttgcagtatgcaaccatttaactgtaatggctaaattgtgaaacacatacaataaagtatgttagctggtttaaattatttattattatttttcttacgtaagatactccatactagttatttgatgtgatgacataaatgactatcttgaagcatataatatgaataaatcagcaaaatgttccgtcaaagttttgaaaaaaaagggtactgagtagaaaatcagccaaaaatcacaaatgatttatgatcaaataaaatattatatgcaagttctaggtgaactaagcaaggcacactaaatttgacaagtaatcaactttacagctgaaaacaggacgtactcgatatcagccagatcattaatcagctttatgcgtacatcagatggcatctgtattttgaacacaaacctgcaagaaatttcttttgcgtattaggagaaggttttagaggatttgaggaataagaaggtttagagaaatatagggcatgaaagagggcatacatagtgacctcccgtatgatatcaaccaaggccagtccttttctcatcttcatatcagatatacctgaagcagataggacagtgttttcacaagactgacagcaaagaacaaattgcacaattcatgtttaaaccatgaattgtaattgttaggagtatgactttgataattaagaatacatttgaagctggttgaaaatgattcattcagcaaccagtatgctatctgttcaatgtctttcggcatggggtttcctgtgcaaaggtacacagcttcctctgttatttgcttagatgccatgtgtgttgactgcacataaaaggtaaagcaaatcagtgtaaaacatatatatatatatatatatatatcagttcattgtacaaaaacaattagtataacaaaacaggttttaatggtttggttgaataatttacaggcatctcacaagtaaatgatgtgatatcattgccaatatggcatggattagctaaatctagcatcacatgttcttgttatgaagtgagggataagtatggttcatccagatctatcttaacaggcaaaattttcttgtctattccaacacaacccccatgcacatgggcctttatgtttttcataaactaaatataatgattaatggttaaaaaaaagtaggtaaagaatgctcagcaaacgcttattcacacataacctgcaatatgttcaaagccttcctcatatcaccattacttaaccgcacaagggctgtcaaaccaccgtcatctacatcaagcctgcaagaacacaaagatgtggcaacaaaaatttagactaccacatgaagatagtgacacaatgatattatttcaaaacaaaaccaactgaattctcaagtctcaacagtcaacatgagcaagaaactttacaagagaaacatatcgaaggttctagtataatctgcaaaggagcattaagtgcttacccctcggattgtattatatgtttaagacgttccctaacatgagtgccatcaaggggtgcaaatctaaacctggtgcaccttgattgcagtgctggaatgattttgttcacatggttgcatatcagcgcaaaccttgtgctccttgtatgcttctcaatgactgtaagatgggggagattagaagatgtagctgaaagaaaaacacagcaatattgtggtgacacaatgagaaactctgaacaacagaccaacctcttcgcaatgcaaactgtgcatccttggtcatggcatctgcttcatccaatagaaccatcttaacagattgctttgctctacgcaagataaatatcagatatatgacaaaattgaattaaattgtataccagatctttagtaatgcaaattatgcaataccagtagctccaataaagcataagaaaacaagcataaaaaagatccatgagacaatatgcaacctccatgggattattggctcacaagatgactgcataatgcatgctaattacaacaaagtatgaccactcatacacaaacaacaggaatactctctcaacatgcatttccaaacccacgatagatcgtgtataggtaggtctaggaccaacaaagatcaaatctggtatatgctaaaacacgttcccccttattagaaagaaaatactactcaaatatcttcccaaaataataacatcaaaaaatgtaaagcatacccgaaagagagactgcgggcacttgcgaagtcttggatttgctgccttacaacatcaataccacgctcatctgatgcattgagttcaagaatcatgttgccatactgtgacccatacaacttccttgcaacggccagtattgtcgatgttttcccagtgcccggaggcccataaagcaacaaatgtggaagcctgttctcatttgtaagcctatcaactacaatataatgaaatgacacaaaatcatcagattagcttaatggtctaaatcagaaattaataaataggttgaaacagaaaaaaaaatcgctatttacttctaataatgtgtcaaaactcaacaacccaaaatatgtgacagcttacaataagctaaatttgggagagagagagagagagagagagagaaatatcagcaggtcattatatcacatactaaaacagttcctcactacctaaatggctaaatataatacagtcacacaaaacaagcagaaaacccaattgcatgactcaaatgaccccaggctcctaacaggatgcaacatagaggaacaactaagacaaatatggtgaaaactaaccatcacaattcatggcaccaagttaacaacagatcacaagctggagctcactagcacgaattgccaaatcccctgaaagaccaaatcaaccgccaaatcctaaatgtggagctggaggggagacatgagtgtagaaccacaaaatccccatcatgacactagcaaatagatagtgattattcacaaaaacaaaatagcgatactacctacagaaatcccgtgggctcgcaccacctcgccaataaaggcaaaacaacccccaaatcagtaacccaatcgagtcgctccgctcctaaaaccctaaaacgccgagcggcagccaccgactacgcagtagctcaatcatcggcgcaggcgaaaccaaaggggggagcggcggaagcttactggtgtcgacgatgtcgcggtgggcggcgacatcgccgagggattgggggcggtacttctcgacccagggcgcggccctaccgccgggagtggaggagagaggcgccttgcccttggcggccgcccccggcggcggcgcggcggcgtcgatgtccatcggagtggcggcggtggctcccgccatggcgtagcgcagagagaggcggaaaccctagagctggaggagggaatcggggggaatggttggcgccaattcgaaacccctctcgcggcctcgccttggcgaggggaagaaatggaagatggtcaacgtggtcagcgatgcggaggagggttgttatctgggccgattatgggcccagcccatttagccgctgcaactgggccttcgagagtagaattaggggaagaggttaattaaatttccaatcaccatatgtgaattcgaattgtcttattcaaaaacatgtgagttcaaatttgaagtgagtatagtcagtttagttcaaccgtttttaaattagcgaaaattggctattataactcatgattagtgcagtgcacaagctgaacagccacgctagaagccttatctgaacccatggtaaaagacgtgaacagccacgataggggaagctgaaagtgcagatgtgtgaagaataatctgtattcttttttatcttttctgcttttcggcaacatgtatatatacgggagtagacggccgctgccccgcaccgtcattagcgcagaaagcagctttagccgtccatcaacagccgaaagaagagagagacggtgccaggttctgaacggaaagtcaagaacgagattccatcttttctgtcctttattaatcttttccatgctatttcccatgtttgattaattaacatactgataacaaacggcacatttctgtcggtattgaggtgtttgtttatcaaatattctggtttggtatcggatcttcagtccttttctaaagaagtgtaccgcactacttggccactgttgccaacatgatttacatgccaggcttgtgctcactgataattaattaaggagaaaatgctctaaaaacgtttagcaaactgatctgggtacagtcaacgcagttagttaccaaactggtcgaaagttgcgatttgttcgtctgagaaaaaaataatatcgacttgattttgaactgttctttatttatagcacacaatagtgtgtcagtgtcacagtatgctgctgccattacatttacatccaagattaattgatactgtagttattaatgcctaatagctcaagacaccagagtccagacagtccgggctccaatgatcatgcagcaaaaatatcccctacctatcattttccatttttcctcttctccagcggtgaagccagtgatgagtagaagtaacagagtaactatactaaaatggagcatacatggctcggctaggtttcatccgtggaatgaaccgattcaaagttttgaacctgcacctgctaatcgatcgatcgattgatgatctttgcaaatttcattgctctcgtcggtgatctcggctcaccggcggcggttgacgagcgggaaccaccaatcttggaagcaagactggtaggagatgagcagcagcacgagcgccagcgccagcgcgacgccccacggcgaggagccgtcgcggcgctggtcgtaccagccgccgccgccgccgctgtgctcccctaccagcggcgccatgagcagcgacgagagccccgaccgccgcccgccgccgcccgcggccgccgcccagtactgcatcgcgagcaggagcagcagcggggacaggacgacgacgacccggacctggtcgaacaggctctccaccgcggactcgcaccgcgagtagagcgaggcggcgccgagcagcgacgcggtggcgaggaagatgaagaggtggaacgacgtccccgccccgtccgccgcctgccgcgcgtcgtagcggtaggacgacggcgcgccacggtcgtcgtagtagccaaggctcgccatgtctacaaggctacacctcctgctgcgctgctgttcttgccggcgatggacgaaagtccgaagctgcaagggagaagacgagatggctgctggtttatattggcgggagagaaaggaataacaacacttgcgagagagagagagagttgagctgcgctttacttggcgggagggggattccgcgattccttcacgagggaggtgaggtgaaacgcgagagcggacgaaccgcgcggcgacgcgtgtgccgccgccgaggcgtcgaccagtcagcttgggcttggaaagcgtcgcgcctctattgtcctactactacgagagcaggtacaatatcagcttataagcaagctccaaacatattttaaaaagataaaaaaaaagcaaagtagcgaactatagatctgtagctagctgcgcatgaactctaagatgtaatgtgtgtatggcaggtgggaccagattctaattttatagtaagcgactattatatgaattcaatattttattggttataaataatttggagctagtagtggactatagtcactatactattaaacttactctgaaaggatgtgcctttttgttttggaggcacttggcgagttggcgaaaaggatcttttgcgatgaggcgatgaccatgccacaatggcatagacggtgagggcaatggctggcaagttggaaagcttttggagaacggtgcgggtgactgggttgagtatggtgatgaggcctttgttgcctacgggttacactgtcacttgcacacttaactgtgaaaaagaacccaatggtccagtcatataatcaacgttaaagtacacaataacacatatataaaagttttacctaaaaatttatttttatttttggtttattagggaaaaagccaacgatgagagcctgaaagagaagtagtctcctatctacacccaagcaacaaagtgaagctttgctcaaggattagtacagcgctgcctatgaactacagtacataggacaacaccaggtgggcctttttttgttgaaaggccatcaggcagcagtttggttcctgcatggctgcaccggttgatttacgctggctttgtcagtggtcacccgagcgaggtaactgtgttggatgcgtagtactatggcctgtatggttcatgggcccggtattgtcggtgttactgcgtcccacccgactatcattttgctttcccagtatcaccatcactgttcttttttatatgatgttggttagtccatatatttaggatggagttagtaacatgccagaagaggtgcgcacttcaaggcaagaaaagggtatgcatgaaggtatcaccacatgccagcaataaaagatcatcatcctcatgttgcatcgcgaattctgtttattgaaccaaatgaaggcagggctggtatcaagtatgagcattgtatggaagtaaatggagcaggtatgatatgacaaagcaaacgtttgcatttccaaaaccaacgccggaccacaagaggcctgactattacattattactgaagcaagcatcccacaggaaaaacttacaaaaggttaactgatgatacaatcaatgtgattcactcacgcggaatatattcacaaaccgatgttctccccaagtgcaggatgggcagagccaatacatgttagtagatatatttggtaggggcaccagtgacaggagaatccaaaaacccattgcagcaattatggaagctctcagcacatcagcccaacaaggcctcacaactttgatcaaccggcgaatatacaagatgggaactaattcacactgcaacaggaaacctggtataaatctcttatcttacatacagacgtacccaagccagtcgcactactaataattaattagcctagagttatgatgttacgagccaatatatttggtgtcaaaatcctcaagatcatggccttgagactttttcagttttgccactagaacccacatgtttgcaagttcactttccaagaaggcttccttttgcttcgactcctcaattctcctttggagttctgcttccttttgttccttctccataagcacagcttctaatgccttttctctctcgtagcctgcgttgttgtctcttcttggagctggctcatgtcgtctactgatgctatccctccgagtacctctcagtccactgttggctctacgcggggttggacttctcaccgatgccaactcagaagcaagcttctcgttttggttcatgagcttggtgacttcttccgacaacgctttcaattcaactcccgcagccgaagccaagcctttcgcgtacgtgctttcctctagtagcttctggttgcgagtctctagttgagcttttacttcaatcagctcacacaccttctgcttcagctcatcaatctcaactgactgaaggacaccccccaaaagaagtaagttaaatgtgcaaaccaaccaagtcatagagaggcagcaccataatgaagagcaagattgcttagaacctcaaatggtacaagcagagatcattttgagtcatatggtgtaaaaataagaagctgcaataaatgtttttgaaatctacagtatgcaaagattatgagatagtgcttgcgtggaagtgcatgatcaatgatttgggataactgcctattggaacagatcagtttaaactgaaaatctgatcctcgctccataacacagggtcaactggccaagataaactttttgatcatactaaaacaatgttttcttcgatgtctgtgttgctgtggggaaatagaagtgtgcatagttgtgagggatacagtgacaatttggtgttaataagctattatatggcaagcagacatagattaactgaggaacttaaattttgaaggaggttctaagtggtctaggttctgatctgttggcccagttatgaaatgaaaggaaggcaaaagaaagaagatagaattaaacctgtggttcttttggcgacgtttcaccagggacctctctaggaactgatagttcttgatcagcatgattatcagtttcatggttaattcctgcattcttctgcatcataatgctatttgacagtgaatccttagcttgaagagtttggtaaagttgctctttcaggtgagcaacctcctcttgtaattccatgcattcagttgtctggcaacaaaagaaattcagagaagcaatacgaactgatttcagttatccaccattcaactttcagcaaaaaaaacaaattgattttctagcacatctaaccttttcattaagttggtcttgtattactctgttatctgctgccttcacctgcaataaaaaaaggggaaaatgaagcttcacagactaaacttgttgtgcgcattcacatgatagaaacaaatgcgctgttctgttcataacaaaccacacaaagctgtatctaattatgcacatgtatagcgaagggacaagaccaatcctgatctgaatttaaaccatcctaagtttgtgaggggagtaacaatttgtttgttcaccatatgttccatgacaatagagtaatattgcacaacaaagggaatactatggatgaaaaaactattacatacaattcgaatattatacagtcaataaaactaattgaaagttgtatattatctagcatagcacaataatctgctaccaaaaattggtgtgctagattcagttgcaataactttggaaggaatcaaggaactagttttaaaaattgggtattggctgataaaaggtttgcggcgatgactcctgttgcatgcaacgtagtggtgataattgagcttgaaacttgataatactggctgtgcatcataaatacctcataggaagtttacagttgataaaattcatatatataagtttctcttctctttttggttcatgactttttaataaacccttgtacaatacacatgaaagactgcaaagtgcacaaactttttcagtacctcgagatcaaaggatttctcgttgagttgctcaagcagttcagcataagactgaaaaaccaataataaaaccatcaaattgtttaatagaatacttggaacaaaacaacatgaactgaagcgaatgcaggatgttaccggagtaagttctaacttgtcagccatcccttgattatttgagatggaatgaggtatctgcctttctaaagacgctatctgatgcttctttcccttaatttcatcattaaccttcttcatttccatcttcatatgtaaagaagatagagtttcaaggtgaaaagcttttagcaacatacgaaactgaatatcaggtaaggtatagagtacctgaatcttctcattatttgggctccttccagcttcctcggtaaggcgctttaggacacttgtatgaagtgcaacctcccctgacaaaatcttcaattgctctctcagtaagtcaacgtgatctattgtttttctgctggcctgtcaacatatcacgtatcaaaatatgccaaaaagaagtccatagtaagacatcatgctgtttatattacatcactaggatttgcaactatattaatcttctacctgtgtctataaagaagtccacactagtaaatatttgagcggtttagttgtcttggtaatgctaaaaatgtatcatgtaccccacaccatgtgccatccatgtatagcacttcaaaatttaaattatgctcttagttaatacacgttagccaacaaaatatactacaacaaacaaacttcagctgttggctatgagttcaaaaataacacattataaaccagtaagccaatcatgactcattagtcgatcaaagattgtttaaaagtggattgctggtttaaaactttaactaagtcatccttttctgctttagatgtatttgtttagctgatatttcacatccgacaaatttcggcctttaattaccaacaatgcatgttacctaccagaggtgtttcttctccatgaaggctgtcagtagcgaactccccatggccaatgctaaagagatcaaccgatgcactctcaccaaccaaagaatttgatattcttggttcggaaggaaaattaacactctccccaataggtgttgaaggagcagttgatttagtcaaactggacttgtcaccttctgaacttgtcagaatagaagctccaccttcacgtttctggacaatagaaccatgggaaaatgttcgtgtgaatcaattattatttcaattttaaaatcaggattggtgcacatgagttcatctatattgtaacaattcatgacgattgcacttgcatctatgtaaaagataaatcaaaagaattgaataaatggactattaagaattgcccaatttaactatacccgaagtttaaaccaattaagaattcctttccgattctttttctcctccttcgaatcttcaagtgtcatgccaagtccttcaacaggagaaagtaattcattgctttcattatccaacacgatatcacgtcttttgtaaggtaggtacgcaagctgcaatttgaacaagcaaactttatcatacaggaagttacccatactaactataatgaggaaaaaaataaagtagtaactcaaattttctgcaaacacactaaaacagagtctgccgatttattgccaaaagtatctcagtaacaaaagcaaactacattatcgaaaaaacaaaagcaaactaaggtcaaagtgtaacatgtgtttgacatcataaccatacctcctcttccccaaaagaatgtcttcttcttggtccaggatgtggagaaaatctagaagtttgtgtcgccttagtggagaccaagataagctttgtgagacgctgtatccttgcaagcaaagcagctttagcttcctcctcttgttcgagcctagactgcagcttgacgttaccatcttctagcttttcatatgataaacaaactccagttaggatgatacattcatacaccggcaaagtgaacatgcaacattatataacttgtaagtataatattattaatctacagcacagttcaagcagacaggagtagctgaagacaaatctgtaaacaactcagttaatagcatagcagatctcgcatacatacagttaagcataatgtgagcagcaaaggggcaattgctataagacaataaatattccaccttttgtttccaaaggatgatattatcttctccggcatccttcactggagtgccagtaataatacccattttcagctgttctagttcttcctttaatctgcgaatctcattctggtatttctttattaaagatttttcatctataatctgcccaacataaagaaagattcaggagaatatgtcagaaatacttcatatgatatttggcacaaaaataatggttaagaattcctgctaacataacctactttgttttgtgatgcttggacctcaatgcgttttgcacggtgggcaaatttcagtgtattatgagtctcttctgagttgctcgatgctggagtcactgtacagatcagctgcaaagtataatagaatgaagttgtcagacatccaaatcacattgaatattaaaagaaatacattagctttaaccaccatcccaactgataatgaacaacttactgaaacacgtccttgaccactcaaggatgactgaagtagacgtgttagttttgaatcacgaaatggaatatgtgtagcttttccgtcagtaagtttcgatatcacctggaatacaaaagggaaaaaagcttcttaacttccaacctatgatgataacctctataacagatttcatggatcatgacttgcggcattattttatatgtaaattgaattcatttaactggataataaatgcaaacatatcaacagaaagtcaagcagtgcaacagaacacattggaacttggaacatattatgtcgaatgaatagcaaaacagatacaaccacccattatgccaggatgcaaagatcttctgatgtacagccaatgactggacagtaatcatgagacttacagttccaagtgttagcaagcttttattgatataagatccttctttccggcgtactccagtagtttctgcccttgagctctcggaacctgccagatcgatgaggttctgcaaatgagtgagacaactaaataatcaatacatgattttggcagtatggtcaagagataactgaaaacctaaaacccaccagttgtgagaaggtaactgcctcgccttcattagactcaccacaagggctgctctctacagtctgtcagataacaaaacgaaatgaaaagggagaaggaccatatcctgatatctaatgttcttccactagtgagaagtatattttgcatgcaatttataatcttgcaatacagcagtgcaaaggaaatatcaatgtttcgaagttatataaagatatctaaaaggattaccagtgtgaaaattgtatgacttctgctactaagtagattgaagttagtggatccaacatgtctatgctctgcaaaggaaatatgaaggatctccattagtgaaagaaaactttaaaccatgatcatttttattactcacgatcctgataggttgcttctgcaaataactaaatgttaatcatgctaaaaatgaatggcacagctggaatagtgaacaagttgaaagattctaaaagatggtaatcacaagaagaccttctccagcagcaatgagggatagggcatgtgcaggagataatactacttcttctttgataccctcaacaaatgttccctgaaaaagtaaatgtagatgaaggaactatcagtcaactgtataaaaatgatgctttaaattcattcaaaattctataaagtttaagaatgaacttcaaagcatgctactatatggggtatgaagtatcaaaagatacatttcccacacaggggaacaaatgaacaatgcatggcaccattgtctctaatgactaagcacatgcatgacaatgtttacacttaactttacactgtttttttactctacacatttgaagaacaagacatagccatattaagtgaaaatgcacatgttacctgaggatcctctctaattcgtaagttctgtccagctggattgagcagatcattgacaacctagattcaacgaacccttaattagagcagcacaaaacatgaatatgtgaacgatgcaatgatacaaatatgattgcaatgacaaacctcattgtaaatttccaagtatgatacacggagaagaaactcgcgatttggtgtctacaatggtcagacagtgacataagtgtacagtgcataattgcatgttagtttatttgtatatacatgatgggtccatgtttaaaattacctcttgtataatgctaaatgcgtctttgacagccaaaggtatgatccctggggatctttgatctccctggcccaaaagaacatgtgcatcaagatatagatgaacatttgaaatataaaggaaccaacctatattgcacaatataagcctagccacatataaaaacgaaaagtaaacttcaacatgagtaaattgcaaataatatgctgcagatgggaaatggaagctgcctatctctgtgaatggtaaccacaatacatttaaaaaattacatggtgataatatcatattatcagtagcatttaacatgtgacactttgattccctgtcttatttgctggacttgggacttagagagggtcagataaggctgagtttttattagaaaagaggaacacataaccaacaagcagttataataacttgactgcttcgttttttttttcctggatgcacaatatggttatactctgaagccagtaaaatctatgattaaaagattaatagaaacatgaagctgtaagtgttctcacatgcattgtgtgggtcttcccgctgcttgtaacaccatatgcaaatattgtacctgtggcaataaaaaacagaaacatttatacatcaatctttgcttgaaaccaaaaaaaaaaaagaatccaccaccacattctatcaatgaatggtgtgcaacaataaatagcttatgaaccaaaccgcatatatctgtatcgctataatgtttagaagatatctcatagccatagtatcatggcattctgtaaatacaacccaagcctttcttttcttgaaaagttagcttgaaacagtaaacaagctgttatcatggccctatataaggatagtaaagatcaattaccatttactccctccatggcaccgctgacaacatgttgagcagcaacatcatatacctgacgggttgtagtagttggtgcaaaaacccgatctgaacagcatactatattagtctctgatcaagtaaatttgaagggggataaaacaatatactgatagccttagaatagccccttaaataatattctctcttttcatgagatggcatacatactcgcttgactagctcattttatagaagaatatattgtttttcattcataggctagtatatggaaacaaggtatgcagaaactcttttattccaaacaacaattttggtgccttaaccagaaaatgtcaacaactgattcccaaaaatggagagtattgtgcaaagttatatatgttaaagtaaactattgaagtccttcacgcatctgtacatgtgtcgattcacatttttataagaaaaattatgaataagactccgttccattaacatgacatactgccagtgcaaaacctcttataattagcacaactctagcaagtccaacagtgatgagccattgaagtacaaactcaatattcgtttgtacatgaatagaacaagttatattaccatgttaacacttgtttttacaaatagcctgtatggagccacagaatacaaatcagcgtacagattatgtgttagtacaggaacagcaggtctgcaaacataatttactcccaagtgtcccagtacaccagttggcaaaactactatattgaaatgagaaataaatataattgatgaagtgatattgagaatcccaacaagtaaaccgaacacttagcagaattgagcataatcttttaggcctttctttctattgcactgctaagaacagctgtaggtccaagtcgcaatacagatttgagaagcatttccgggacactaatttgagtgatacaatcaaactggcacgagataatttcaggcatccaaggtacccacaaaaaaacaaggaagtatcacgttcacagaactccttctagaatctagatataggctagaggactcacaccaatctcacctaatactccagccttatgagaacagcgatcgtttggacagaactcaactaaattcgcatatgccaaacgaggtgatgatcagaattcagccagcagagcgccaatgtcaatgccaccaaaagcaggcacgtaccgtaagcataagcaacgctgggattctgctcgctcctcacgaccgtgtcgccgtccgcataccatgccacctcctccccttgccgaatctcgcgggggcttcacaagcgaaaaccaaaacccaaatcaaactgcattcccccaaaatccaagcgcgaccaaacgaaacaccaccaccaccataagcaaagcgagacgaacctcagcggccggaaacggacggtgacggtgacattctccttgggcgccgggtcctcgtcaagcccggcgaacagcggcgacgcgggcccgtcgagcgagagctccggcgtgagccgcgacgaggacgtggtggtggtcgtcgtcgacgtcggcgaccccgactgcggtatcggcagttgctgctgctgctgctgctgcggctgcggcgaactcctcaccaccgccaccgccgccgccgccgaagacgccctccgctgccgcgaagccggccgcgtcgccattgcctccacagcccgagatctagcagcacgcggcggcaccaccaccaccacccgccattggatccaatccaagtatccaccaagctaatcgcccccccccccccccccccgccgctttatgcgggatttttcctagggctccccttttccctttccgtctggctcactcccccccttcactcgtgggtggcggctttcggatggctttcgcactcacgcctttttgcttccgtcggaagcgatgcgggaggaagaggaggaggaggaggacgcggacgccgctgcaaaatgtagaagaaaagaaatcctccctctctccccctctctctctctctctctcttctctccaactggctcttttggtgggtttattacgccacgggagggagcaggacggggtgggtgggtggggaagaggaggctgacaggtggggagggcgctgatgggtccacatgtaggtgagtggatgttgactcgtcggagtcactggggtaggggtttccgtggattttgattggttgtgggcgttggggtggtacggaacggaaggagaggcctctctcttctcttccaactgttgcgtagggggaggcgacggtttactccggtttgatgatgatcatctagcgagattgctgtttttcgagtcagtggtctcattaagaaaacgtactagcaagtttatcatggtagagtagtagtagactagtagtttgatgaatcaaataatgtagtactaccaaaaatatggtagtactatcataagccttgttttgcaaaatttcataggaatttaatctggccctgctcggctgtcatgttggcagctgtgacaggcccattacctgtttcaccccaaaattaagacgtgtgatgcgaacgttaattcttcactttaaatgcacaatggcgatggttgtttctgtaagtcgctgttagtagatcgcactgttatggtggtggttgcggttgtgctggacgagtggactcctggaccagtaacatcattctccctcacagccaatcgatactccttttgcgcccatttctagttggtgcaataatctccatatatgggaacctaatacatatgctcctctcttaatgcgtcacttacactgtggcacaccgaaaataacacctcttgtcccgtatccaggcaccacgcgccgatcccatctcctgtacccatcagcgttgtctttgtcgcgcgcgtacgtagctagagtagtagctacggcctacggcctgggcgcgtcgcgcaccagcgcgagcgggcgcgggcagacaggacgaacgtatcacggcgcgcggtcccggttggatggatcccgccgatcgagcgacaacagtgccaggcgcgccgcgcgcccgcgcgtcccgtccccccatcatccgtgtgcccgcgcggccggtcgttttccaacagcgcggcgctagctcggccgcatcccccggcgcccggtcctcgccatcacacgcccgcgtcggggcacgggaccgcgcgccaagcgccaaacgcgcgtgctccgagggcgtttgcaaatgcaaatatgcaacaacgcccgtgagccgccgtgtggccggcgagtgctcggcgctcgccaccaccatggcaccataggcggacgaccttcccgggcgtcacagacggagcacgggcaagagacaaacccgaccttcccaggtggctcgatcgtctcacagacggaacacgggaagcgacaagtcgacaacccggggcgccactgtttgggatacaaattatatgatgctgcagctcgcagctctctgcaggtgcgtgctgctactgtgctcggtcctctggtgccggatttctttcgagagaaaatgccgtggaaatggaatagtttccgtcacttcggtcagctgagttgcacactcgcaccacatgcgttcgcccagtttgttttgactactggacaatggacatggcgatttggcgagaccgtcagtagtggccgacgtatagtagtactagtagacgagacgcacatggctcaacgtgacaaaggcaacgagtgctagctgcttgttgcactggttcagtaagaaaaacgaagtcaaatatgatttgaagtgtattaaactcctccgtgtaagctcgtagtctaatggactatcccatcatggaaatgagtggacatggtgcccttggacgtacgcagtagcttggatggtatagagtactacggtatgattatgtcctgcacttagcatagattcgattcgcaggtggagcaattagggcacccacaatggttatctataagctatctacaagagatccatgtcagcatattttcctacttgaaagatattaaatgaagagagagagcaaagctatctactagcttagagatagtctatagagaaaaacgagacagtgcatgagagagctatagatacctatgtagacatactattgaggtggtttactattaatctagtctattgctgagatgtacatgttttatagagagcaccatactttaccattgcgggtgctcttagcatgctactataagatgattgtcaggattctattgtcatcattagggctcatgctctgctccatttcttttacagctaggagatgctctgcaaccttggactgactagtgttttttcctgaatgtcctaaattgcaggcaattgaaaaagaaatttcttgtcagggatcagaattcagaagtactccatccgattatctgaacttgtttcagggaaaaacaaacttagaagcatgaactagcagaacctgccatcgtcacactatctgtattttagtaggaggaccgctcaggctactcctacttcacaagtcctttgcagcacatctccagaagatgcagtcatccaatgagacatacgcctgaaatagtagcccatgcaccaaacaaaaatctgcgtgattgagacacttaatcgcgtgcaacgacgagaaagaaaccgattaaaaatactgagtagctgggctggtgattcatctgcctttgtttactggcataatgccattccgctccaaggcaggcagggtcctaccagactatcaaccatcgagattaagataatcgattccttgcaccttacagaataataattgtccggtcgcatgcctgctctcccagaataatacaccactaacattacgaatcattagccatggaaaagctctcagacaagacaaaaagacccaatccataccgtataaattataatcatattccagtgatcaattcatccactgcaagcactattcagtcttcacacaaacaaaaggaaacgaaaacgataactccggagacgtcgaagcgaggggtgaattgactgttgttgccttatcaggtgtgtgtatagtgtatactcctgtgagaggaagcgtgacttgtgcgtgccgccgacaggagcccagtgccctccctcgtttgcttgcaaccacggcgggtctgacgagctgatgggcacgcgagacccatcgagaacgtgacggcaacaacaacagcaacaaccaactatttaagccaggctgttgctgtcgagcgcgacttgcgttgcatcgcgggcagcatccatgctctctgtgccacgacaacgcgacggcgaaagctgcactggatctctctctccaacatgcgacagatcgccgcaacggcgtacaacgtgcgaaggcacggcagcgaacggaagtgcgacgaaagcgaaaaggggcctcacgggccaaggggccgaaacgcgcgacaccggtgtggatttggagcaatggcccagtatgcgttggcgactccggagctccaaacttgggccgagttgctaggcctggagagcccaagacgaactggaggaggaggaatgcaacgttgtgggcttggtaggccatgaagtggataccgttctttctgaccgggcaatcaatctataacgtgggcttgttgcgtctaaaaattgtgaaagtctggtgtgtcgatagtagatcgatggttacctctcgataattccctatgatggaacatttatatttctatttataaattcagtctataactgcgaatgcgaattcgtagacttatcttggaaaaatactatcctgacattgcaagtctgttggactttgcaaatatatccatcacaagggagaaagaagagactggtttctctgggcataattagcgagatgaccaaggtggcggtgaaaagggcaacaggcaagcctagtaggaaaaaaaaacggacagacggttaaaaccaaaaaaccagaatcagcatccttgacggttttgttcgctcacaagaccgtccctgtaattgatccagagtgaaatggttgaatggtctagcttttcatactatgatggcaaggtagtggtggtgctaccgtggccatcaacggatccagaaatttgatacatcggtattataatatgttgattgtgcttaaaccgtggtgttatcttctacaaaataagtattttagtagtaggtttgccaaaaatcgtgggcgtcacttgaccataactattacactgcagatccacccctggcattgggggtcaaaggaggtagtgggtaaggttgaagatggaggcttaaaatctgaagtggttagtcagtggagctgttgaaaacaaggaagaaggtgaggcgggggcatgccgttgccgctcggaggagaggcggttgggttagggggaggggagtagggcactagggcaggtcccaccaatggtgacggttgagtagaactatagaggaggatggtatgagtgttgcaatctaggataaggagtggctgacatacctcaaagggaaggagaggagatcgagaataagttttcatattaatgtagcagcacgaatcttttgatgcgatgaaccgtccaaaataattaaatgacaaaaaattatgggtattttcatgtgacaaaagctaaacacccaagtagaataacatataggactacatatttgtgatttactttggtacacgttttgtgtacacgcatgtgtttgtttgggtgggggtgttatatttttgtcgttaggtaggagtacttgtgagtggtgagctgatgatgctatatgcagtgtccctgtgtcagcacgagtggaccacgcagctgtcacgaacataggagtatgagactgagatgcagcaaaaccttttctagcattacatggtgagcaaccagtaaacccagcttttctttctactagtggagatgttaccacgcagcgatgcaccccgaaggagcaatgttgaagctataggttcgttgtttgcccctgcgccgctctgagcactgtgtatggcgcagtgaatcatcaccgctctgccctagctcagaattgtttctcgtgtcagattgattgtacttgtacagttataatctcgtccctttcctggcaacaccaagtacagccaacactgctggtcaatagattctcctattgtcgtcgttcattcataaaaacaacgaagtcctaagacctagctaggctacaacctctgattatatatggctctatcatatgacatgcgtatccaaatgcacctaacttcaataatgatgatcaggcctttatatagtatatttatgcggctaaattcgtctgtcgcttttcgcatcagcaagtaattaacagttcacagagatatatcgatcgcgttgaaacactggtactctctccgtcccaaaaaaaagacaaaccctggtttccgtgtccaacgtttgaccgtccgtcttatttgaaaaaaattattaaaaaaaatttaaaacggccaggttccaaattaaaatattattatggtttattattttacaacaataaaaatccaattattaaaaaattttaaattaaaccggccattaaaatttgaaccggaaaacccagggtttgccttttttttttgggacggagggagtatcttgctagaaaaagttcatgcatgttgacgtcgaaagattgagagatcagcgggtagaatctttcagtcaccgtactgtgacagattcatgatctaaaatgatgcatgcacgatgcatgatgcaggtctggggataatattacgaccatatactacttcatactgttagtatatatgagtagtgcatttcaattaacagtatgaagttaaaattccccggagaagccaatcattttctgcttaacgacgtcccaccctatgcaaacatacaattcatatcttgatgggcagtactgcagtgggtacccatgattttcaccttaaaaaccgtgccaatcacagcatgcatgcaaatggagaccagatcattcattagggcggatgcatatgcatgcatctcgtgtcagatcggtaggtcgatcgatccatatgcatcgatcgatctgctgcagccagtaagtatatatagcctgcccccaccgcattgcatcatccagtcggagtacgtaggcagcagcagccgatctgtctccgattggcgccggccggccgcctgcccgcctcggcccggcccatgtctgctgccttggtgtcggaagcagagcttcgctcgcgtcgtcgtcgtcgtcagctagcaactgatcaacagttgcgctagctgcaacgtacgacgagcgcgatgagatgagcaaactcgccgtacgttacagctagcgtctcgtactgctccggccagcgcgcggccggccggctgcccggatcggagtaccaccaactctcgcccactcgcattccgatgcggttaaggctgcacatgctagcgcgcgcgcccggtacgtatagtagtacagtacatgcttacaaacagcggcaagaacgaagagcaaagaaatctgagaaagatcaatgcgtcgtcgtcgtggtggtgcaggggaagcacatggattgaatcagtatatagccttagctgctgaggcgaagacgcgaggtgagatcgtgatcagatcggtgatgagtgggcggcagtagctgaactactggccgatctgtgcatctacatggcttcgctctgctgggcacaagtacagctgcatgctgcatgcgcgcgtcttctctgggcgctggtcctgcattcatgcatgcccggcaaccactgcatgcgacgcggtggtggtggtggtggtggtggtactgactactggctgctgctgttgccttctgctggagctggacgcatatgtcatatgtgcatgcagtactaccaccgctgcagagcaaaccaattggcatgattcagtgccccctatttagatctgtggagagtctcttgatgctgtgtgtagtagtactgatcatcgctgcatgcaccttgctggccagcagtgacctgtagctttctatagcttcggtgtgtgtatgatcctatatatcgtgcgtcatgacatagcagtatatagaaatagttagctgcatctggcagcagcatcagcttgatagctagtatgcggtgcgcgcaggcctatcgccgatctcattgtttgtctctgtccttggcctgctttcttgcttgcctctcctctccccctcaaaattgcatattgtgcttttctgtacatgggacatccatgcatagagcgcagatcagttctctctgctcttctttatttgtaatggaatgataattgaggtgtttttcgccggagaaattaatcatcaattccgcatgcatgttccagtttctgtccctaagaccaaactttattgccaaaccagtgactttgtatctgaatgttgtctgtcctgatgcgttttaattatctatggctatagtatacacatctgaaagaacaaaatggttgcataataagtagttgagagcatgcatgaattgacggagatgatcgacttcggctttttttgcagcatctctttgagctttgctggctagctcagtaccggcttccggcacagcatgcatgcagccgtgcatattggagtaaaagcatactataggagtaaaattaataacgatcgaagcactgcagactatgtcaggctgctgtgccaccaaatgacgacaagaacgtcgaccgaaattgaatttcgtaaagtacgggggccgtacgatgatcgatgtgcaatgcaatgcaatgatctattagctgttctgaaaattcatgacgtgtggccggtggttacatatgtacttgatgagattaattcaggctatttaatcaaactatgtacacgtacaccacgaggaaatccgtggttttgtgatctcaattacgtacgcgtatagatggtcagtagatccagtaaatgtttgtactgtactgtgtgttcctaggctattagcccagaatgtttatgtatgacaggctgcattttctcccgatgtattgattagacttagaagtagtactagctaatggaattagcagctggtcgtacgtacatgtgtaagtacatctcatgtctcgatttatatggcgctgaatgattatcatctatagtagttcatatttcttcatgacatttgagacccagaacttttttttatactagaaaaatgatgagctaatcacacagtagcgcattccattttttattttacgggtccaattttctgtctcggaccctgtgaatactctttattgattctttttcctcctctatcaatataaagtggtaaagcttttgcttttccttaaaaaaattattgttcactaatatgatgctagctactatacttttgtcccattaattcgatcatcgcgcaggggtataaacaaacggaaagttatcctccgggattgtctattagggtttagctaggtagaaaaatcagactgactaaaattctatggagaggtgggtcaataccgtaacgtaactagtcgccaatctatatattgcacagactattatatatactgatactacaaataataaaattctaaagttatgctaaacatgttgattacctttttgaattattgtagctacttatattaaaagaacaagtcacatatcagtttcaacttactaattaatttaattttgaactttagttagaatatattaacttaataaaataataaaatagagattgcaatctaggtaccatatcacatatattaattacaaatttttagattattaaattagagccatgctattttcaattgcacaatttattaaacatgtactatgcatggtcacgataattaatacgatgcatcaaatcaatggccagagtttatggttaatatgagagctttcttgaattatccagttagtccatgagaccatagggaaatcattactagctagttaaaacaaatcatatgtgtgctatgaaattcttttctatgtgcgcttttaatttatgaaaatcaattaatacaccctcatgtccgtacaatattaattgcacgaggaacaattgtattttgcattttaatttcttgttatatatcagcagccttttccttcacgtgccaatctgccatcagtaaattattatattactgatcatctataagaggaaggccagaaagtacatgaaatacacctggctttggcagatggagcacatgctcaaaagagccatctctgaacaaagcaattcagatggacgtataattgggccatggggtggaggaaaagaaaggtcatgtacactatatacatacgggcccatgtacgacagtgttggatccacacattttcaatctactgctgcgtgctggaaccgttcttccacacacatgcatacatttctgtgggtaaattaattattcctgtttattcaagcaaattaattaatttaatttcctgtttattcaagcaaattaattaatggactagttttttcttctgtgttttctttgacttttcaagccaatattgatatccataacaagtgcatcttttgccgttttggaattgattttttttaactgatctttgcaattcgaaggattttctttttctttgcctggtaaaaataaagtggcaacacaagctaggtagctagctaaacttggatccggacaaggcaaaaagagtagattatttaagctatgagaattaacataccctttcttgcgactgctaatccacaagaagaaaacctaattagacatggattacaaatggaggtccaagctgacaccctccttctgccccaattcacacctacctagcatctccggcgacgtcgacgagcacgacgacaacgaaggcgacgaggacagcaagctcatcggcaccatctcgtccttgcatgccacctcccccgccgccggcgtgcccgccaccgtagtagccagcttgtcagcgccctgcctgccggccgtgctgccgaaattctccgtcggcggcggcacgctccacagcccggcctgcacggggctaccgttgatgggctgcgccatggaacctggcccggcgaaggcgcccggggcggcgctcgtccacatcgggtagtgcgccggcggtggcggcggcggcggcggcggcgggtggtggtcgaagcggccgccgatgtggtggtggtagttgaagaggccgtacatgtgccccggcatgtagcggtgcatggcgagggaggcctggaggtgagctcgcttggcgtgctgccgctccctcttgtgcgcgttctggtggccgcccagcgcctgcgacgtcgggaagttgcggcagcagtagtggcactcgaacttgcgctccgccgccgccgtcgcggcgccgccgttcttggtgccgccgtcgccgccgttgctgccctctgacgtgaccgtgctgccgttggccgcgtcgggggagcctgcaccggcctccgtgggccgcagctgcaggtcgttggagaattcgcagccgaacagccggattgtgtcccgcgcctgctgctgcggcggcggcgccggccggatgaacggcagctgcgagaacgagtcgacgctgcgcatgtcctgcggcttcgccatggccgtctaaccaaccaaccaagctatctgcttctacgtgaaccaaaaccaagaattaaccacccaactcggggcaattcttgctagctgctgctatatcttgcgtctccgcgctgaagaaattggctacgagttggtgtggttttaaggggatatgggagttgtaagctggggcggaggagagggggacgaagagggggaccatgcaagaagtaagagcagagggggactaccaagcttaaagctcccccctctctcatcaccaagtacaaatgcagctgcagtggcagttgctgttgctgcttgtgccctccctgcctagctaagctactgctagtgcaagctatcgcctcatcagtctcacacacaatgacacaaaacattaaccccggcccatttctttcttggcaaatatgggactagtacatatacgtactcacacaagtgcagctatagctagactggttaggtatagctagctacagagagaaattaaaatctggtagtgtttattttctttcaaacttctaaaaattctaacacatcagatgcttaacacatgtatggagcattaatgtggacgaaaaaaaccaattgcatactttacatgtaaattgcgagacgaatcttttaagcctaattacgcgatgatttgacaatgtgatgctacagtaaaatttgctaatgatggattaattaggcttaataaatttatctcgcagtttacatacggaatttgtaatttattttattattagtctacgtttaatacttcaaatatatgtccgtatactttaaaaaagtttagcacacgaactaaacacggtctctctgatgatttttttttttgccctgtccagctttcatgcatctgtagctatcagtgggcatcaagtggggggagatgggtagtgtgactccgtctatccgtcgctctctccctcccctctgctgcctctgggattggctgtagccgggggttctttatgggaggttggcttctttacaacatgagagaccgcaggtggtcctcctggggacggcgacgtgctcgatcgcattctgcttgcttgcttgcttgcttgcaatattgctctctccctccctgttcatgctgctgctcctgttgctgcagatgcatgattactgcatgccggccggccggtagtgcagcagtcatgcatgcatcgtttgcatgcgagtttttatctctttatagctttgcgcggtggtactgctgctaccatcgtttgtagatcgatcgatcgatgttctatggatggcatggcatggcagcaagctgcttcaattcgttcgtttctctccgtttctccgcctgtcgatcgatatggtggtatctttttgacagcgcggttataataatcgtgggcgcgcgtacgtacgtgttcgatcgatggcgcgcgctgcgtcgatagctgggatccacatgcatgcttgattgctggatcgaaagctagctaattgagatagccagctgagtgctgcagttttgagatcatgtcgatctctacatacactccatggctgctacagtagcttttttttcccctcctctctttttctgcaggcttttgtagaccttttctttttacggaattccatgcatgcattcagcgatttttcgcctgcttgttgtagtagtgatatggaaaaagggtaatttcattggagttgtttcagagagatactacgtgaaaagttgtcaatgtcagtaactcactctcctccaggacgtctggtttcatatggcttctgaattaatgacccctatctaccacaaatggaattggccgtagttgagacttgagagatatactactgtcgttgttgtccatctagctagctagctgttcgagtagaaaaccaaacatctcctacacaggtagtatagatcagtcgatccagtctctccaacttgtgatgaacattaatgctcgataggacaagaaaacattttcaagcctcatgggcgcgtaaggccgtagagtgaccgtgtgccaaccgcgatgctatttgaacttgtgttatctctttaagaggtactcgtctggataagtacatcgccaacatcgaaacagtgcacgcatgtgtctctcgacaagtacataatgatgacaccaatgaaatctccatcttaatttcatctgtggtacagacatcgcatatgcatgtcttttttttctttttttaatttcttcatgtccatgaattaagattgtttgtgttacaatatttctactgcctaaattaacggcggctcccaggatagagggacacatggaaaagctgagtgaaaacgcaagctcgactgggactcatgatctcagtaacattttctgacacttacgtgtatgacagatatcaatatcgaccagaacgagctcatcctaatcataatgaccactcagagatccacgtttatttcaagttgagaaatcgttccaaatgatcaaaattccttactacgatttggacagtttttcactggtttaattaacctggcgcaaaaacgaagaataatcaaggaaggaccaccgtgtagctgtcagtagtatgagagccatctatctgaaaacacgaaaatgggaacgctcagagaaaataggagtagaaacaaagcgttgatgcgacacgcaaaagtagcaacatttatgtacatcgacgtgcatctggtcatcagtactcatatgccctgcttgttgctgccttgcttttcttttttttcttctctgcccctgtactggtacatgtcgtcgtacgagttagctagcgggcaacagttgtagccacagcttcgccgacggcgactccgaacccctgcaggtgcaggtgggtgcacgccgctttcacggcgacgtcgcggccgcgcgctcgccactcgacctgccggtcgcgccagatctcgcaggcgtcgccaaatattctcgacatggacttccatttgtgtgttgtagtagtatcatcgatccatcgatcgattgtctcacgcgtttttcaccttttgccccctctccttgtccaaattgacaccgtgttcagttccaaatattttcttcaaactttcaacttttttatcgcatcaaaattttcctacgcacacaaactttcaatttttccatcatatcgttccaatttcaacaaaaacttttaattttaacgtgaactaaacacaccgtgaataagcttcttcttctccttctcatcaggttgcagtaatttattggcagatccaactcccccgatccatccaccacacagttttcctcgtaaatgccgtggccgtacgatagatatattgatggtaggctcgagctagccgtcgataagacacaaacgcttgtcaggctggaaaggatttgacagggaaaaggtacgggtacttggtgcaaataattccgtgccggttaggctgctgttattaccgtgggcaagtttctcacccacgcacacaccgatcgaccgatggatccgtacacttttgcacgcgtgagccgtgtggaaaagtcgactcgcagcgggcagagacgacggtgcggccgcggcggcggtagcatcagcaacgtgatggtcgtcgtaactgccggaaaaggacgccgcttgcatgttattttcggtaggaagcgatcgagatcagcgcgagacgagagctagctagctgcaattctgcggctctgcccaacccaaccatgcgaattgcagtgcatcatcaccgatcgctcgctcgctgtctctctcgctctccttttcgctttcgctgcttccaacgaggggcaaagcacgcatatggatgtgcaggtacggagacgactagtatgcatgctggtatacgtgcttttcaccgcgctagctagctaactctagttgcaggacatgacagccttaccactgctcgaccagagtactacctcccctctctcccacaatagttgtcactttgacttttttttaatatttaatcattcgttttatttgtaaaattagtgcaaatataaaaaaaaataagtcacttaaagtacttttgataataaaacaagtcataaataaaataaataataatttcaaatttttttaataagacgaatgatcaaattttacaaacaaaaactaaaagcgacaagtaatatgggacggaggtagtactctcttcacattttgttttggatttttggtgggaggctagttggttggagaactacctcatatcaggtactacataccaaggatatggatattcatctcttgagatgatatccctcgttacttacatgtcacctaaatagttataaagaatacgaaaacacgataacatagtgacggagcgtggggctcctcaccgggagaccgcgcaggcccccctttgccggttcggccgggggccctgggtgagattctaagctcctagtctgtgtgtggaaggttcgcgagagtggaaacacacaagacacgggcgatgtatacaggttcgggccgctgagaagcgtaataccctactcctgtgttttggtggatctgtgtatgaagaagctacaaagtgcgagccagcccccgatcgttctgggatcgtttttctccttttctctttttttctaagtgggcaaggtcctccttttatatctcaaggggataccacatgcaccatctctccctctctttcttttgtgtggggactcatcctctcttccctccaacttgactcctcttcattaatggacggagatttgtatggctgccgtccgaatgaccttctgatgggacggcccatacctacctccacttccgtcggaagcaggcgcgacgtgggaacatggctgtctgctgacgacatgaccattgtcagaccggtcacaaatcggtcattcttgtccaccacgtgtcagtttaacaatctgcatgttcgcccttcttcatacaatatcttgcctgtaatggttaggatgaagcctggcatatatctgaccgggaccaacgtgccatctccaggagctaacacgccggctccggctagggacgagtgcttggaggctctcatcctgacgggatagggcgaggcgtgcgtcagaccgcctgtcgccatctaacccacgatctgatcggtctgtgactggtcactgaccggataaacaagcgcgctgcactgcgttacatgcggcgtgacgcgctcgtccaaaccgcaataaatgtggttaggtgagccccgctatgctcacctacccaatatacgcggcgcaaaacccacaaggggtcggtgcgcctcggccctcggggccgagacgggagcggtccgacccctcggggagacaaagagaagggcggccgtatcacccttgggcccgaccccccccgagggggttaggccacgtgggtgatcgtgtctgcctcaagtctctaagtcatgatactcccggtcccatgtcaccgacagtagcccccggcgttatgccagggcgatcgccctcctcgagggaagcggtcgggcgtgacgccacttcctaaggcctggtgacaggtggggccggtctaaaaatcgggacaagccggttcgtttttcctggagatatgatgatggcgcttcggtcggcgagcgtaattaacgcgcgcacgagatgttccatctcgactgccacagccgcatatccacctcatgcaccgcaaacgggcgaatgggattagtggaagcgtgggcgcgagaaacgagggggcaagatagtgggcgtgagaaacgaggagccgggcacaacgttggcaagggtataaagtcgccgaggaagagatttgcttccttcctctcgccattattccccttgtcttcgccgcttgcgccctaactccttatttcctgtgccctaccttcgccacacgcgctcgctctcaaacatctcttcttccggcgtcatggcacggggctccgctccgcttgacggtagcgtgctgccgccttcccgcatcgtgagcgagagacaggccggtctgccgcgccgcttcatgccggaatctgccaccggccgggagatagtctcgctgggcgagggatgcccggcgccacgctacccggggcggtccgtcttcttcctcccttttgctatggcagggctggttccgccattttcttctttcttcatggatgttctggagttttacgatctccagatggcgcacctcacccccaacgcggtaatgacattggccatcttcgcgcacctgtgcgagatgttcatcggggtgcgcccatctcttcggctgttccggtggttcttcaccgtacagccggtgtcgccgccgtcagtgattggtggttgctacttccagccgcgggggccggtgctgaaccgctacattccctgcgtcttccgcaagaagtgggatgactggaagagcgactggttctacacccccctcgccgacgaagcgcgcctccgacttccgagccagcctccagcgcaggcctccaactggcgggcgccgatagatctgggagatggctacgacgccgtcctcgaccgcctggcgggcctgcgatcccaggggctcacaggggccatggtgttcggcgactatcttcgtcgccggatcgcgccactccagcggcgcgcccggggcgcctgggagtacaccgggtccgaggactgtatgaggacccaccggggggtcaaatgggactgggctcctgaggacttcaagatagtggtccaacgggtgctgaatctcagctccgtggaggcatccctcattcctcaaggagtcctccccctctgcagcgatccagatcgcgccaacatcctgaccatcatgcaggcggtaggggtgtcggaggagcgggctcctcgaggccacgatggcacgggcgggagccgcaggggggaacaatctaccccgggagggggtcgtgcttctgggccccgcgacgggggcccggggagcggccgccctgccgacgcccgggggaagaggaagcaggaaggaacccctcccccgtctcctccccgagggggcggggcggcgcgtgccagcagcaggcgcccggagggggccacgccgacgtcgcagcccgagggggagcggaagaagaaacggctccgcaagatgggggggacagaaccatcccggggaaaccttatttcccctccaaggtggtcgtttaaccgaccccctcgcaggttcgtcccacgcccatcgtggccgtattcattccctcaacgcgagttttcactcatccatcttgtttgtcttctggtctttcttctgtttcagcgagatcccgtcgcgtccctcccgccattccaagtccggccagtctgaggccgaggacccggcgaccacagaggctcggaggcgggaatctgaccggcgagaagccgtggatcgcctacgggaagccgaggaggccgcccaggtggccgtccgagctcgccaagctgaagaagccgctcgggaggaggccagacttcgccaggccgaggcgacgacatcctccgaggcgacctgtgaaactgaccggcaagaggccgcggatcgccttcgagaagccgaggaagctgctcaggtggccgtccgagctcgccaagctgaagaagccgctcgggaggaggccagacttcgccaggccgaggcgacgacgacttccgaagcagctcgcgacgaggccgcgggcgcatcgcttgggcccactccctcgtgcgacgctcaggacaaaccaggtccgggggacatccccgagtccggcacgtccatcggcgggccaagccgcgcggcatcctcttcgaggcggctcttccccacgccttccgttgctccactgagcgcagaaccccttctgcaggccttggccgtcgcaaacaccacggtgttggacgggttaagtgcccagatggaggccttgcaagcagagcgggtggagctcgacgccgcatgggcatgtgtcgaagaggggtgtcgctcggtggaggccatggtggaggtgggccgcaaggcacaccgccggcacgtctcagagctcgaagcccgtcggaaggtgctgggggagatcgccaaggaggtggaggaggagcggggggctgccctcatcgccaccaccgtgatgaacgaggcgcaggacaccctccgccttcaatacgggagctgggaggcggagctagggaagaagctcgacgccgcccggggggtccttgacgctgccgctgcccgagaacggcgggcggcggagaccgaggtggcatcccggcggcgcgaagaagcccttgaggcccgtgccatggcgctggaagagcgtgcctgcgccgtggagagggacttggcggatcgcgaggccgccgttgccatccgggaggcaacgctgactgcgcacgaggccgcctgcgccgaagaggagtccgcgctccgcctccgcgaggacgcgctcaccgagcgggagcgagctctcgaggaggccgtggccgcggcgcaacggctggcggacagcctgtccctccgcgaggcagtgcgggaggagcaggcgcgccgtaatctggaagatgcccgcgccgagagggccgcgctgaaccagcgggccgctgagctcgaggcgcgggagaaggagctggacgcgagggcgcgcagtggcggggcggccgcgggcgaaagcgacttaaccgcccgcctcgcagctgccgaacacaccatcgccgatctgcagggcgcgctagactcgtccgccggggaggtcgaggccctccgcttggcaggcgaggtagggcccggcatgcttcgggacgccgtctcccgtctagaccgtgccggccggcaggcgggcctctggggcgggcggactgcgaagtacgccgccaaccaggggggcctcgcccagcgcctctcggagatagccgggactctccaacagctccccgaggagctcgagaggacgattaagtcatcctcgagggacctcgcccgaggagcggtggagctcgtactggcgagttaccaagccagggatcccgatttctccccatggacggcgctggacgagttccctcccgggaccgaggatggcgcgcgcgcgcaggtccgggacgccgccgaccatatcgtccacagcttcgagggttcggcccctcggctcgcgttcgccctcaactccgacgaggaggacgatgacggcggagtgggcgacagtggcgacgaggctggcgacccgggcgcatcggagtgagcccccaggcccccgccaatctttaaatagtttcttcttttcttcttccgaggccttcgggcccccttcttgtatagactaatttaatatgcaatcaaataaagaggaaatttttttgtgtcaattctatttgttgtgtgtatgagacgaggatgcctgtgccgcggttcttttgtgtcttggcttgagcaagggctcgtgcccaggtcctagtcctcaaatggctcgggtcggggctagtgcctggggagatccacatgtcgagactggctaggccgggagcgtggtgaccgagggttatgggtgacccgattgtgggtttttgccgattcccccccggagttcaccacgccccggggcacggctcggttctgggccccgtttggcgattttagccgacccgagcccccgagggcaggattgaatacgagtgacctatttcaagtcaagatccttcaaaaggaaacaacagcacatatacagcctttaggaaatcgaaaatgcttttattgaaatacagatataagagaaataagaatctgcatatgtggtagcccccggccagccctgcacgcccgaggggggtgcggggttggccagagcccgaaacctgacacccgatccccctttaggggtagaagcgacgaaggtgttcgatgttccacgggttaggcaactctgtgccgtcgcccgtggccagccgaacggagcccggccgggggacgccgatcactcgatacagaccctcccacattggtgagagcttgctcaatccagcacgcgtttggacgcggcgcaggacgaggtcgtcgacgcagagtgctcgggcccggacgtggcgctgatggtagcgccgcaggctctgctggtagcgcgcggctcggagggccgcgcgccgccttcgctcttccaagtagtcgaggtcatctctgcgaagctgatcttcatcagcctcgcagtacatggtggcccgaggggacctcagggtgagctcggatgggagaaccgcttccgcgccgtagacgaggaagaaaggcgtttccccggttgctcggcttggcgtggttcggttcgcccagagcaccgctggcaactcctcgatccacgaatcgccgtgcttctcgaggatgttgaaggtcttggttttaaggcctctgaggatttccgcattggcgcgctccacttggccgttgcttctggggtgggcaggtgaggcgaagcagagcttgatgcccatgtcttcgcagtaatcgccgaaaagttcactagtgaattgggtgccgttatccgtaataatacggttaggcactccaaaccgggctgtgatgcccttaatgaatttaagtgcggagtgcttattgatcttgacgaccggataagcctcgggccacttagtgaacttgtcgatcgcgacatacagatactcaaacccgcccggggcccgcctaaacggtcccaggatatcgagcccccagacagcaaatggccatgaaagtggtatgatctgcagggcctaggccggctgatggatttgcttggcgtggaattgacacgctctgcatcgccggaccaggtcgactgcatcattgagagctgttggccaatagaaaccttgacgagaggctttgccaaccaaggtgcgcaaggcggagtgggctccgcattcgccttcatggatatcggcaagaagctcgacgccttgttcccgaggaatgcacttcaggaggattccgttagccgcgcgccgatagagggtcccttctaccagcacgtagcgtttggagatgcgttggacgcgttcactcccttcgcggtcctcgggtagagtcttatctgtgaggtatgcttggatctcagcgatccaagcaatcaatctaagggagctgggagcgctcccctcgggtcccgaggcctggactccgacgggcatcgggggcctgtcaggcgcgtccgtctcccctaaggggtcgggtcgcgccgacggctgggcaagcctttcttcaaaggcgcccggtggggtttgggctcgcgaggaagcgagccgtgagagttcgtcggcaaccgtgttatcccgtctgggcacgtgccgaagctctatcccgtcaaaatggcgctccatacgccgtacttggcgcacgtaagcgtccatctgcgggtcagagcaccggtactccttacagacctggttaacgaccagctgggagtcgcctaacaccaggaggcggcggatccccagtccagctgccaccctgagtcccgcaaggagtccctcgtactctgccatattattggtcgcccgaaagtcaaagcgaaccaaatatctgaggacctctccgctcggcgaggtcaacgtgacccccgcaccggcgccctgaagagacagggagccgttgaactgcatcacccagtgggcggtgtgaggcagctgcgaggggcccgagctggcctcggggactgagacgggctcgggagctggggtccactctgccacaaaatcggcgagggcctggctcttgatagcgtggcgtggttcaaagtgcaaatcaaactcagaaagttcgattgcccatttcaccacccgtccagttccctctcgattatgcaagatttggccgagggggtaagacgtaaccaccgtgacccgatgtgcctggaaataatggcgcagtttcctcgaagccatcagaatagcgtaaagcatcttctgggcctgagggtatcgggtcttggcgtcccggagggcctcactaacaaagtagacgggccgctgcacctttcggtggggccgatcctcttcgctaggggccacatccctggggtgctctttgtccaagcggcctcacggggtgcactcgtcctctgtgccgacgacctcggggtcggaggacgacaggggcggccttcccacagtggcctcggggccgtcctgggggtcgggggctcctggcgtcgtcggacaagcgggcaaagggccaactccggtggtcaggggccttaggccaccgttcggctcgggggcctcttctccctgctctctcccgggtcgagtcggcacagggttagcctcggggtcagagggcgataggtgcggccttcccgcagtggccctcgggccatcctgggggtcgggggcacctggcaccgtctgacaagcgggcagagggcctgctccggtcgtcgggggccttgggccaccgttcggctcgggggcctctcctcccggctctctcccgggccaagccagcacagggtgggggtgcgcggaatgaggattgtcctcatcgcgctccacaaccaacgccacactaaccacttgcggggtcgccgctaagtagagtagcaagggttcatttggctccggggcgaccagaactgggggagagctgagatacgccttcaactgagtgagggcacgttcagcttcctccgtccaagtaaacggcccggagcgtttgaggagcttaaataagggtagagccttctctcccagcctcgatatgaaccgacttagggcggccatgcaaccggtgacgcattgcacatccctaagtttgctgggggggcgcatccgctctatagctcgtatcttctcggggttggcctcgatgcctcgggcagagaccaaaaacccgagaagcttgcccgcaggtacaccgaacacgcacttatcggggttcagttttatgcgggcggagcggagactctcaaaagtttctgctagatccgagagtaaggtctcttggttgcgcgtctttacaaccaagtcatcgacataagcctcaacattacgtcctatttggctacctaaagaaattcgagtagtacgttgaaaagtaggacctgcattctttaactcgaagggcattgtcgtataacaataagttcctatgggggtaatgaatgcagttttttcctcatcctccctagccatgcgaatctgatggtaaccagagtatgcatctagaaaacacaaaaggtcgcaccccgctgtggagtcgacaatctgatctatgcgaggcagggggtaagggtccttaggacatgccttgttaaggtcggtgtagtcgatgcacatccgaagcttgccgttcgccttgggaacgaccaccgggttcgccagccactccggatggatgacctcgcggatgaatccggcctccagaagtcgcgccacctcctcgcggatgaaggcttgacgttccggggcctgccgccgtactttctgccggaccggccttgcgcccgaccgcactgcgagacggtgctcaatcacctccctggggaccccgggcatatccgccggtctccatgcgaagacgtcagcgtttgcccacaggaaagagacgagcgcgtcttcctatttgccgtccagaagaccaccgatccgtgtggtcttggacgggccgtcgcccagggcaacctccttgaccgggacctcgtcgcatgtgactatccgctgcctcgggacggcgggggcggaggtgccaagcctctcgtcgcctcccttgggcttggacgcggcggcgaggtggtccgcgcgctgctccatacaagcaagcgcgactttgaggtcgccatggacagagatggggccaccggggcccggcatcttcatctggaggtaggcgtagtggactgccgccatgaacttcaccaacgcgggcctccctaggaccgcgttgtagggcagactgaggtccgccacatcaaagttcacccgctccgtgcggaagttggcggatccaccgaaggtaaccgggaggtcgatatgacctagcggccaagtgtgacccggcgtcacaccgataatcggctgggacggccggagcaccatccccggggccttgatagcgtcaaaggctgcgggggaaaggatgttgagggctgctcccccatcaatgaggacacgccccagcttcacgttgcaaacagtgggggaaaccaccattgcgatctgtcctccccgggcaacgcacggtgggtggtcggtctggtcgaaggtgagggcaacctccgaccaccgcccccggcgcgtcgcctcatgagtaggggccgcggccagaagctctcgcttcatggccttgaggctccggcgagaaacgtgagcacacgctcccccatcgacagtggcaatggtggccccaggctcttggaaacctaggtcatcatcgccgtcatcgatgtcctcggcgggggccttctgcttggcctcacttcgccgattgccggaaggaaccgccggggacttgccctctcggcgctcctgcctcctctcctcctcccacttcctcgtccgctcagccaaacttttgactgcgcggcagtccgcgaggtcatgaagggaggtgttgtggacgatgcaccacatgccggttgggcgctccctactgagagcgccggcctccttcttttggtcgctcgcaggcctcccctttcgggtggcccacggagcgccctcgacggcgaggacatgaccctcgtcgtcagaatgggctgacctcttcttcctcctcctgtcacgccgccctgtccgagcagcggatccgggggcggccgaagctgccacaccggaaccggaggggttccaggtccatgcctcttccttacgagccactcggtccgcgagctgaaaaagctccgcggtagtctggggctctttggaggcgatcttttcgagcatgcggttgtgccgcacacccccctgaacgcgtagatcaccgcgtgtgcagggatgcatggtatggtgttgcggacttgacagaaccgctgaatgtaggagcgaagtgactcatcatcccttcgctggactgcatgtaagtccgcttcttcacctgggcgcggatatgtgccttgaaagttcatggtgaactgttggcacaaatcctcccaagagtggacggacgcgggtggcaagttcattagccaaccccgtgcctgtcccttcagggccatgggaaagaaattcgccatgaccctgtcgtcacccctggcggcctcgatcccggtcgtgtagacctggagaaactcggcggggttgacgctcccgtcatatttttcggcgatgtgggccggaaccttgggggccaacggacgttccgaaggctcgccacaaaggctctacagccgacaccaccaaccgggggcacggagggctgatccccgcgtccgtgttgatgtgacactccggacgaggaggcgccctccgttgcgtgggcagcacgtcggccattacgccggcgctcgatactgatgcgggcatccggccccccacgcagatcttcctgggtcggaggcgctgacgaaggagtggcggctgaatggcgagcaacagccgccgctcgccgcgccctccgccttgacgacacggagccggtggtagcagcgccagaggtcttggtggcggaggaccgcccaccagcacctaggcgctgccgtgccgtcatgaccaagttggccacgtcgtccaaccaacgttgggctggagactccgggtcagggacaatgggcgggtgacgtaggagcgcgccctggggcgtgctgccgtcgccgtagacaaggaggcgacgctccccatctcgccgcccttccccatcacccgtggatgtcgaagtcgcggatccttcgaccctctcgagcgcctcctcctgcctaggactttggcgtggagggggcggtggagtacgagctcgacggcgtgggttcggctccccgtcgtcaccgctaacactcggagagaggttgtgcgcctttgcttgttcggccattgggctgaacaggaaaagcttggcgcacacgaaagaatgcgagagcttagaaaaacacacgcagagccccctacctggcgcgccagatgacggagcgtggggctcctcaccgggagaccgcgcaggcccccctttgccggttcggccgggggccctgggtgagattctaagctcctagtctgtgtgtggagggttcgcgggagtggaaacacacaagacacgggcgatgtatacaggttcgggccgctgagaagcgtaataccctactcctgtgttttggtggatctgtgtatgaagaagctacaaagtgcgagccagcccccgatcgttctgggatcgtttttctccttttctttttttttctaagtgggcaaggtcctccttttatatctcaaggggataccacatgcaccatctctccctctctttcttttgtgtggggactcatcctctcttccctccaacttgactcctcttcattaatggacggagatttgtatggctgccgtccgaatgaccttctgatgggacggcccatacctacctccacttccgtcggaagcaggcgcgacgtgggaacatggctgtctgctgacgacatgaccattgtcagaccggtcacaaatcggtcattcttgtccaccacgtgtcagtttaacaatctgcatgttcgcccttcttcata

SEQ ID NO: 5418 - DNA, 31782 bp, Oryza sativa
gggggggttgtgtgggtgttaattctccaagagtaaattgcatcggcgatacacgaacttgtcagttatgtaaaatctagtgtatgaacttgcaaaatgctcattttggtgcatgaactaattatcttgtgcgtgcaaaataaagtcaaaaggacattacatgactaattttgttgatttatgtgctgattaggatactacgtaaacatatatacgagaatgttgctacttggacatacacctgttcaataaaaagatagaatgagatatagtgattgtagagaaatatataaaaaaccaagcaatgatataagggttagaaacatacgaaattcaagataaagtagaaaacaaatttataaatatagcatgtttttatgcgtaattactatacgtattcacgctacatcctaatcaatatcagctaggtggaattaaccttgccaagccattttggacctagtttgcacggattagataagttcgtgtaccaaaacgaatattttacaaattcatgtactaaattgcacccacctaacaagtttatgtatcaccaatacaatttactcattctccaacctcctttagactttttttcttttttttaaaaaaaaaggcaaaaggggcatatgcagcaaatcaaggccaaccctgccaccatgtcaatgtcatgggtcggtgtagccttgtcaaaaaggtaaaaaaatcgaggtataggggttcggagtttttatctctgaaccctcgagtcggtatttttcctttttaagtcccaaaataggtcagtaaatgttttgtttttactcgcggaagcagtatacttggtttttatataggcctgtaattttttttatggaggcctgtgaaaaattgaaagtgtaggtggtaggagttttcatctctgaccctccttatttggtgtttttttggtctaaggccgagtttagtttctaactttttcttcaaattttcaactgtttcatcacatcaaaatttttgtacatacataaactttcaacttttttcttcaaacttttaattttagttaaacttctatttttggcgtggaactaaacacagcctaaattgtccttccaaatacattggcttctgctgcgcaacaattcagcccacttttgcggaacggcccaagatggcacctgcagtaggtgcactggcccgtagccaagttttcccagcccagccatgactcccttgagggatttagggggttcggagtttcagtctctgaaccttattgagtaaatatttttccctttttggagcccaaaataggtcagtatatgagttgttttactcacaaaaacaatattagctttctttggcctgattttttttcctgatggagaggcctgtaaaaattgaaggggattgtcggagtttcaatttccgacccttttatcagtggaaaaagtacaccggaggtccctcaacttgtcaccgagttacaaaatcgtcccccaaccgcaaaaccagatatccggcgtccctcaacttccaaaaccgttcggtccttcggtgtttttggctccggttttagcctacgtggcgactgagtcagcgtgggccctacatgtcagtgtgtccacgtcatcactccctctttttcccatctctcatcctctcttatcccgtactactcagttactcttttgggcaggccgaacccgccggcgcaaggtggggagagggagggcggccggcggtggccgacgctggtgcggcgacgacggcggcggcggcggccgatgctggggcggtggcgactggcggtggccgacacgggagaagccgagacgatggcttctcctaccgcgggcgcgaggcgggtgggagggcggccgatggtggtcgacgttgggggcggcggcggccggcgatggccgacgcaggagaaggggacacgacggctcctcctaccgcgggcgtgaggcgggagaaagagggagggcggccggcggcggtggccgatgctagggcggcgatggcggtcgacgctagggcggcggcggctccggcttcgatttcctccgctctctcctccgccgcatcctcccgtcctccccgcccgcctccctccatccctccgtccgcctcctcacctccctttcctccgtccgccttcctgcgcgggccctccctcatccaaaacaagcccaggtgccgccgcccgatgacggccacagccccaccgtttcccaccattgccctcgttggctctgggtcctcatcccaccttcggccacggcgacctcctccgcctcgccctcccagctgcgagcgggatggccagcgactcggcgagggagtggggagtccggcggcgagcgcgcacaaggaggaaagaggcggggaggcctctttatccgcacggccgccgcccgtcggccctatccctgccgcccccgctcctccgccgtcgcctacagcctctgcgccgccggcctcctccccaaccggcctgctcccgcgtcgtcgccgccgccgccgcgtcgcctgtcgccagccgtcgggccttctctcctctcccttcttgccccggcgacctcctcacgacccactggccggcctggtagaggagaaaagcgagagacagagagaaagaggaggaagtgaaaggagggaaggagagagagggtggtacgtggcatactgacaggtggggcccgcgtgggtcccgcactgactcagccgccacgtatttcaaaaccggaatcaaaaccaccgaaggacctaaagtaaacggttttggaagttgagggactccggatatctggttttgcggtttggggacgattttgtaactcgatgacaagttgagggacctccggtgtactttttcctatatcagttatactatatgtttgggcccaaatcgtccttccgaaacggcccataatacagcggcttctgctgcgcaacaaggaaaaagtacaccgaaggtccctcaacttttcatcaggttacaagaacgtcctcgaaccgcaaaaacagatatacggggtcccttaactatacaaaaccggtcacaataggtccctcggtggttttggtcccggttttatcctacgtgactgttgagtcagcgtgagacccacgtgggacccacatgtcagcctgtccaggtcagcttctctttctttcccctcttctctcccttcctcttccagtcttccctctctctcactcttctctctagggctctgggcaggccggcggaccgacgaggcgaggcgggagaggaggtccggcggccggtggcggcggcggagacgacgcgggagcaggggagcaagtcggcgacggcggcgagatgcccatggcgaggtactggaggcggagctccgtcgggacggggagcgggacgatggcggcggacggcgggcacggatcgcgtcgcccgcccgtggcgacgccagcgccggcatcgcccgcccgcacgcgatctcccccaccgccgatctaatgatcagcactatgcactacatggcaaccattggtggtagtgtggtactagtcgtggctaactaactggaggatttcctcatcattcctgtaagtaaacagcagcagtcaattcacaacaatggcatctcaccgtcaccttgaacacataacaggtgctgaagggtttggtagtgacgatggggtcatgcagtgttgttgccactgcccactggtgaaggctttcaccatcgattgctgcggcatttgcttcaagagattcctcaacgtccatagaatcgacttctgtctcatcagactccattggcacttcaaagaattctctcttttctgaatctgaagaagaccaattagatgccgtggcaatttgtggtggcgtccaaggaactaaagccaagaagttgctgcacccaggagatttgtcctccagcccgtgatagttcctttgcataaaaacctgatctgaaagatgagaaagaaaatggtgagaagcaatttcaaggtatggatgataatcctgtcctgacatacaggagatcttggtgggactcgatgaggaggagggccgagggcaccagcacgcattgcggcgagccgcatggcgccgggcggtaggaggcggaggcggtcaggttgaacggcgacgaggcggcgcgtctggccgctgacaggggagaagcgcaatggtggcgctctgcccctcgctgtcacctccccggtcccatctttggccgccgtggagccccactgcggccgccaccgccgccgccgtcgccggccatcgtcacggcgccgccctcctcctcttccgccttgccccaccgagctccgggccggccgccacccttcatcgccagagtcacgaccaccatcgcctcgccagttcgccgcgccgagcaacaggaagagaggcaagaaaagaggggaacagagaagatgacgtgtcatactgacatttggggcccacgtgggtcccacgctgactcagcagccacgtaggataaaaccgggattaaagccatcgagggacctattgtgaccgattttgtatagttaagggacctcgtatattggttttgcgatttgaggatgtttttttatcccgatgacaaattgaggtaccttcggtgcactttttccgcgcaacaatggggaccattaccgcggaccggcccaagttggcccaagtgcactagcccagccacgagtcaatcggtgtcactgaacagcgggccccagggagaacggcgcgttctgggccccaccctgcagcgactccggctcgctcgagcgagacagcagccaaaccctccactcctcgcttctccggtggttctcttctcttctcttatcccccggagacgccgctgcggcgccaccccctcctcgccgtggacctcggggtgggagcgtggcggcctgcacagccggagctcagctcgcccgccgcgtcggatggacgccgcctcctgctgccgcgtaagcgcgggcgcgctcccccgatttccgttctcgcttctcgaacgttctagagccttctacggtgggggatccgtgtggtgtgacccatcgtcgcttctctcgctctcgcaggtcttctcgacgcagagatgccgcttcccgctgcggaggctggcgccgccgatttcgcggcggccgttcggcacggagtcgacgagtgagctgttcgccgcgtcgacctcgaagcggcgctcccgggggcccgtcatggcggcgaagaaggccgccgagggtgagtcgacttgatcccattgctgtactgttcttatttttggttcaggttgagggtttggtgagggttttagtagggggattggtgtctatatgttggtatttcagtgatgtgagttttggctgtggagtaggtgcattaggcgtccgatttttcttgggattactctgtgtctgtggtcaatgtatatcgtacttgctctgtggattgtggggatgccagccatttttgtctggtgaggcgttggaggttgaagctggtctatggcctggagattttcgttcttgctgttcacgttttgatgggattgatcacagggtgaggcacatgattacagatattgaactcgtgtgacgtacagcttaaactggttggttaatttaggttcaaatatgtgattgtagtttccacttctgcaattgctataattattttcagcttaagcacgtagggcttattaaactcattaccaaacttgttttactgcagttttctgttacatttgtacttttatgattgatgtgtgttacttaggctcaatctgcttggtttagccttaagtatgctatgacctgggatttttgtaattggtgtacttttcagatttaagaatgtacacacctattggacttctcagttcgcaccaaaatgcacttattaggtctcaagcaccatggttggaagattattattgttttgcgtatcagattaagcttaattctcattttctccatttggagtagcatcaactagtgctcgaaagtcgaaacttgatgcttatgcttgttaggatgaaagctgtttaagcttaaatgtgttttgtatacccagaattcggtaatcagattgatttttgaaaataactttgttatctggtgttagttgaaactttgttatttcagtacattccattgagattcaaatgcagtgagaccctctgcttacttagtaggtgtcaatactgaagcttttactggcaaaagttatggtgtattttgtaatgaaaatctcgtagagacatgtaattaattttatctggctgttttataatgaatagtagttggtagtttgacaggttgagtcccagtttcaatttagtactgcttgcagagttaaattcattaagatataattatatatttagcttcttgattctggctaggtgctaaacaagaagaggggaaatacaaacacacggtggatctaccaaagacaacttttggcttgagagctaattctgttgtgcgggagccggagctccagaagttgtgggaggagaaccaggtgctcaagagggtatcagaaaggaacactggggtgagtatttcttcgagtaaagctaaaagtaaaattaaaatttacctgactttgttggttttcttgactgttggattaggctacatttgttctccatgatggtcctccttatgctaatggtgatcttcatatgggccatgcactgaataaaatcctcaaagatattataaaccgttacaaggtatcgtttactcttcaatctaatctgagtatttttctttaaaaaccattgatgtatttttcagggcaattactgatgcagtcatagtatgttgtcttattcagttcaatccataggatattctctgttctgagatcaatgttactgtacggatgattggtgcatagattttattgtcttttccaatgcagtgcaatttctgtcatttctttatcttaacatgtagagctctttagtgtagttgattgtgtacgagatttggatgattaatgaactttttgctaattctagtagttttttcctgataactctcttcgctgaaatgtctttaactttttttggctggatgactatgctttttatgttggtccaaaccaaaattgggaacataaatcaactgacaccaaaatttgcttttcttctgtgtgcagctgcttcagaatcacaaagtttcttttattcctggatgggattgccatggccttccaatcgaattaaaaggcaagttcatctttatatccaatggaaacaccctatgtttacaagaagttaggtaggggttggttttaacacaatgcttgcatgtgttagaccagccaagtaattattgaatatccttccaaatgtaaccattgactatttgctgcagttctaaagtcactggacaaggaaacattgaatgctctgacacctataaaattaaggcagaaggctgcaaaatttgctaaagcgacggttactacacaaatgaattctttcaaggtaaccatttctttattttaaagtactttagtggtgacatgatctaatagcaagttgcccttatctatgttttgtggtatttcctggtatgattgctgacttgcagtcatctaatatctggaattctgtctcatgttagcctttagtttcatatttctataattgtattaaccaatgacattgtgcctgcagcggtttggtgtatgggcagattgggacaacccttatctaactctgtcaccagagtatgaagctgctcaggtctgatcctattgtttatagtaattttgccattgcatcaaaacttatttatccatttcacatgaatgaaagcttggaggtttggaattaccttagttagatcattgatatcatcttggtcacattatagctgctagctctaataaaaaaaatagagctgtttactttcagttccttttagtccatttaccatcgttgatataaaatatataacgtgtatgcaaattttatgctgcgagaataaatactgatgttttctttttcatccttatcatatgtttttaatcaaggctaaccgtaacaactcttgttctccattttgatatgccagctagaagttttcggccaaatggttatgaaaggatatatctaccgcgggcgaaaacctgttcattggagtccgtcatcacgtacagctttagcagaagctgagttggaggtatgcttgaactttctacttgatgctattaatttgctgtcaaaggctttgttgtgcattaatttttaagtgactattaaatattcgaataaaaaattgacaattccgatttgtttcctgtttaatttcaataattttcttgtgcttcagtatgtcttctcagtgaaaagccactagatgtgtcacttatttcttcctgttaatattaggcctacactgctgcagaaaaactaccgagcttttttcatgaagtcctttcatgtttaagaacacttctcttactaaccaaccataagagcgctttatgtgtcttattacataaagcacattacttcgtacatgtagtctttcacttaattcatgattggtgatcttttattttttttctcccttttcatttatgttctttagatttcttttgaatttgattcctcatatcatcacatgcattccttctgttcttccagtattcagaaaatcatatttccaaaagcatgtatgctgcattcaagatcaccaatctgtctaagcctgggttgctggaggaatttctccctaatttatgcctagccatatggaccactactccatggacgattcctgctaatgctggtgaggtgatgccttgattgctttaatgtattcagtgagtgtcactcttataattggatttcatcagagccaacgtaattaatttcaaaatatgtggctaattttgaagctatatgcgtctgtacatggaaaatagcatattaagaaacagaaaacttcacatgttttgtagttcctagaacctgtaattcctagaaggctagaacttgattaagaaatactaagtaatatctacgttacagtgatataacatagtttgattgtaaatcatggcacacatcttgcttccaataaaaaaaagaaagctctttgccgatttatccctccatagcaagaagatgcttcatttcaagtatgggtaagatcgaataggtgatactggtatgctacacagcatttcatgtttttgtttcaccagcagaaacagtgtcttattgtctcagctattctggaattgtagtagatagcattatgtccctgtctattcttatgtgtctgctgcgcatactgtatggattcgcttcaactctttggtattctctacatattaacttgtctaagaagccctttcttctttaaccagctgttgctgtgaaccctgagctcacttatgtagtagttgagctgcaatctgtactagaaagtgaatcaacatctggtggaaatcaacgaaagcttgggagtattttgagccctgggagtcagaaaccatttatcatcgtggctgctgatcttgtctcagctctagagtccaagtggggtacaaagcttataatccagaaatcatttcctgggtcagccttggagcactgcaggtattttgtttagcacttctcacttcattatgattgtgcttgacctatttattgttttgtgtttatttacattatatttggtgttttcaggtatattcatcctgtgaatggcaatgaatgttctgttgttcttggaggagattacataacaactgaatctggcactggccttgttcatactgcccctggccatggtcaggaagactacataacaggtttgaaatatgggcttcctattgtgtctcctgtggatgatgaaggaaacttcactgctgaagctggacaattcagtggtttatctgttctgggagctggtaatgccgcggttgtgaattatctggatgaacagtgttctctcattttagaggagccttacagtgagtagattgacaataacctccacaatctggtttcacttgtgaatacgaaaaaccttattaagtttgtcttccaattgtatctcttggttcacagaacacaagtacccctatgactggcggtctaaagaaccaacaatattccgagcaactgaacaatggtttgcctcggtggatggtttccgtaatgctgcaatggatgcaattaggcgagtatcttggattccttctcaggtttgtaactgctatactttattttcctttactcttactgtttcactgaacttcccagtttgaacttttgttctctttagtggcgacaaagttcagtagaacacaaactgctatctgatagtgtttagcatttttgttcagtgctatttctcttctgcactggtacatgaaattctctatgctaatcttgcttttttttttgttgctttggatcctggaaacgtttgcttgatttcacatattatggtcaagcaattgcatatttgcatgtctggttcatgtaataatattgatagatatccttttagacccttgtaagttgtaagttatagtttcatgctgatatggaatgacctaattgtactgtctgctagtttcggtacatcatcttatgtaacttgataataactgagtttgtgttaatattcccaggctgaaaataggattgtggccatgacttcaagccgttctgactggtgtatttcgcggcagagaacttggggggttcctattccggtcttctatcatgtagactcgaatgaacctcttataactgaagaaactattgaacacatcaagggtatgtctacgcttgtgatttttactggttgaaaccatcgagtacttgaacattactgtggctcaccttctgccaaacaagcatgtagttctaacgtcggtagtatctagttcttgtcacattatgggtttgcagcatggttgtatccgagctatttaagcaatataaaattcttgtttctaataaaaagaataaaaagtgaattagaatgagatgccatcttttaaagttgtcgcatctaagtgtgttctctgatttgtatttccacaatgaggttttagaaaatttctgttctaggaaaaagcctgaagttattgtatccaataagtgatccttttagataatggaagctttattacgactcagtcaattacaccaagatggtacaatccaactgagcccacccccggcctctgcattgaatgcacacagccaaaaaagaaccataaaaaaccccatcccaagcacaggagtgtgaaggaaacataaaattagtggttatcaatccgtagactagactgccacccgtgctcctgggtaaaaaactcctgcgccacctggtccaaacgtcgtgataccatttgtcatgaagctgttaaccatttatgtttgcacttttctgaattagcataggataagccttatgcttgacaatgcttcccaggaatttaatttcattggcccagttatctctttattttgtgtgtgcataatagaatttctgggttattttcctctgcttggattttagaatcccaaaacatatgttaataaatatagtttgcttgttactcaggtatagtgtcaaagaaagggagtgatgcctggtggtatatgacaattgaggaacttcttcctgaaaaatatcgtgataaagcatctgagtatcgcaagggaactgatacaatggacgtttggtttgactctggtaggattatgttttcattcttcctctattaatggttttgttaacaaagctcaatgtttgatgctggtcacaatgcccaaaatcaatgttcttaggagaattccatcttgtcttgctctgctctccctctttgaaccttggcagttttcagatgtttgtagttttaactgctttaaccttcaaattgaaccaaactgcccaagccatgtgctataattctctcttttttatactgtggtagtgtaccgtttgctttgattttggccatacgtatgtcacagtgtggcgccgcttaggaaattaactatttttaaggtgtagcaatagacacttttagtagggataagattaaactctaaaacatcaaatgaaaaagactggaggtaattacttgttattgagtcgtcatgcattgtatagtttgccatatagtttttgtttacagacctcaacttttatttattgactctattaagggctcaaggcgtgcatattgtcatgattttctgggcgaagatagagctttgcatagtgtcacaatgttctaggaaaagatagagctttgctatagtgttttcttaattattttgccatcttttcttgtgtccttgactttttacttctgcatattttcctaatttaggctcctcatgggctgctgttttggcacaaagagatggccttaattttccagcggatatataccttgaaggttcagaccaacaccgtggatggtttcagagctcattgttaaccagcattgctactacaggtaattgtgggctagaaactcgaatgaaaatcccttttttgaaaaagcaagttgttttgcaacattaattgcccaaatcatggttcatccatgatgttatttattctagatatataagatgttttttgagccatattcggtttagtgtctgacatttcaaccactagttgtgcaaatggtgaaaatttttctgtaggcaaaggcaatagaacaatattgcttgatatagttgcataatctgaaaccacatgtgtgttttctcttgatatatttggaacattatattctgctggtggacacaataggttttctatttataatttttccattaaaaaacaggaaaggctccatattctagtgttataacccatggttttgtactggacgaaaagggtttcaagatgagcaaatctcttggtaatgtggttgatcctgagaaagtaattgttggtggtaaaaattcaaaggtacgttcctagaaaagcttccgttctttctggacttctagttttgcctaatgaaatatcaatcaaccttttgtagcaagaacctggctatggagcagacgttcttcggctatgggtttctagtgttgattacactggagatgtgttggttggtccacaaattttgcgccaaatgtctgacatgtaccgaaagctacgaggcacaatgcgattcctattgtcgaatctccatgattggaaagtatgttcagttcaacaactaaaatttatttaggttttggataaggaagattcagtaccaggcagcagaggccattttatatgttttcaatatttcaaacccatatcaaaatgccatcttttactagttttacattttgcttaactttctattggctttattctttcctttatcgatgcaaagcactgaagctatttctgtttagataacatattgcagtgaatttaatattttatacagcctagttgaatacttttgctgcacataattttaatctcttaattatctatctgttttcccttcttatgttttgtttgcacattcgtttcaatgatcatttattgctctttattcttatcatccttttctctctttcctgtcaatagccagaaaattctgtgcgctacagtgatctaccgaaaattgacaagtatgcacttttccaactggaaaatgttgtgacttccatgaaggatagctacgagaactaccaattctataaaatataccaggtgggttaagagtttgttgtgcttcattactttcattttacaatgtgtgtgatctcttctatactttttgagattgtgtgatcgtagttggtgtatgttggtcaatggtcatctttctgagaaatgggaagtgcgcttcatgattatgatttagtgaataagagtttgatggtcaaaagtgaaaacttttagcttgaaagtggaatgttcattttctaattactgtccttttctgttctccattctggatcttgaatgatatgtttattggattctcaaatcacatgcacattgaatgattatatcatgccatttatatgctcagaatggtatgatatgcatacattattaaaagcaaatcctattgctaaatctctatccatgattggcaaagagctgcattatcatcatctctagataacggcatgcctgctgcatcatttgtttgtcctcttcacacttttgtaacaagagattattgacttgtgtttctatttcagatcctccaaagatttgctattgttgatctctccaatttctatttggatgttgcaaaggatcgactctatgttgggtatggctttgatatcttgttcattggccatctgattacgtttcgttacactgaaagctcagtcaatgtcatttattaatttagcttgccagcttcacaactttgtttttatcttcttatcagtggccgagttagctttacaaggaaaagctgtcagacagtcctcagtgcgcatctgctctatcttgttagagccattgcccccattatgccacatctagctgaggatgtatggcagaacctaccgtttcaacacacactggatgatggatctgttgctgagtttgtttttaatctaaaatggccagttaagaatgaagaatggctctcggttccaaaggatgatgttgattttctgagtgttatcctcgaggtatgcactgtttctgcataactttgaagcgttcacttatgacaacctcataggttatatagctttgcagtttttttcctataggtcgaatatcaaacttacgttaaaaaataaaactctgccttcaacttggagacgtgcaactcagacaagatttcttgtatacacgagtaactactacttatgatctgaaatagcatcatttctgctaaattacctgatcctatagtttataggacattgcggctattcttgatttcatggtgatgagcgaacttgcatttatgatttcgtattaagattaatttcatgattaaaaaattccattacttggcaacagttgagatcagaggtgaacaaaattttggagagtgctcgaacaggaaagctgataggctctagcttagaggcaaaagtttatctccacgcggaaaatgctaacacagtgtccaaactaaaggagctggtttcggcaaccaatgacgctgatgctctgcaccgcctgtttatcacatctgaggtaaattcaaaactagaggctgcccttctgcattcaagttttttttttacaccatctttctttgtttctgcaggtggagatccttccttccgtaagctccgaaactacatctggtgtatcctacactggaacttttagcagtgagcgcaccggcaacatctggattggtgtgactcgcgccgatggcgaaaaatgtgagaggtgctggaattatacccgagacgttggatctttccttgaccatcctactctttgtgcccggtgccacggtgtcattgatctgccaccagttcctgctgccgcggctgtcagctgaggctgctcgagagtgacaaggaccactatcagcttcatttgaagattataggtggaattaattgtttttgttctacaattttgttcccctctgaccgatgatgctagaggaaggggaaacttgaagagggtttcggaaacttagtttctaacttcatttgttgcgtacaataagttgtaccttgatttttgaccattgcttggcttcctggagctgtaattgtatatttgtattgcagaactcacacggattaaagatggaaacagttttgcacacgaactcgcatctccttacttgacgtaatgtcagagcgctagcaaacgaaggggcatttttatacaaaaatcaggaaccaaacgaacgagacggtccgaaattccgaatcacgttaccaaatactactcctagcgacccaaacgagagttttgtttctctacagaacgtatcggctcctgtattgggcttagctacaaagttataatgaagatgacgagtttatgaaggctgtatacgataggcttgagacaataattatgtaactttttatcaattatggttggagattcacaaatagatttcaataatgtgttcttcttatcttagatgagttattttttattttaaatgcttgttctcaatgatttattgaactacactcttttttgagtgtaactttgtaataaattggaaaggctgggatattctattcctctataaaaaacgagttttgtttggtaaaagtcaatcggaggggataacgcagggtgcgagaattatggccgttggatctttagatctccaagtctaggccattccccctctcgtggccggtcgccggagatccatcacccgccgtcgcccgctctccccggcgatcctccccgagccgcgcgctcgcttcccccgttgtcaccaacctccacgcaggatccgcaccgccgcttcttctctgcccccaaccgcccaatcccctatccctcgcgagactttgcacgcttaagccttaagcttctactaccatttggatccggagaccgggagaagttggagggcacggactccggaggcgtcacccgcgggaggtcccctctgcaccggccggctgcgggcgcggctctgatggcgcacgagcgtggcggcgccgcgtcgtccgccgcggctcccgccaccgaggaggatgcgctgtgagtctgtgttgcccaaatccctaggtccgtgtattcctagtagacgtttcagtcacgcttctggtgtcacttgatctgaaggccgtggcgattgcagcgaaattcagggtccttctcttgttagtgtcgtgatgcgttcagtgtagtcgaaaatttggtggttcacttgggctctggcattgcgatgtagtactaaattttgggcgtatgcagggaattgagactttgagagaagggaagagaagagcacaggtgatgtttgcttgtggtatccctccagttggtattaattcataaaattggccgtgtacatccaaaccggatgtagaggccaggttttaatccatcttctagtagaaaatttaattcataaaatgaggagtataagcaagggtgacatggtgtccattaaggcattaatacagggtcacttagttgagctgacttagcattcacatgattcttctatgacattgttctaatgttgatttgtctcgatgccttcaggatgtataattcttctttcatgtaggtttattgacttgctacatgaagctcctctctctggtcatcgagagcctagaagcattgttggtggcaccttgtactgtatcttgttggttagtgcaaatttcttaattacccattgtttttatttgtgattatgcctgaaaattatttcaaatgtatgagttcatttgataaattatctacaacagctaaaacatatgtatctctttctatcgctaaacgccattgccttatggtactgtcattacccaacaagtccttgttttgcttcctttgtccattttgtaatagctgtattttatttctctctctaggcaggttatgctgctgtggcagtgtcagccccatggatattttaccttgtaccagacatgatccccccattgctatgcagctccaatgttatcattctgattctaacaggttctctttgagatcagatgtggcatgtttctgttgctgttttctgtttgctactctatttagttattttgttggttcatgttttatcacttactatgacttatggtttgcatggaacataacataggtatttttcaacaatattgggttcaccaggtcagaaaagtgagattgcaggtatttaaatgaaacaactgccttttgttttacttcaattggactctgttaacaccaaaatttgatacaattctttagtggactcttactttaaactttgcatattaactagcacatttctgctttggatgcaggggtattacgattttagtgagaaattgaagcgccttgctcaacttccatttgccaccgttgctagtggtaagtatagcaccaaataaatttgcccgatgctgtaatactagtgcgttcttcattttttttaatgtttataacaagtatgtcctacttaactgcacttgtttcaacatgattaaactattgtctttggtatttatttaaggatctgttaaggaattgagattttgagaggttcatatgtaaaatatttttttggcattgaaatgacccattgtccatattctttttgttcttttggcaggcgttgcttcaatgctcttaatcatagtctggcaacctctagtacacatactatcggtttctttattgctaaggtacacctttgtaattgcagctaacctctgcaaatttctctgttatgtcttgaacggaagttgaggtttatccggcatcttttggcatgaggtttggtctgcggattcccaaacaagtttgggaacatgaattattctcttctcatcctttcagtgcatgtataatttctttcatttactattatgcaggattgctattgtggttgaagctatatgtgctggatgtttcatgagcttatacttatgtgagtcaagtactcaagtcatttgtgtccttgttagatagttcatcttgacttctacaattgcagcagttatgcttcccccaagcagatcctcagccatgcaggacaaaccttgcatgctggagggttcaaagccttgtcatcatgagtttcgatctcgtcattctttttttttttttgctcccactaagaacagtgttgcttttccttagaaatgaaagtttcaagcccgattatttgttttttctaagatataatgcccactcggttctttttacagggcatatccacaagtacaactctctgaatgggcaccctgatattttgcggtccttatattctgcactccaactccaaccatctagttctttggaagaacgaaggtacaacataagggtgtacattaaatgcattgaacttttccttcttaatttacaataaaatactacctccgttttttaatagatgacgccgttgactttttctcacatgtttgaccattcgtcttattcaaaaaaattacgtaattataatttattttgttatgagttgttttatcactcatagtactttaagtgtgatttatatcttatacatttgcataaaatttctgaataagacgaatggtcaaacatgtgagaaaaagtcaacggcgtcatctattaaaaaatggagggagtagtgtttgaagacacgtataaacatgtactatgcacagtttctaccacttcaggcttggcgtttgattttctggcagtttggaaaagcattctttagtccatgtttatcagaaacatctgtattgaacctatatctagaaggatgtgccttcacatgagttacaagtgttgatatgttgccgaatatgtcatatgtgtacttggcatactgccagtagagtttcacaagttatttttcttttcaccaggtattatgatggtcgtttttctgaccagcaaatggctctgcttcagtaccaaagggagaatattcattacctgagtgaggaggtacttggaagatcaatgcagtatatccattttaaaatttgattatgttagattgtgttattatttaaatatttgtacaagacaacagtagattactagcattactatttcatggaggaattagctgatccttgtatttagttctacattaacttaattggccagttctgtagtcagtgctgaagttctcaataataatatgttggaacttccagaaaatttcttgttgaataaccaaaccttttattttcctgaaaggtgctccgcttgcaagaatgcttaagcaaataccagagaactgatgttgggagcactcctcaggtctgcacaacactgattgattgtgttgcattaattaactgaccagcttcgtaggtgcaaaattagagaaaggaactttgtagctattatgtttatgtgaattgatggacttgcatcaacccccttttaattctacaggccgatcttgctcatctattagcatcgcgtgatcaagaacttagagcactctccgctgaggtaattaaacctatattgtaatgctataatgcctctgatcacaaaacataattaacttgcctgcttacactccagtccttgttattttgaccgcgttgttatcttaagccaagcaattttctatattctggccaggcaggtctccaaaatctcacctgtctttggcctactttttatgaactcttgcaaaagctattactatagatgtttatagcacgataatttcttaaaattatattatagctcaactttgtagctgtaaatgataagttgagaaccatctatttgagttgttcatctttagcaccataactaaaggtgtaaagtctttattaaaattttcatcttctactaataccatactaattgaattcacagatgaatcaagtgcattcagagcttcaacttgcacgtagtctgattgatgaaaaggactcagagatccagcgcattcgtgtgagcaataatcaggtattttcacaagtaaccatcaagaggtttagcttagcacgtggatcatgcttattttacttatatcgtcttccaaactgttcctgcttgattacaaacatgttggatgcagtatattgaagaaaatgatagactcagagccattcttggagaatggagcgctcgagcagcaaaggtacactggctaaagttctgttgtgggttgagttgtactagcattatctctcattgttttgcatgtgttcaacagcttgaaagagcactggaggcagagcaaatatcgagcattgaattacggaagaacattgcaaaactccgagggcagacttacaaggatcaaaacacctgatctcccttgttttcaggatatattcacctatggcgatgtttgagcaggtttatcaactcttcagctgctaaaggtgccacctgtgatatccttgaattccaaacctctagtgataagaagagtgccaacacagtccagtttcgctaacaacaaagcaaggtacaagatcatcactcaatctgatatgcatcaaggaaaggaaaaatgcctttgctacacctctctcgtgaatgtacagattgatgtttgtaaatgttgttcgagagtatggtgcagcactggttttttgtgcttctacctgatgcttctacaatgacatcttatcatggcaagagttgtgcattgttttctgagcacttgcgaaatgaaaagtgagcatttgtgcctaagctcccccaaaaaggtatatcagacttctaatttcttctgagttgagagtatcaaatctgtactgcagtctgagatgctttgctaccctttgattcagtttgctttgctatcttagattcagttggctagttctttttcacagtttagtagctttatattacatatgtcttgggcaatgaagctcatgaccaacaaccaatgtgcaaaagcgttcttctccctccttttccttttggacaactggtagagggagaaagttaacaccgacaagtcaatacagaaccaaggaatgttcctgagaataattttgctaaaattctacctcgagttgtcccattctttattaatctacttgcaaattgtaaggtggaattccacatgtcgttaggacgttaggccggtaggcccccatccttgactattgttgacactgctatgcttgatgctgtcttctttaatctctagaaagaaacttgtggggcctttggttgttgaaaatgcaacaacaaacgaccctgaacaaccaggtgcttcaaatgaatagggacatttgagcaaatatcacatacttcgtgcacgagtccaatttgttataattttcaccatacaaaattttgtagttctgcatctgaacaacttctgaagttgcctcaagcaataagcaatttgctgcgtctgaaatacggcaagcactgattattgaaggattactgaagcgcctttttcaaactcacggtaggattgacctcatctggaccgtccgatcgagatccagcggctatattcctcccaaaaaaataaaaataaaaaacgcgccgggttccaaccgtacgagccacgaatcctctctttcccggccaccttcctctcgcgttccactgcatccttcctttccttcctcgaatcgaatcgaagctccgcctgctccgcttcgcttcgccgacgactccggccgccaccgcaaccgcacgcggcggcagccttaccggatcctccacccccacccgaacccgcgaacccgcgtgcccgtgcttcacgcgcattaaagcggcagcaaggccacctcctcgcacctcgctcaccgcacggcacacgcgcccgggggatttggaaattggaaatttcagatcccagatctcgtctcgccgatctcgccctccgctaaggtacggatcccccgcgatcgctgcttgcaagttcagaaatgttgcggccgcggctgctcagcgccggatctgttgtgttttcctgtggtttttaggtgtttgggattttttttcattttgttgtgcaatgtatggagtgtgagattacttgtggaaactgattagtgcaatgattttgcagccatgggttcggttgtggatgctccaacagttgtggctggacaggaggtacgcataatgctattggtgtactaatttagtaataattttccctactgtttattggttgagcttaatgaactgctagatagtttcctatattatttgagtatgtttttagaacacaactgttatctgagaatgtgcaacatgttttccttgaggcatcagagattataaattagatttcctgatcctttggctgtgagtttcgctacagtcaagggctggagcttgaaatcttgcttcctttctgtttataaatttaaaaaccatttatttaggctagaatatgtcgatgtatttctgttgtgtatgattcatttaatcttcatgtatactattataccaatataaattttgactccttgagtcacaacgtaagctcatttatttgtttattcagttcatatccttgcctcatactgtactataatttatgccatccatagcttgtcttatgggtgaaatctgcccctcatgcaggaggtcactgacaacatgttgggtgacaagaaagttacagttgtatttgttctaggtaactgcttaccttctactttatgtttgattataatgtaagtctcatatgagaggaaacgaacttataggaaactttagatatgcaatgaattgacatgataaaatttaagtacttacatagttatatattatatataaataaagagatatattatcttctgtttctaaccaaaaatttacacaggtggtcctgggagtggaaagggcacacagtgtgccaacattgttgaacactttggattcattcatcttagtgctggagaccttttgcgtgcagagatcaaatctggctctgagaacgggtatcttattttcattccataagaaacccaactgtttccttttgtttggaacaagcttttccaaaattcaatttggttatgtttcctcctttgttcaatttctgtctgttactactaaatatttattgttacacttccatgttttatagaactatgatcgagaacatgataaaggagggaaagattgttccatctgaggtaactataaaactcttgcaggaagccatgattaaaagtggaaatgataagttccttattgatggatttccaaggaacgaagagaatcgtgctgcatttgagaacgttgtaagcacatcttctccttgtacttcaaaattttagatcacttcactcttgggtagcaaacagtcatgactccttagtagaacgttcttcaggggccactcgcagcctgtgtacacacacacacaatgacaatgcactaatagcattaatgtgtcaaatgtttcagacaaaaataactcctgcgtttgtgctattcttcgattgttctgaggaagagatggaaagacgtcttttgggacgcaatcaggttttcctcatcacttaagtgtattctccattccattttaaaccttaccaccttatcgccacatgaataacctgttttctgcttccaactttttcttttgcagggaagagttgacgataacattgagactatcaggaaaaggttcaaagtttttgttgaatccagtttgcctgtcattgagtactataatgcaaaggacaaggttaaaaaggtactattgctctttgaatgatgcaaaaacaacaaaaaggatggatagcaataggtattagatgctatacattcgaagtggaagtagtaggagtataataatatgaaagactattctaccatgatattaaagtttcccatgatcattatgagtttctgaccacgattttctttgcacacttacatgaattactgcctacttattttctaatgacttttgacacctattgtaaaacttgttatcttatcagattgatgctgcaaaaccaattcctgaggtgtttgaagatgtcaaagccattttcgctccatatgcgccaaatgtatgtttccacttttctggtttgttatgttccttttgcgtgtatcacataatcattgcctattttcattttgcacctcacattatgatcttatctatcaggccgcttagagcaatagaaaggaccacatgagtgataaattgcaccaactttagaaaaggtactctctctgtcccataatataagaagttttagagttggacacggttatcaagaaagtaggtagaagtgagtggtggagggttatgattggacgagtagtagagataggtgggaaaagtgaatggtggaggcttgtgattggttaggaagagtatgttggtgtagaagttgttatattttgggacaaatcctaagagctaaaagttattatattttgggatggagggagtacatcttctttctctgcacctctatgccggttagcatatctgatcataatatgcaaaatgaaataatgataaacacaaaccatgccaattaattcctagtatgttgattcttttccttttgtttttggtcaaagcaatcttatgtgaattgcttgcatttagtcaaatgataatacttagaaccacaggtgctaaaacgagcccctgctatgccagtttttctgttggcaatgaacaagctcttctgctatgccatttctgaaccacattcaatcttcccctgttctgttattacttacaccatgtaatatatctgttgcaggctttgctctcaggtgtgactacaaatctgtgattacgaaaccgttgatatagaagagagttttggctcatatgagctacctgcatacccgtaggcaatttgatttgttacttgcaataattaattttgatccccatttcctgctagattaacttttacgagagttggcgtatcgtatgtaatgctgtacttgtaccaatgtatcatttacctcatggacgatgaaactttgtcctcccgccagtttctggtggtataatacagaaagtggaacttccgaatttttttttggttagtttctaaaacaatgttcactgaacagctaataattattcaatttgttattgacaagcctttgcagactgtgttaacttgattgcacattgtaatatgatagtatccatatttccttgtttcatctctttgcagtattgaccagatttttgtttgtttggtcagcttaatgagtgtaagcaccagagtcaagattatttctgttcggtgtatgttatgtaactattctctcgttttctctctttttaaaatctgaggtcaacgttgatccggtcgagaaatcaacttctttttttcacctcataaacagttgcagcatgtccataagaaaatgactcctttttttgtcctcatttcaccttcccgctatttgcagtttttttggccaggttcaatgaatatagttatttgctatgagacaaagcagaggatgccatgccatcaggcttctacctcttggggcccttttcagtgatttggaacctgcaagcttgattgatggttaccccatgcagagggaagagagcaagtgaacaaacaatgacaagcactacaaggcaaatgcaaaatatgtgtattctttttttaaaaagaatatcctagcgacaacagtttcatgtccagggacagggaagaacaaagcaaagaagcgtccccggttcatccctttctttttctcttgcctttttcgtctggggcctggaagcgtcacaattataggcttcaacgagatagttaggcatgtggcattgcaagatggttggcaagtaatccatgtgagcggcaacgaaccacgcgctgtcatgctcacattcacgcaactagccaggatagcattaccagctggagtagcaggttgcaggtagcagttggcaggcaccagcgccggcacaccggccatcctgattccgccggcttccgccctttccaccgccatcctctcgccggccggcctaccgccaagaaagtcatggccatggaggagcttttgccttttagcagctgttcttgtaagtttgtagtttctttaaacaattcagattctaagaatctatatagtcctacgtagaatatagaacatgaactataactcataattttataccagctagtatcaccggttatttctaagaatctcctgctctcttaaacaggattgagacgccgagctatccggtttcactatggctgtgtttagatccaaagtttggatccaaacttcaatccttttctattacatcaacctgtcatacatacaaccaacttttcagttacatcatctccaatttcaaccaaaatccaaactttacgctgaactaaacacagcctatgtaagttcacatgatttttggtttttgaaataaaatcacatgatcagaaggttgctatggtccccagtttacatccagtggtcacatactcacattgtacccctactgtatgttgggcgacttcaggataggatccgttccgttgatcgaatcatggatcaccccccccccccccccccccacaacacaagcccgtgcaatgcatgccaccaaatacgaagagacacaattagtacagttctagatttgccagacaagggccctttcagcatcttgttcctaatctccgcgtcagacatacacattctgttattcttatatcttaatcagacagggcgcagatgggattgcatcatttcgattagttaatttgcaacgattacgactcaggcactactgttgactacagttggttaattttgttgaaaaataataataatttggctggctgttaacactgttttatcgtccttcatgttgggcttgactgaaaacgtgaaacatgatggttttaactggtgtatgctaaaaaataaaaaagcagatgggccgtacagagaaaaacagagcgggaatgaagaaaatttcagagttcggcggccggccgtgcgctcgcgtcaacacgttgtactggccgttgattctgcagattccgcgaatcgtgcggatgctcgccggcgcaacccacctccgccggaatctgcagcatcaacggccagtagcgctccacgtccgaccaaaagcagcatattccacggttcccccgggtcgagatgcccagctggtaggcctattttcttgacaaatttgaattttctggagcacgtcattgtcaagtctcatggacacacaggacatttgaaaaatactaccacaacataactaaatttataaaagaaaatcatattttttgatatactattcttgttgacacaagctcattttttaactttggatgaaaaataaaaagcgtctaaaattgcgtagtaataaccttttcgtcgacgaggcataaatcggctgcacgtgttgctcgccttcgcacgggcggaagcggaaggagacccgcgccgtgtttagttgggggagagaaggagagagagagagggcgagtaaatacggaaacgaagccgcttgctttcggtttcctcctcccccatttccttggattttgcgaggtttcctcttcctccacgctctcgaatccgagcagagaagaagcaccagccggggaaggcacgggaaccctaggttggctgcgccgccgcacgcacgcacccgctccctttcgtgctgctgctgctgctgttgttgccgccgcctgcatcgtccccgatccgccggccagccagctagctagcgagggaggccaggtgaggcgctctcggcgttcgttgcgcgtgtggtgaagtcttcgggtggtggggatcgcgaatgcgggtgggtttgggggaatttctgtgagggtggtggggatgggtttgggggaatttgggtgctgcattgggggttggtttggtgctctgcgtgaatctggtggggatagtgagatcgtggtttgttttggtgctaattcgggagttccgggtcgagtttttaggtgattttctgagctgggggtgaggctttgatgatgggaaataaaagtataagcaactagtgtgttcgatcgctacttttgttggcaatattgagatcataccatgtttctctctctctttttgtgtgtgtgagtttcagtttgtgaacgcctgctaaggagaaaaaaggacttcagagttctcacggttgttttcagatgattatttatcgtgtcactatatgaactaatgtaaatagcttagggagtagaaatcagaatttatgtaaaaactgtttttagcaacacatcctagcagacaagttggagattgacttttacatatttgtcttagtagcaaacgtctccaggagtaaaaatcgatgcaaaatcattattgagtaatttattagtactgtcttcttattcggttactttgttctattggcaggttatactgggctttcctcctgataaactcgttctaaagacattcggtgttgccatagttttccaagtgaactcactatgaaaccggactggtcaattttctccaagtttgaccacaatggagggtacctgcataaattcccaatagattctccaatatctcatgatattggattaggattgatatcacattttggaaccttagtcgagagttcctttcagcatccaaggcatatatgttctacagggaatggagcagttcaggaagcattcagttgcttcaacaagtttgctggtgctttctatttctggctttctagagcatcaaatcccaagattttccacaggttgtcagctattgcaggctcaagttcaagagcctgccagtcgcaaataaagcaagtgacttcttgcatgcagcatttggccggattgcgttttggttctcaagttagagaagagcacgctatacaaattcttttagcaaagcttgctaatgcaacatttgggcgactgtggaacgaggtggaggagcgccatgcctgtaacattcttatgttagctgctgctactgtaccaccatttgaaaacatgtaggttcttctatttatattgtttttgtacttccaatgcctgttccatttggctaattcctgtattttggttttcattctatgtgtactttatcgactgctcatttcttgcatggacaagatcgccgaagatgcttgcagactcaatgacattgggaagagataatggtcgtaccagagaacctgttgatcagcattctttggaggaaaaccattcaggctgtacttgtgttgctgtgccaagaataattttaccagaagacgcaactgaaccaaaaactgggataaagttccctactcttctcgaggataattcaaatccaacttcagaggtatttttcaatcttgtatataattgatctgttctttttttttccttattcatgaatgctgataaatagcttcttgacattgtgttagcaacttagtatttcgaaaataataccacaatgttttattccaaatccataatgttgcttgatcttgacccccttaggcccttaacgagttcaactaacggttaaatttacaggtgctcgtcgggatgggctttagaagcatgcgaataatgagggtcaaaaacctgaatctctatgcctttggattatgtgagtataataaaatgtcatgtttaatattattacttatgaaccttttagcataccacataaacgatgtttctttaggttactaatgttgtattcttgtagatatacaaccagattctatttgcaaaaggctgagcccaaagtatgcttctgttccagtttctgaactgaaggaccacccagatttctatgaagatcttttgaggtgtgcatgctctattcatcttttatgcagatctttcccaggttctggcacttaacacatactatgcagtacttgtgtaacgccaggtgttcatttagtaatttggcagaaattatatggatcattaaaagtattggctgttttatgctagaggttaatgggactattccaaacctgcaatcatttgatgtgcttttgaggacttcatttgagtagttttttgtattctgcataagaaacaagaggaatcttaatttttgccccatctgcattcctttcgctctgatctaacaggtttgtgttgtacctgtcatgttgtacagggaaaatattcatatgacagtcaggctgatagttagctacaatggtcttagcattggcacagtgcgggagtatgtattttagttttcttgtgctaatatcagcacattcttatctttagctgtagttcagaagatacaatctctcaatatgcaagctaatcattttctttaacactcttttcagtgcatttgagaagtccctttgcttccgattgcagaaggtacttgttaattcggcagctaaaaatattcttggctaattatataggtctaaaataatttctctgtaccatttcaaaccagatgaatcctaatactgattatcattgcttgaagacgtttggttcttattttagtgaagatatttgtatacctgcggtaagttccaatattacgtctggcctaacttggtacttctcatcataagatactgaagtcaatatgactgcagggtacaaagatcgacttccggcaaacctctgatggccagctcataactgaaagttagtatcgtatgcctgattggttctgcatggttagaatttttacacctgacaaaaatgttgacatggaacgtctttgtgcagttgatggcaaacaaattggtgctgtccagagcaaagatctttgcagtaagtatatatattcgttctttctaacttccagaaaaaaaaaaagacagaattactgttatctgtcattatttatttggcaaattccttatgctgtctttatgaacaggggctttcttcgatatgtatattggtgatccacctgtttcagtcgagaccaaacaagacattgcacagaatgttggtggactcattagaagatgttattgaaaggcataattaaacgacagactggtcggaattatttcattcttcgatacaaggatactagggtgagggggaagcatatacaaagacaggactaggaggagaggatgaactgtatgtatagtgatagatcaacctgtaaactaaacagagccttagcatctttctccggagcaattgcctccatgctttt

SEQ ID NO: 5419 - DNA, 56892 bp, Oryza sativa
cggggggcgcctcgccaccgtatatgagccagcggcgcgggtggccgtcgtagtgcgggtggtaaggctgcgggaagaagtgtggcgggggcggcgcggggcgcggcggcgggtcgatctcgtggaggaacctgccgaagcagcgcgggcagaagacgtcggtggacgggtaggagatgatgcggatggcgcggccgcactggtagcaccagtacatgcggcacgtccggtggtgccgcacgccgccctgcgccggcatcgtcgacgacatggcgtggatcgatcgatcacacagctaagctataaccacttggatcgctcgaattctgtacgggaaaatcttgcgtggggtatgcatcttgcatgggcacggcgccggttttaagggcacgcgcgctattgcgccatggagagggagagctcgacggttgattgggtcggcgcgcgcgcggggaaattaagcgagtgcacgggtgggaagggatggctttgcgaggtggacgaaagcgattccgcggtcgcggcggcgtgtggcgtggtgaggcgacggcgtacgtagtagagaagggcgcgtgcagtgttgggcgcgggtgacttgtgcgtggtgcaaaagcgcgcggcttgcttgccggccaggaggaagaggaggacattggcgctcgcgggaagtaactgtgtcggttgggccatgcgggcagcaaggcccataggatcggcatgtgaatgtgggcctattctggagagaatcaggcaggattcgaataaccgtggacctggaatgctgtcgggcccaaagaggtcaggctggtgactggtcccgtcccgtcgggtggagcggatgggcgggcggaataatgctgcccgtgccggtcacgaatattcacctgcatattcttgccactgtctccgccagtcgttgtgaacgttacgctatgaactggtcgccgccgccgacgacgacgcgaggcatctgctcggagaaatatactcctaccatgagtccatgactttacagtactcgtagagtctcataaacctttcagccaaatataaagtcgacgtattaattggtcggtattttcatatcgaaaatagtagctcttgacccccaaaaaaaggaactgctgggtagctcttggccaataattatttctcataacaaaaaggagatgactaagaaaaaaataagaggtagtgcttgatcgtattcaaaagagtgtacaatacacgagaaaattttggcaccgctaccattctctagccataaagtagtccctccacagcccagattccaggcaccaacaacaaccccaacagacgctgacacatcgggcccacatattaacgggccccacacgcagcgaccctccggttcatctccacctcccaaaagatcgatgccctaacaacttggaagcccatctcgcctcgccgccccccttcatattcaccctccgccgcctcgtcaattccacgcgaacgcgagagctctcggaaagcaccaccaccagcacagagccagcgcgagagagagagagagggagaccaaaccccatcccggatctctcgtcgtcggcggcgtctgcgatggcgctctccgaccgctcccgcgagtcgctcctcccgagcttcctctacacctcctccgccgcgaggtccttcgccaccggcgccacccgcttcccctccccggtgtccccagcttccccggctccgggtgccgtcgggggcggcgcgcccatctcgatccaggctcccagggagaagatcgagatgtactcgccggcgttctacgccgcctgcactgccggtgggatcgccagctgcgggctcacccacatggccgtcacgccgctcgacctcgtcaagtgcaacatgcaggtgagttgggggaacgcctggatctgtgaccctgctggctttggcgcttctgggagccctgctccttcgtagatctggtgatatttagttttgttcgatggttagaggaacgtgtggttgcgaacttgtgatatccatctaggaatctaggcatgtcgccatccgtttgcgtaaatccagccgcgcgcgctttgctgtgcatacagctttgactgtcgttaaaatctgtagtttttatttgtcccgtcaatgttcttcgtcggttccaatgtgcttgcttctcattatttagttggcgtagggattgatgaggagtagatactagagtagctatcgatgttaaacatgttcagtactagtgtttctgcagttgaactggcgtatgtagaaactggagagttgattcacctgccctcttatttaagttacactactaatccttcttctttacttggttgcaaattattccgctaccagcaattatatttatctactgttaagttccaagctttttgttagtgttagtgtcgtggagcaaaatgcttgtgtatcttttggtgaagatactttatatttctcactttgataatactttatgtttctcactttgataagtcgattggtgcatctcccttttgccggtctctactttgtttattggaatgtagtttgattctttgagatggttgggtaggcaggtaaaatgatcggtgaatgtgcgatgtccagtcaatgtttgttttaagttgtaattgaaatgtttctattatggattttggactgacaagttttggttgatttttttcagattgatccagcaaaatacaagagcataacatctgggtttggcgtcctcttaaaggagcaaggacctagaggcttcttcaggggatgggtgcctaccttgcttggttacagtgctcagggcgcatgcaagtttgggttttatgagttctttaagaagtactactcagatattgctgggcctgagtatgctcagaagtacaagaccctaatttacctcgctggatcagcttctgctgaggtgattgcagatgtggctctctgcccatttgaagctgtgaaggttcgtgtgcaaacccaacctggattcgctcgtggactgagtgatgggctccccaagttcgtcagatctgaaggcgctcttgggtaagtataaataacatgtttttatcttagaatctgatatgtggcaactctttctctagttttatgcgccttgacaaatctcattccttgataatgacaggctttacaagggaattgttcctctgtggggtcgccaaatcccttgtaagtattagtcactttgctacattgatattatttttaatgttttcatttatgtaactgctacacgagactggcactaaaacctgatgttccaggacttgcttgtgtgataattctgcactatcttgtttttctttgatagttgcaatatccaacactgcttcataacttgctaacttgtcaactgaattttctgtacaagtgaacttctattgcctccatggctcatgctgatattattcacttttcttttttttattgtcaatattttttttcatagtttatatggtttattcacttaagttctgtttacttattcatggttgaaatttaattcatttagttgaactagggttggtcagattacccatgggttgtcctgtgtccacccctaaacactggctatttcctgaaacaacacaaaaataaacccttcacatctgttactattttctgttggtagagaactccgtttcaaatttccttaaattaactgttctgttttggataatgtagttatcagtttaggcggaagtttactactactaaagtgttttgtagtttctgctatatgtgtagttccgcagattggctatcctcagttagcttttgttaacatttatatatatatgaatatttattgaacactctaaagtatgaaccatcaactgtgtatggattaacagtagctgtcaatgtaacagctatgtaactattatgtgataaatttatgcgtacggggatttgaacacagtgtggcatggcaccaatgagtttttgtttgtttatttttatgagagctatgctgtcatgttatttcttctatgcatccattgaatatttccatcgtgtccagatactatgatgaagtttgcctcctttgagaccattgttgaaatgatctacaagcacgctgttcctgttccgaagtctgagtgcagcaagtctttccaattgggtatcagtttcgctggtggttacattgctggagtcttctgtgccattgtctctcatccagctgacaacttggtctctttcttgaacaacgccaagggagctacagtgggtgatgtaagcatgtcttctactaataaaacccattatgtgcaagttttatttcttatcttgatgttactttcatgttggttgactgcatatgaaagttgcatttctgtatgttcctttcatcagagtccatcaaagttgtagttaatgttacataactgctcccatcaaatcttcgtaaacactagaaaagttatagcacaagagaggtttatttctataggcggattattaaaaatagtctgccagtaatgatgatgaacttgtgtggttaaatgagctgtcagtatcctaataaatatgggatatccgatatatttatgtactaagctcgacaggaccaccatataccaagttctatatggaatcaagtttcatacatatggcgaaagtcctgcatatatatggaatcaagtctcatgtattctattcatgttcttatcatgttaattgaatgtacatgtttgttgtattatcacaggctgttaaaaagcttggtctttggggccttttcactagaggactgccccttcgtattgttatgattggaactcttactggtgctcaatggggtatttatgatgcttttaaagtcatggttggactgtaagtattccttttgcttgctaattaatttaattgttagaacattaaaaggcttttgaggaatcaaggacttatggcccatttatatattttcagtccaacaaccggtggtgttacgcccgcgcccggtgcagcagagaaagcattgcaagccagtgcttgattcttatgcagagataatggcgatgtattcctgaagatccatctttgttgtggctggaattgtatcaattacttgagtttagcacctaaatcttaattttagtggatgattcttgtgtcatccttttgatgagaggaactcattaatcaggtgaagtaggtcttttttgcccccgggaaagtttgatgcttgatacataataaatttttggacagcaaggctgttagagctcaggttttggcatcacctgtactgaggaatactcacatctttgtgttccttaaaagcatacataccttgaatcaatgctaccctattttttttgttgcaagtcagatatatgtgtgtgaaactgtcaataccaggaatctcttgcttccggtggtgtttcatttctacacgagggctgtgttcgcatgtggatgatgggaacatagtgcctccacacggaaaacggagcattccattagcacatgattaattaagtattagctattttttttaaaaaaaaatagattaatttgatttttttaagcaacttttatatagaaacttttttttaaaaaaaaacgcaccgtttagcagtttgcggaaaaggagggatttaggttgggagaggtccgaacacacccgaggttggtatctaaacaccagttgaatctaaactctaaaggcatttttctgccaagtcggctgccgtagcttgatgtgcttattttgaccaggtggcagaacttcattctatttcctttcttagccttcaggattttcgttttgcaactgtctttctaatctgaccactgtttgcatcgggggcaaaatggaacatgccatactaaaatcctcttgatctcggcggcaaagccctctgaagtctcttgtccaatgcaggccacacagtttctcttctttgtttcgcggttgctgcttgacctaaacctttgattgatcttgacatccagcgctagttgactttcgtatgtgcagtgttgcggcgttaaagcggtttttgtatttccctggtgaaagtcatgcaagtggcgtattgacaatcaggttttctacggctacatcatgtataagcagacgatcttcgtccagaattgtccgtgctcagcgatgctgccgtacaaatgtacaatacatacctgggatgtatagcatgttattatgcatccataatcataacctgctgcagaaggaacgtgcagctatcaaactggcaataggatatgtacaaaatcttgatgcatgcatcaagttgattcggaaaacaattgcaacttgcttcaaactcggcgaaaaacaattgcatcgaaacatgtctactacttaacatcaaattgacggtttgagtgtacaagctcaatgtctagttaacagcaacttgccggttgattgtacatcgacattctggatgaggtcgttgtttagatcatatgtgttactctcactttctcaaaataatcatcataaatgtttatgcaccaagaccaatgataatttaaatcacatcaattaagacaccatacacacattttcctacatatcgagaagaaaagagaacagagaaaagaaagtgggctatagatttgtagccggctgcaacacgtactccaagacgttatatgtgtataagaggtgggaccgggtattagtggtgtagtatatttttatagttaactattgtataaatgtgctattagattagctatagataatttggagccagtagttggctatactattaaactttctcttagcatgcacatattctcctatgctgtattaattgtattttgataaaattcgtgttcatgcgattatatgatgatcaatttaagaaattttaaattttattatatgattatcaatttgggaaggagggagtattaatactgcttctgatcatagatgatgccttgagaagcctcagttacaggagaaaaaaaaattgcttatctgagcgatgccatgtgatttgtttgtgctcatgattaagaaagtaaatcagccgggtttaaaaccaagtgcggttttcctatcacgtccacttgcacgcctgcacgttggttgctaactaatcaaccaaatctgcacgcatgtgatgagctgcggatcatgtgccgatctccacgcaagcactacgctacagcgagcggcgccggagaaggaagctgctgccgtcgtgctccggctggccggccggtcggccgcgacgccgcgtacatcacgcgtgacgtcttcacgtatcacaccacgttaaacaagctctcgcacactcattccagagacgagtaaacaacagagaaataaatggagatcagcatggtgcccctaccttgcctagcctccaacggacaaccatataatttgtagttaagtacctccctgaacaagagatacatttgttaactagagttagagcaggtacaatagcagactattagtcagctgtaaacatattttaatgagataaaagatgagagagaagagcagtggactccaagacgcaatatgtgtatgataggtgggactatattaatagtatagtaagcaactattgtatgaattagctataaataaattggagctagtagtgggctatactattaaacttgctcttagacgaagtacaggcgtactgatgacgatgatgatgttgatcgtgcagttctctcgatctataccactgtaacctgcccacaaaaagggtcaggttcatatgaccaacccttcatatattttggtttatcccccctttcaaaagacgctagctctcctcactgcttgtgatctattttgtcaggacccaggattgattccaccttataatcaccataaaatatgtgatcatgtactaataatactactcctcctaagtctaaaatatccaccaaactcttaactaatcagcaaagataaccaacacactggctggccagtagacatgcatatgaaaaaaataatatgattgcttcgaatcgaaccgctccccgcgttgccggcagccgattcgatggatcgccacgttcaaacgccgccgttggctcgcacaaagaatcaaggctttcccttcgaacttccaaaaattcggtcacaatatgcatgtagcattaggggttggtttgttttgaggcctatattggccttaccaatatttagcaatttcaatagtgtttattgtctatttggtgtggagctaaattttgacatgcctaagaaaataggccatttcaaccgttaatttaggctattttggcttcaatccaaacacaatttttcctttgccaaaattagccatgccaaaagttaccaaaatttgacattgacaaaaattggtaaggccaatttaggccacaaaccaaaccagccctagatatagacaaaaaaaactaattgcacaatttgcatgtaaattgcgagacgaatcttttgagcttaattacgccatgatttaacaatgtagtgctacagtaaacatttactaatgataaattaattaggcttaatagattcgtctcgtagttgacagacgaaatctgtaatttattttattattagtcaatgtttaatattttaaatgtgtatccgtacacttaaattttttttttgaaaaacaggcggcagcgacaccaactctctagccgcacgctgcactcgcgagtcgtcgtctcgccgcattattattttttttcttcgtctcttgcacacgcagatcccagcgcggccaatggcgccacccgagtcaaccccctctcgcggcacaaacccacccaccccgcaatcgcaatgccatcgcgtcacgccgcctgccgctcccgcctcccccatgagatgacccctcccccgccgccgtcccatgtgctcgccaccgtcgatgcggcggcatccgctgctccctctcctcgccgccgtccttgtcggcgccgccgtccgcgccgggaagatcgccacggaggtggtcgtgccggacttcgtggcgtcgtacctgctgttcattgacacctacggcgtgttcctccagtccggcggcggcggcgcgttccaggccgtcgtgtacaacccggcggggcagcaggaccggtactacctcgccgtggtgcacgcgccgtccaagacctgcgtctgggtcgccaaccgcgacgcgcccatcaccgaccgcgccgcgccgctgcggctcacggcgagggggatctccgccgaggatcccaacgggaccgtcgtgtggtcgacgccggcgttcgcgtcccccgtggcggcgctccggctcgacgaatccggcaacctcgcgctgctcgatgggaggaaccgcacgctctggcagtcgttcgaccggcccaccgacgtgctcgtgtcgccgcagcggctccccgtcgggggcttcttggcgtcggccgtgtcggactcggactacacggtgggcggctaccggctcgacgtgacggcggccgatgcggcgctgacatggaacgggtcactgtactggctcctgtccatcgacgtcaaatccaccagagatcgcgacggcgccgtggcgtctatggcggtgaacggcaccggcctgtaccttctcgccgcggacgacaccgtcctcatccagctccccttgccggacgccaagctgcgtatcgtcaagctgggcgtggaagggaagctggtcatcacaagctacgcttcggcgaacgccacgtcgccgtcgccgacggacgctgggttcgtcgcgccgaacagcgggtgcgacctgccgctctcctgcggcgcgctcgggttctgcgcgcccaacgggaacgcctccagctgcacgtgcccgccgctgttcgcgtcgtcgcatgacggtggctgcacaccggccgacggctccaaggcgatgaccgtcgcctcctgcggcggcgccggtggtgatgccgccccgacctcgtacatcagtctcggcaatggtgtcgcgtactacgccaataggttctcacggccagacatggtcggctccaacgggtcgtcgtgccaagcactctgctccggcaactgctcctgcctcggttacttctacgacgagtcgtccttgtcttgcttcttggtgcagcaccagatcggctccctggttaacgccaactcgaggcgaggcgacatggtcggtttcatcaaggtccagagctcgcagtcaccggggtcgccgagcggttcatcttccaacaacagcacgctcatcgccatcctcctgccgacgatcgtcgcgttcgtgctcgtcgtcgtcgtcggcgccgtcatcgtcgtgtcgtggcgcaagcaagagcggcgcgcggggaggcgggcctcgcgatccagggacgtgcagctccggcgccaccgctcgccggcgtccgactcggcgcaccttgtctacggcaacgacgacgacggcaacgacattgtgatccctggactcccgacccggttcacgcacgaggagatcgaggacatgaccaacagcttccgcatcaagatcggcgccggcgggttcggcgccgtgtacaaaggcgagctccccgacagctccgccgtggccgtgaagaagatcgaaggcgtcgggatgcagggcaagcgcgagttctgcacggagatcgccgtcatcggcaacatccgccacgtcaacctcgtccgcctccgcggcttctgcgtcgagggccagcgccgcctgctcgtgtacgagtacatgaaccgcggctcgctcgaccggacgctgttccggccggccgccggccagccgctcgagtggaaggagaggatggaggtggcgatcggcgcggcgagggggctcgcgtacctccacttcggctgcgaccagaggatcatccactgcgacgtcaagccggagaacatcctcctcgccgacggcggccaggtgaagattgccgacttcgggctcgcgaagctcctcacgccggagcagtcggggctcttcacgacgatgcgcggcacccgcgggtacctcgcgccggagtggctcaccaacacggcgatcaccgaccgcaccgacgtgtacagcttcgggatggtgctcctcgagctcgtgcgcggccgcaagaaccgcagcgagcacgtgagcgacggcgccggcgccgccaccggagacgactccaactcctcgaacgggacgacgggcagctcgtcgcgcggcgcccggagcgattacttcccgctcatggcgctggaggggcacgaggcggggcagtacgccgcgctggccgacccgcggctggaggggaaggtggtcgccggcgaggtggagagggtggtaaaggtggggctctgctgcctccacgaggacccgcagctgcggccgagcatggcgatggtggccggcatgctcgagggcaccatggaactgtgggagccacgcgtgcagtcgctcgggttcctccggctctacggccgggggttcgccggaccggccgacggctcgggcggcagcggcggcggcatcaagcaagccatggcgggttccaatggggaccacacaaggtcggggacgacgacggtgacgacgatgagcgggtggccgtcgtacatgtcgtcgtcgcagctctccggtccaagatagggcggcgcacaccggcgagaagattgtgttgttagagatagattatacggttgcattgatcattttggttgatttgtaaacagagggattaatttgtgcattcgtgaggtctatacaaattttgtcctgttttcccatctgcttttctcaagaaaaatggaaggataagtgagtttttttttctttttgggttgaagccgatgaaatcgaactgcctggttggtggaaatggttgaccaagtgaatcagtgatcaaaaaattctaaaggagttcgtaaatgttttgactttcccacatctctcatttcaaatggattataaaactcaacatatatgggacgggattttcatccctccaaaagatgttgtctcgttacatacatgttatttaaatagttataaaatttttttaaaaaaattgccatcacagattaatatgaaatgtatcactccataaacatttgtggagtgatatattacatattaatatatcttataatttttttaaaaaaaattataattatttagttgatatgcacgaaaggaggggatatgcatgtgtatgcctttgtaagtttatcgtgtgccatgcaaatacgccattcgcgtcgattggtactcattggtactatttacgagacctatttagttgatatgcaagaaaggaggggatatgcacgtgtatgcctttgttagtttatcgtgtgccatgaaagtacgccatttgcgtcgattgttactcgttggtactatttacgagatctgaacaagcaactgaattgcatgcgcgatgcgtgcgaaatgaaggacgaaacggaaaaaggcaagttttccgcctagtctccctctcgtcctctcgttgccgtccccgtcgccgtgcatcagatcatttcatcaccggcaagtgcagtcgcccctttaaatctcagctccacttgtctcgttgccgacgcgtgtgtttgctgagacgccattgtcacatcggttgctgcttccttctcggaagatagcaccaccagaggtcgtcgttgggttgtaatggcggaggtgcagagcgtgcaggcgctggcgtcgtcgctggcggcgctgccgccggagttcgtgcgttccgagcacgagcggccgggggcgaccacgttccgcggcggcgacgcgccggagatcccggtgatcgacatggcggcgcccgagtccgccgcgcgcgtggcggaggcggcggcggagtgggggctcttccaggtggtgaaccacggcgtgcccgccgcggcggtggcggagctgcagcgcgttgggcgcgagttcttcgcgctgccgcaggaggagaaggcgcggtacgccatggacgcgtcctccggcaagatggagggctacggcagcaagctgcagaaggacctcgagggcaagaaggcgtgggccgacttcttcttccacaacgtcgcgccgccggccatggtcaaccacgacatctggcccagccatccggctggctacaggtacgcgtctccatccatacatagctcgccatgcgcgccggaagcggaagctaatggcgaccgggcgcggcagggaggcgaacgaggagtactgcaagcacatgcagcggctggcgcggaagctgttcgagcacctgtcgacggcgctgggactggatggcggcgccatgtgggaggcgttcggcggcgacgagctggtgttcctgcataagatcaacttctacccgccgtgcccggagccggagctaaccctcggcgtcgcgccgcacaccgacatgagcacgttcaccgtcctcgtccccaacgacgtccagggcctccaggtattcaaggatggccactggtacgacgtcaagtacgtccccgacgccctcatcatccacatcggcgaccagatcgaggtacgaagctctcttcttcctcctcatcttcgcctcccgcgcattgcgtcgaacacctgacatgcatggagctgccatgtgatgcgatacagattctgagcaacgggaggtacaaggcggtgctgcatcggacgacggtggacaaggacaggacgcggatgtcgtggccggtgttcgtcgagccgccgccggagcacgtcgtcgggccgcacccgcagctcgtcaccgacgggagcccggccaagtacaaggccaagaagttcaaagattaccggcactgcaagatcaataagctccccatgtaaatttgtaattgggccatggaaacatcgcccccatgacacccaagtaccaagagtgctattgctggatgtggacgctgctcaatgtgatgctagttaagttgctctgattgctaatctgctgctttctgattcgtaatcaccttcggagcatctaaattcagattttaaacaaactctttctgaattgccttccatgccgacaccggcatgtaggccatttgatgcgatgggagcatggagtaatgtttttccatctcttgaacagtacacccgaaagttgacggagaatgggtcgcttgatggtgataaaatcggacgattcattccaccggcctacaaccaccatcaaatgatttgtcgatcaccgccttctctccctgcatgattcccttctttctctctctccagtctctcttatgcatataactagttttatgtttttctttcaaattatttattcgatctataatatgatatagtcactgtaactatatttttataacaaaatatgacatgactatattctgatgataaaaatatacatgtttcaactgtttagatatgaggtttcactttcacatgaaagaagttaatgtttcaattgtaaatcaaccatgtttagatatgaggtttcactttcacatgaaagaagttaatgtttcaattgtaaatcaaccatgttgcgcattttaagtttttggattacaatggatccgtgcttaatgttgcataatagttattgagatgtttcactagtttgtttgcaaatgttgcacgtaatgttcttagagtgtttcagcgacactagttcatttgcacatattgcatgtagtgttctttgaatgtttcagcatgcatttcgttatgtttcagcatttacaattccatgtcgcatgtatgatatgttttaattaggagtataatcataaatttttaatctaaaatataatcacttgagattctgttccagagattcagttgcaataaatataatagtgtaattagattttaaattggataagtaatttaagagagaaatggtttagttgaaaagttacttggagagagcatggaggaagagagctatagcactatagattttttttaattgaaaatataagcatgcagaggcaaaggaaacatgcatgcgacaagacaggcatcaagcatccattggagaagaggagggcgtccgattttgtcggagaaaatttgggcgcccgatccatagtttcttcaaatattgtcgtagaaaatcaagagcttttaattatctatgtgatttcaatatgtcaacgcattatattatagtcttgccaaaaaaagaatcatctaaattagagccaaatgtgtctcgattctgtttttgaagctaatgatcaagtaaatcgattgtctggtagtcttctgattggcaaatttacagttttttagcttgcctcggacgttagtgtaccagtttgcccaattttcaaattcttacattaaaatgcgtctacctactaaattcttgtatcttgtacaagtacaatctggcaataatttcaatcccttcctcccttgccactggtgaggtcgaaggggcgccatggcaggtcctaggatgatgaggcaaccgtagatctataggggacgcaactcctgagggaccctgacaaatggggtccagcatcatgagtccacatggcctaactcaatgctttctaagagcaggtacaatagcagactatttaccagctataaacatatttttaataagataaaatatgagagagaagagcagcgggctacagatctgtagccagctgcagcacggacttcaagacgcaatgtgtgtatgacaggtgagaccatatattaataatatagtaagcaactattgtatgaattggctattagatcggctatagatgaattggagctagtagtgggctatactattaaacttgagttgggatcctctcctgtaatgcatgtgcagtaagtgccattgacatgtgggcccggaataggtgggacccatatgtcagtgacacgtactgcaggtgcagtataacagtggatttgcattgctctaagatggagtcagggatctgacgagttgatgactccgacggcagccatcggagacggaagggacggaaggagagctggaggctggagatagtgtagtaggcttcttttctcagtaggtctttgaggcccaacaactaatggcctctgatttcgttaccgctgggccgtttccttgagcaccggaggcccacatcgagttgttatggaccttttcaggcccatagtcttcgcgttttggatcgaggaaaggcccgtatcagaacgttcagccatttcggcccaccccaatatgggtcgcaaccactggtaggcggtagcgatccaaatctggcaatccctggccccatggacatcagattccacggcggcaggcggcagaatggacattccaatatgccatcgtcttcgtctctcgtagtctcgtgaagaaaagatcacgtttataattgtacatacatgttactatttacttactgtgttaactccgaattggatcgacatgtcataccaaagttaggttcttgacgcagacggtttcagtgaccaaactggacaagcagaggtgtcctggttatctgatacgtacaggccagattagcattgacttggcatactctggagcaggcaaaattcacagaatcgcttttactgaccagattacaccatcattaacataataaagatgcttgtacagtcaggggcgaagctatagcaagttattggggtcagtagaccccgatgatttcttctgagtcccttatactcctttttattttacagctatgaccccggtcaaagaaaacactagaccctggtgattgtttcgttaaagctcaactggtggcaaggaacgataccattatcagctagcaaatagaaaattagttagcaattgtgattatatatcagtctacatagatatacatatacattttagactggcgctcataaagtggcccttatttaggattaattgctccagtagccaactaatcctattattatttcttgattatcatcacaatttggttgaacctagtctctcaagtctgaatttgaggaaattagagttttgaaatataaacgtctgatttttcaagttcagttacatgatcatgatgcatgagcctgggggaattgttgacgaaaaaatcgaacacaccggcctgggagatctgcttagctcctgtgcaggtccaaaaattaatgaggtgcgggcgtgccagtcagtttgatcctacaactgacaagatatgtaaatggtagatcaaaacagccgatcggctgacaagcctatggagtagttccagccgatagccgataatagccgatgccgataccagccgatagcgatagggtttaagcaatcggctatatgtccaatgtagataatgatataaaggcaaacggctgatgatgatgtaataaaataacaatacaatccaatataaaccaatcggctagcaatgatatgataaataagcatcgatccgaaagttaaagcatacatcggctggaggtccgatgtcataaaatccacaagattatatttaaaaattaaatcttattgcgatcggctaaatccaatatgtatgcagtccttgtaagccgatgcaacgtccagataactcatcggctgaaaccccgatgaaacccttattggcaatcaagaagcagactagaaattatggttctaagcacgacttagtagatcaaacttaactgatgtagcactaagtatgaaaagaaacacaatatctagacaattaagccgttgactgattttcagggtggtagatgcctaggctaatctaatctagtaaggcgatttaaccgatactggcagaaaccctaaagcgagagatagccgatagaactaaattgagatgctaggactagattaacatagacatatgataaatagccaagcaaatatattatctaaaccagagtaatccaagaggtcgaatgtcctgatgcagccttgaacgacgccgacgtagatgagacaattgcctgggccaacggaacattggacttaccccttcgccggagatcgaacaccgatgcagccctgcgtcaggtgccaagtcccgccggacgataaaataaagtagaaaaggtaaaaggtggcgatgcgccgaattgtattgatcgtgaggatatattacatagaccccgggtgtacatatttatacccatgggttgatacaagtccttgtcagacaagaaagaaactaacctaaagataaaaggaaaatataaagtccttatcggacactaaacacactttcctaaagataaaaggaaactaacaaactattcctaattaatagataaactgtcatgccgcatcctctttaaactcggtcacttaggaataagcttcctttagtagattgatttccttaaccgaatatagcaggaatccgactattggcgacttgataactcccatcgactgattccgagatgctacagccgataatgattctaagccgatgacgtctttgccaattaccaaatttcactattaacaggaatataacaaaggtgattttcaccatataagaggttgttatattcttttcccaaatagtgtaacctagtacaataatgatgtggttgtaattgaggccctgtttagttcccacacaaaaaatttacgccatatcacatcgaacgtttaacacctgcatgaagtattaaatataggctaaaaaattagctaattgcacatattgcgactaatttgtaagacgaatcttttaagcctaattgctccatgatttgataatgtcgtgctacggtagacactttctaatgacagattaattaggcttaataaattcgtctcgctgtttactgacggattatataattagttttttttattagtgcccgatcaccccatgtgataccctatataatatccgatgtgacacgctaaaactttacacccctagatctaaacaccccctgatatgtaaaaggtaactactactacaacaatagacttaaaattattagaagctatagccaattgttaggatcgttaattaatagtgaccccggtgaccatctatcctggcttcgccctgattttactatgactaatggccagatcactgaagaattgagatttttcctgagctgcttctttgcatatttgctagtagaagttgttactaaggcgtattcttcttgtaagcgacgctttacgtcgttatcttgtaagcgacgtccaggaagaccaaagactcgatgctactacattgccggtctatttttggagacgtggttatctacttattttccatttactaatgatgtctagtgctttttcagtggagagtaagatccaaaatggttcatccatttcgtctgaatttgcgagatatacacacaaagtgacatacacctgtttctgtttggaccataatttccatgtggatccacatccactgtatcaaacagcacacacgtagttgaagtgagtgtagcacgagtgcacaactggttaggtttcttgtggtgaaaccaacccaccttgatacaagttttaaacttaacacagtactcatttatgactaattatttttttagtgagatattcatggtgacttcgtcgattttaagatatatcggcataatcttctaaacgtgctcataggggtagggtgtgcgtgtgtgtttaggcgggatgagtctgcgtattatgaacgcttacaattgtaccgtgtttctaaaaaatactgcacacgtgtagcaatttaactatgaacaaaaacatcacaccatttttttaagtaaaaacagtaggaaattaaggacaaattcttaggagtatcacgcggtgttttccaccaaatttgtttgcttgaggagcccggcggggatcgaatcgaacgccaagaccaagaagaaatggaaatggaagagaagtagctagccagccattgatgcctcgttagttgggagatcactccaatgcttcgtgagcctcacgtaacagccggtgatgcatattgcatagctagtttctgaccgagatggtggggggtgaaggaacgcatcaagcaataatcgagctgcagcaactggggtggcttgttacggatatggtgatagcttccaaggatgaaattgccatgtcactctcttaattgcttctattgaatcattctttcaggactcgttttccagccaaatgataccccatctcgatcgataatacctatgtctactgctgacgaaatgtacacaaactttttttgccgccagctgaacaatgcctatactagtactagtagcaaggttatgacaaaggaatcgcattgttaattgtcagataaatctgtagttaatgatgaactgttggctaggtcgctatcgttgcacgcatgacaggcgcactagctagagatcagtacatctacgcttctccgtgagaactgtgactggccaatcccctttatgctgagaaatattgcaagaaagaaacttaagatgcacgtcgcataccatgcacgcacagcaaaaaccaccaaataaactgttacgaaattgtgaaatgcctcaggatttcaaatatcgcatcttacaaatgtacgcaaaaacaagagtctgacttggctgaaaaagatattgtgtgtgtgtgtactcgcgtggacatgaacacggttttatatatcatcgttgatcggactgatcactttgaactggttaattaaactcatccaagctttgcactaatctcatacgctaattggcagagttgacacggctaggtcagctgctaattgcgcttatatgcctctacctaattgcattgcatgaccacttctatataaacatcgctgtgcttcgacgtacgggaagagcaacgagctgtgtcgacgctagctaagccaacaccaacgaagattcgaagctcgcggttttcttggctttggtcgtaagcatcaaaaatggccggagctggagaatacggcggcggcggcggcggcggcggcggcttcggcggcgacttcatggtgctgcggccggacaagggcggcatcggcgacctgttccacctgctgtggtcgtgcaaggtggcggagaacgccgccgtggactgccccatcggcacggagatcgccgagcgtcggcggcggtgggcgctgttcgtgtcgctggtggcgcagatgctgctgctgtggacgaagaagccgatggcgctgctcggcggcgggacggagtactggatgaacctcctcaacgagaatggcggcagcgtcttcatgctcatcaccaacgctctgcaaggtacagattttaactctgtacaggttaactagctacctagctagcttggcttgcatgttcttctgcagttaaacttgcaagaaaaacttgctcctcgtacaaatacagctgtcagttacatttatcacggcctcgtagatttgcatttatgattatttcgctttcacgttcgtgcgtgctccgatcttgagtttgctctgcatcacagacaagaacatttcctcgtattacaacgtagcagtatacagctagcagctaacttccatcctgatttctactcctagctagtgttcaatgttacaaagcaagggagactcgatatttaaggctgtttttcagttttttctaagcaaatttatcatattccgtgtttctgggctgcttaattgattgcgcttctctaattagatatgcaaaaaaataagcgctagttttttgtttttttttgtcgtttttgccctatcattttctatttcaacagttgaagatttctcgtagactagctacttaaaatatgttcttcattgcatcctctgttcatcgaggtataatgaagtaatgatataagcgaagaagaaaaaaaaagatgataattgctatctctgcacttctgcaggaaaggtgaaaatgccagacaaatcatccatcaattaccgatcatgcattggattgcttgacacaagaatcgatcttgacgagaagatcaaaccagaggatagaaactaccacgctgccctgtcgatcatggctgcaaaactagcctacgagaacgaactcgtcgtcagaactgttgttcagaaccactggcaggtcagtgaaaattcgttcaaactctgcatagtcccaaatcttgaaatcgccgtcacatttttaacctctcctcacgagtctgtttcttctgcagatgaatttcgtgggcttctacaactgctggaatggtaaaaatacaactttttggaaaacattataatgtcgtttgattttttttctagtcaaactttttttaggtatgaccaaatttatagaaaatacagtattattttcaacacaaaacaaacatattatcaaaatatattcaatgttcaatttaatgaaactaatttaatagtttagatgttgcgaaatttttctataaatttagtcaaacttaacaaaatttaattagaaaaagagtcaaacaactttacgaaacggagggagtagtaaattcgtgcacattgtgagttgcatatgccattttcaccaactcgcttaatttgttccattttttgtgcagaattccaggaggactacacgacccaggcgttcatggtgtcggacaaggcggaggacgcgagcctcgccgtggtggcgttctgcggcacgaagccgttcgacacggagcagtggtgcgccgacgtggacttctcgtggtacgagatccccggcgtcggcaaggtccacggcggcttcatgaaggcgctgggcctgcagaggaacggcggctggccggagcaacccaccggcgccggagacgacggcggcagcgacaagaagccgttcgcctactacgtcatccgcgagcggctcagggcgttcctggcggagaacccgcgcgcccggttcgtggtcgccgggcacagcctcggcggcgcgctcgccatcctcttcccgaccgtgctggcgctgcacggcgaggaggacatgctggcgaggctccacggcgtgtacacgttcgggcagccgcgcgtcggcgacgaggggctctgccggttcatggacgggcacctggcgacgccggtgagccggtacttcaggttcgtgtactgcaacgacatcgtgcccagggtgccctacgacgacacggcccttctgttcaagcactttgggacgtgcctctacttcgacagcttctacaaaggccatgtcagtgtccaactctagtctttctacctatagtactacggatctaatatgagatgtgacacattctagtattataaatctagatagatatatgtttagatcttataaaaaccaacttagtatcagatataatacatcctaatataatatatttgaatatgtgtctgtttagatttgtagtattagaatatgtcgcataggttgtttttttattaattgagcgagtacgttgttagtagtgtagggccggcctgttgacagattgcattagattgggttgtttcttggcatctaatccaatcccctgaaagagcttggaaaggggtccagtgaccaatatacacacggtcatgttttcaaggcaagcaagcatggcttgcaagcaagaatttggtgttaagaacaatagaaagtgagaagcttcttttctcgtcatgggcagcatccttgccttgcttgctgaaagcctggaactggagcccactttggtgtgggatggagagaagaggatgatgctgcaaactgtgccaattggcagatgcagcatgtgctagttgtagcccacaactgtgttccaactgaacttggtgactgacgaggattggtgttgtggcgatgcaggtgacggaggaggagccgaacaagaactacttctcgctgctgacggtggtgcccaagtacgcgaacgcggcgtgggagctcgcccggagcttcgtcatcggctatgtcgacgggccggagtacggtgagggttggctgatgaggatcgccagggccgccgggctgctgctgccgggcctgccgccgcacgcgccgcaggactacgtgaacgccaccaggctcggcgccgcctcgctcgagccgctccgataggtagctcgtcggcgtcggcgccaacacatttagtagtaaactagtaacaggcttgtgattcatgattcatgaagtggaatgcaacatccacagtgtaaattcatgccttaaacacaataatatgattcataaagtggaatgcagcattcattttcagaattcttgaacaagacagtgtagattcgatgtaaattcatggcttaaacacaataatatgatgaaaatcggtccggttggcatacaacaatgtttccaagatagcatggctaacatcagtcaatccatgggtcaggactcaggacgagcaatgcattacctcacagatgtcacccaagtgatgaaacatcagatgactcaagtcacatacaagtctgatcacccttggcacgcaagctatacttggtgcaagctgttcttttgcttaatgctgaaggcttcccaaaacgtgctggaagaatacaggatgcaacaagagttttagaatgttgtacggttacatatcttctgatgatgaccgtgaaaaaagtggatatcttgcattggctcttacccacccccacccaaaaaaaaaaaaaatcctcatacacaagcccgacaacactccattggctacagtcagggtagttagataatctcatcagtatcacaacagcgaagcatctctccagcaaacaaaagaaaaggaaaaagctcatcatctatgtcaagccagtaggaataaccatgaatccatgttaggcaactttctccgtggcgggaaggaatgaaagactgtcactgtcagcatccaatttcctcaaaatgagacgagatgcttgattcagtagggccagcattatgcatactctataaacaactagaagaacaatcagcgctgcgccaataaatagtctgtctgcggtctcttcccctgactgatctggtaagcatggttccactaactggtttacatagacccacatcaatcactgaagtaacctttcttttaccatgatcctcatcaaaatgcatatcaaataacatagccaggcacagaatttggtgagtaagtatgtagtcctcatatgacgaaggtacaacctgaaggatgtgaagattcacctgcatcataagtgtagccagcataagcagtgaagcttcactgagaaatacattaaagtgagagcagttagcagtacaaacctcagcttccattgctctaagatcattgtgccattttaaagcttcagtctttcccgaaagcaattgcaatgtgaaaaaaggtggcctaacaggatattccatgctgatcgcaatctgcaatgaaaaatccacagtgagaaagtattgtgcatggacatactttaaggaaggctcacaccaaaagagtaactgaagaatttaccttggcttccagcattacttttggaccattcttcagagttttactcaagaccagggtaaactccctggaagcatagtcctcccaggatttgtctgtagcaaggttgactttttccacttcttggtcaacaaatgtctgttcctctaactcactgtcactatacatcaagagatcaagatcgtcctcatttctaccaaaactgtgtgagatgcttagtttagatggtgtggcgctctttgatatcagggataagcctctagaatggtttcgaacctccggtgacacttcagagtgtgatattttagaaacacttggcgtgttttcagcaggaaccacggccagaagctccccatcctccctggtactctcagtttcttcccaatgcgtcacagatcttcgctccatatcactgtcaacacttcctgcagccccaacaaccatcaaaggagaacgaggtgctggctcaggaaatatcccagtaaatgaccagctatgcagactacacaatggggtacgtgatgcccatggtgcattctcgtgttcaatttgaggccacttcagcttagttaaataatcaagctgccacctgtaatcaaataactcaaaaacatataagaggtcataagtaaaagatacaagatgctactaatcacaaaggaaatgcatagtactcataagaaaaaggagacgagatgttcacaaactttgctcatcaaatatttttcatcaactaataatgtagcacgtcacagaatgacatgtgcaatgaagcaaaaactcatcagccaaagtacatttcctccatctataaggatctaccatccaaattttgttacatcccaaactacaagattgtgaagcagtgactcacgtaagagccatctgtgcaaccttccgtgagcggattctctgcaaaatagtctgtgcacgattctgctgacggtataaagcaagcccagatgacaagtccgcacttctcgatgctctgttagaatcatcaccaacagatagaggcacttctggcaagaaatctataccagctagatgttgtgcccacttgtatggccttgaatccttttcactgaagttcggaacctccccagcataaagtttagccatctgcataaaattgataaaacgactctctttaagataatataacagagaactaaccaaaaacatttggctaccaacatgagataaagccatgatagctcactgctgcctatggccacaaatataaggaaaccaaaatgacctatcaactagagattgtcacagaatgatttgtatatatattcctttaaaaaaactcaagtggtggtggtgaatggtgaatctgccttaacctaccactatgatatctcctgacatgtgggaccatcaaatagtgatatgaacaagtaggtatactgtgttaggtatcaaaacaataataagagaattttatacaaagtatttaaggggaagatatcaaattccaacagcaatatgaattcttggattaatatttgaaatggtaatgatatgattttttttcttttaattccattaaaatgcaagggcattcagctagcaatagtcaaaatcagctgattccaacctgatgaggcaactctaaaccagtgtcatctggaaataagttgcataggatatcatggtccagcccctttgaatcttcaattccaacacaaacaacgttcaactttgccaagtagtcgaatctcaggaccatgagcttacgacgctttgctccagactcttcagtgtcgtatacatggagaataactttaaggggatgaagttgatatgccactactgaattactagcttccttcacaacactttttcttgaccttgaccttcttctttgagcatcttcttcatcatcaattgcatcgtcatccactctattatcaccatttgacaaagtgccagctattgcagatacaaaagacacgctttatcagaaatatttcctagtctaccacctttacagattataacaagtggaagagaaccattagcaatctgattctaaccattatacaagtattgaagcaagcatgcattatttacatgcagcttcaatttgtaatgaggaactaaaatataacagcttccataaaagaccggggcttctatactgctatatgagaacgaactgtttatgctagacacaagtatctactaggaaattgcatctggtcatttaatatgtggctacgctacattgcttttctaaaagtagtaaaaaggatcccttacatatcatacggtacatgagaagagatagaataaatgtcattaattattgcgagtattgcacttctgtaataggaaatcaaataaactatattccaatgagatatgattatatgaaccaaccattttcctgcttagcttgctgttgagcaaacatctgagcatcctttgtgcttccagtgatctccacttcaatattctctccgaatgcttctttctgtcctaaaaactgcgtgtaaactatatatagaggagttggaagcagttcagctgcatgatgctgctttagtttcttggtatgttgcatccccagctgctgctgcactggcaatgatgctttcttcagtgatttcaaatgggttgggaggctcgaaaggaactttttctgatttgcaattgtgtccaacaaactgctcttccgctgctccaatttctcatgtagcttgcatagctctttccgctgtttcagatttcaaacttactttagatatcagaacaaatattgggacccaaacaaatcaagaccacactagcacaaagggagtaagggacttttgtcctagcaagcaaacacatattcaaacaactagaggtgataaacaaattaagcagatcaaatcatatccaaaaacatactacaaaccttgatcactagtcacacaaagaattatcagatttaagaagaattatgcaactgactaaaatcaatatacataaaaagagtttccataacaacaaagcgttctacttaagaacagtttgatatatgagcactctaaactacaaaaataacggtgaatttataaaacattttctatatatacatttgaatttttggagaaccaatcctgcaagccaagctaaatatttacgttaaatttactagcaggtcaacccagctacgatgtgattctttctttcgattattaccctgatccttcagaacaaacccccaatctaaatgctcatacaatcctgtacactctctatgatgctttaatcatttagacgaacaatgaacaaagcacaagaatttatcccatgacaagtaaatctcctatttgtgtaggaactgaatcaactgatcacggtacacaacctggactagctcgaaattgaggcgcttgagcatgaggtcgtgggacgcgtcagcagcgagcgtcttatcgcggatgtccgccggcgcggcgcggtggaactcctccgtcggcacgagctctatgcccgggtacttggtctggaagtcgaggcacgccctaatggccttcacgtagtggttcttctcgtacagaaggttgtgcagctgcagcgtcgtggagtccacgggcgccttcgccgcctccgtctccgccttcaccctgtcctcctccatcagtatctccctgttcgcctgcgcaaatccaaaccctcgagtgagcaaacagcagatctaacgcgaggggttcccggcgaagaggcgttgcggattcgggagcggcacggacctggcgaagcgtgatgaggaggagggacatctgggcgacgagctcccggagctcggttctgggggcgtcgtccttcttgatggcgaggatccgggcggcgacctcctccacggaggcgcgggtctccgcgaggaggtcgtggggggacttgcccttcgaggtggatacagtgctggtggtggtggttggtcgcgccggcgcctcgacatccatggcttcggccgctgctggctccgccgccatcggtccggccggcgctgggagagacgatgcccgaagcggcgagaggtggtgggaagtgaggtgaaacgattcgtggctgacctagagttgtcgtgcgggctaacggttcagcgtttcgggcccaatttgtagagagagaaagagagaattaccggttaggcccagaagggagaaccgctcggcccatctaacctttagacacttaaaggaggcccatgtggcagattttatttggaggaaataagtccactttgattaccttaaaactagtgaaccagtcttcaaaatcgtaatatcggatatctcgatccctcaactactaaaaccggtacaatttaaatcatcggaggtttgctgacgtaatgcctacgtgatggtgttgatttagtttttgtctcacgtgacgcttatgtgatattagaataaaaaaatatattgtctccatctttttttatttgacgtttgagacagctttggaaaatttaaggagtgcatgagattacccttttccccttcgttctttctcccccaatcccactgttgtgtttcttgcacgccactcgccggtggcggaccagcgctccaccctccactagctgtggcatttcttgcatgccgtgccagggtcgaaccagtgctccaccccgtcattccatgagcccgtctacatcccgacgactacgcatctaaccgatcggtagtgaagctagaaagtttccaaagccgcaaatccaactataataagtaggtcatttccaacccaatgactaggatggtatccgtaacattaaataaaactgtcacctaggatgaaaaatgatgtggaaagtgaatacatgagaaaagagaaggaaaccttgtcttatatgagacttggtttctacacaacatccaagacatcatatgagataaatagcattaaatttaaatatatatagtgatgtttgtattggaatagtagtgtctagtaccagttttttaatgatgtagagtttatggaaactatgtgtagtgttttgagttaggaataacctaatatatcaaaatttacagcgtgttcgctgcaacgaacctggggaagaggcggagccggtcgacgtggagggcacgtgcgggtagccatggaggccaacaacggtagcagggcggtgaataagtagtaccgtgattcttggtcaggctgaatcttgggtgtgtgtatttattgagtaatcagctaatcttgatcggtaagcataacacgaacaaattgcgagtgaaagccatgacttcgtgatgtttccctgcaatcatctaaaagaaaacttacaatatgatatctcacttgcggcggcctatctctagtggattcaccccaatgataagggcggagtcgagattgtgcattgtggagaagaagacgaacataaacactccgtgattgtatcagtaaactttctttgccatgtatgatcatcgatcactctctggacgtccgactatcacgagcggttcgtccgtgatctgttgagtttattatacgactacgagcgtacaacggacaggctggtccgtgatgatccagcgcaatcatgtgtaccaatcggccctactacaaaagcgcgaagctttgctttcgcaacccagagccgtgccaaattgcagctgatgtacgcacatcgtataccggaaagaactgttcgtcatgaagagcagaagacgtccgttgacgctgacggagaaccaggcgtgttgatgacttgattgcaaactcgtacggatgctgatgccgatcgatgcccctgctacacgattgttgggtcaccgcattagagcaagtctaacagtacagaatactaccagctccaattcatttataaccaatctaatagccaattcatacaatagttgcttactatactattaatatatgatcccacatgtcatacacatagtgtatcttagaatccgtgctgcagctggctacagatctgtagcccgctgcttctctctctcatcgtttatcttagagcaagttcaatagtagagagagttaactgccggctccaaaattcaccacattatttaagagataactaaacaacggtagatacagcaattggctacacccatgctttaaccaacgcatcctgtcaggtgttggtaacttctgaatgttcaagttctaattttcgattggttatcccgagcggcagtggcagagcccctaggcgctcgtgcttgagccggcgactgaattgtcgtccgctttgttctctctgctttccctctctttatcatatatgttaaaatattagataagcaggctttatacctgctcttattaaaatgtgtttatagttggctaacagcgttattgtacctgctcttactgcgtgacttgatttctccttaaaagcatcaccggccaaccgtgctggatagcatagtgccactgttgtagtatgtcactcgagagaggagcagggggagcacaagtgtcatgattccaccaattccctagactgtttaacgcctctctctccgtgaacctttttcagtaggagtactagctgaccatgatcatgccacagcccacagcacgcgcctagcagtaaaatagtggcaggggcagtagtactgtattagctggagcggtaaatcaagaatgtattatccttctactgcagctgaacaacccagattgtactaacctgacctgtaaatcaataagagatgctagaattacaccatttgaaacaaaaaaaaatcgctcggagcaggaatcctttacgctgggcctgaaagacgccacggagaagtggagaaagcaaagcaaagcgccgtttattactgcacgcgtctggggcacctgccctggcaagcatggcactggtactgtcacggcagtatcatcacccgacctcacagtctcacctcgatggggggcccacacactgtcgcagtgtatcgagcgggacccaccacctttccgacgcacccggctccgcctgacacgccacgtgatccgccgctgacacgcggggtccacgacgcggacggtgtccacgtgttcgcggctgggttttaaacgaagcaaaggaatagtactactccctctaccaccccgacagaaagattcgcgccaagtcaaaaccccgggcccgtgggtcccaccttccatgtctgtactggaagcgagcggtgcgggggacgggcccacctggcagcgagagcgaggaacccatgtgtgagtgtgaaatgccccctcgcgcccggttgaaaccttgccgcactcgtcggcagccgcgtccacacctcggctgctccttcccagttcccccactccactgccaccaccccctctgcttcatcggggaatgcgaccgcgcgctcgagcatgcgacgcctcgagcccgggctagggttccccgactccgcctccgccgccgccgcggccgaccgacgccaccatcccgcacgacggaagaagccgccgccgcagcggcgaaggcgaccggcggcggccgcagcagtaataaacatatcccgctcttaaccttccccttcctccgccgcattgtcgtgttagggatggctgcggcacgcgcatcgcgagtattttagtgcaaggggcgggcgggcgcggtagaagtcaatagatccaatccagccacgcgcgccgctcacatggcggatccgaggttagtggcgaaaccatcccgcccaagcaaaagataaagccaaaaaggagaaagagggcgggcgaatttgaacaaagctaggcaaaagcgccgcatctgactgcttcgtcgcttttctatcattgctattttggtgcgattcgccggcttacggatcgctcgctgtttcgaattcgtctctgctgcttggggtagtgtgagtgtgtgactagtgcggcgactgtgcagtggtgttcggtggttttgatttctcctgattgctgaggcgattgccctctcttggcggtttctgcagccggcggtggggcctcgcggcgcgaccgatccagatccagcgccctcgccgctgcgcgtgcacggcatcggcatcggcagccacgcctcgcgtggcacggcaccgcgaggttggtgggcgggcgatcggcttggtgtgtgctgtgttatcccagtgcccgcacatttgtcgccagctaacctcttccacacgcaggtgaggaggaagaggaggaggaggagtggagaggcgacggcgacgcgggctcggaggaggaggagggggaagcggtcagtgactccttctcccactcgctgagaggtgattaatcttcccttgtagtacggttgctgcttttgtgctctgttgagtgtgattgctgacttcggtttggaatctgttggttggtagagtgccagaagcagcggaagctcagagcggagggggctgcgttgctgctttcaccggccaagcatgagctcaccggcggaggtggtgggagcatagaactgctggtgctctcgccgaggtgcttggttgggggtaatgttggaggaatgagcaagagctccacagcgtcatcacggagcagatcaggcacattcccgagccccggtaccccaaactaccaccggcattgcgctagcaccatgcagtaccctaagggatggagctcagagcgggtgccacttggaggtggtaccaataggaggtatgggggcagtggggttgttcttcctttcaacaatgggaggaagctgccatcaaaatgggaggatgcagagaagtggatcctaagtccagtttcctgtgatgggattggaaggatgtcagccccggcgcctcaccatagacggcccaagtcaaagagtggcccacttggccacccaggcggaataccgggtgcttatgcggctgcttcgccgtttgtgccctgctttgatggtgttctggcagcggctaattttgcagcacattctcctttttctgctggggttctcatgccagagcacgtgcgcaatggtgacttcagcagtggaagaggtagaagtggggatgatggcagtagccgatcttactctgcagagaaggacccatatatcttgagatcagcaagtatacatgcgtggacagagacacttatggaagcatccgcctttgctaatatctcagaagaaactgcacaaggtttgattacggcagtcccttctccattgttatcatttatttgttggtatcttgtcatgcgttctgattctgttgctactgcagtctgcacatttgttattttgcataagatttcatgaggacgcttgatataagttttgcagcttgtgtcacttgtccagcgtggactcataattcaagtaacagcttgcctgttatcacaagcttcgaatacgcgactttccaactttctgttgatgttgggataggccaaaagagtgcatggcgtttgtgatatgttttggtatcatcaaattgaactttccactttagtttgtagtggttagtgagcatgcatgacattatgctatttgcatatcctgtcatttttgcagtgagatactataataagaaagatgctcacatgcataacgtcatactactacctgttaatgcatctaaagttcttcaatcaatacagtgtagcacaaaggtggagatttcaatcatacaaccccttggcactcaaatccgagcatccattctgtttagactgatcttacctgttcacatttctaagcatgcaaaaacacctgatgcatatgcacttgaacatttaattctttgacatgtggactggtagattgtttgggaacatttgaatcggcttgtaacatcttgttttttccagttctaaggcctttcaagtgtctgatgtgttctgtgatcttctgtcttcagaaggctagttgtgtcgtttagatggacattataaaagactttccataaccatgtatgccatcagatagtgtacatcaggattatgttatttccatcttgcttaacaatgaaatggatataattagatttttgtcaaccaaaataaaaatgttatggcatttttatgtattggggattttccacagttaattcaacaaccttcagatgtatcttcatatatgctaattaaatttcttaacaaatttgtaccctgcgcacagatgataaattgcaaggcctgcgaggagaaactcctgccatttccagtccaataataaagaaagatgttgccacacaaatgagtcctgatgacagtatatcgtcttctccaaaagcaagacattcatgttccagtttaccatcaggacatcctattaaagaaccaaatagtaatgcacttaaacctgaagtccgagatgtccaggtagatgatcaagtaactgtgacccggtggtccaagcgacatgtaacacgagggtctgataggcggtcaacaaatattgtcgagtggaggaagaaaacaattgagactcgagctccatcttttgatgaaaaagaaagagaaagctgcgtatcaaagtaagatattttccccatgtttatcattttttttatttgtaaatttgatttatgcctagagaccagcatacagtcatgtacttcatattgtaactcataatcctatactgccaacctactgtcagtgccatagtgactatacttctctgttggtttgaattttgaaagtcttatgttctttttgttgaaacctgaaagagaagtctatgccacactccaggtctcctgctgaagctgatttggttgtatgcttgtacatatacataggcaagcggaattcgatttgactcttatatggtctgccaataagtggcaaattaaatatttactcattttccttcttaagaaacaaatactatgcaacaaatttgattttaatgcgcaaatctatttcaagatgccataggatcacaagccagtaagccacaggttcttttataaagttattttcacagcattccaatttataatataagggactagactgtgaaatggttatttttttttatacggtctaactagctaggtggcagaaaaaaatgaataaaagacaaaaccatactaatataatcaagaaccaatgttgtatggatgagatatccacttagtcatatgtaaatttagccttttttttatctataaattttctcagtccctactttttagtattcagttatgcaacctaaaccttgtgcctgtttttccctttgaacagaagaaaaatatgtttcccctacttctttctttacccttcgtgaataccagaactccggacagataatagtactacctccgtatttaaatatatgatactgttgactttatttggtctttggtgtgcaactttgatcattaattttctattagaatataatggtaatatctaacaagattataatattataaaagtacttattaatgaaaaatctacccatatgatttttatgttttcatactaaatattttgagttctattgatggtcaaagtttaaaaagtttgagcagataaagtcaatagtgtcataatttaaatacagagcaaaaaaaaagagagaaaattttgcagtgcttagtatgtaatattgacttactaattaaggccacaaactgtgacttgttctattgctgagactttatttctgtcaaggtgcaagagggaggaagcgaagatcactgcttgggaaaatctgcagaaagcaaaagcagaggcagcaattcgaaagttagaggtagtcttttgtacttctgtaccataaaaatgcatgcttgtataattgattttcctgaaggtttactttttctttgattatatggaattaagtctttttaatgtaataagttgtggttacatgttctgccttctgtactttcagatgaagcttgaaaagaagaggtcatcatcgatggatagaatcttgggcaaactacgcactgctcaaaagaaagcgcaagacatgcgtagtgcagtttctgtgagtgaagatcaatgtggagtgagagcaaccaagaaagcatcatacttgaggagaacgggcaaatcattcagttgctgtttcacctatcgtgcttgctagttgtgacatagttggtaccgtgggcgtagcaatggatgtacctttgtagaaactttttggtgagtttttgctcgtataatggtaaactaattgtggtgcaatgtactgttgtggtgttgcctgtcttattagagcatttttacttgaaaatttattaacatttcgcatgaatcttcaggacgttgcagctcatgtcagccaacaaatcagaattaatcaggaagtcagatttttccttgctgtggcagctggaggtgacggggttatttaaagagaatttgcatggtctgatcgatgaaatacctgtagtgccagtggagtggtataaatcagtcatcgagcaaaatctatattgtagttaatttcgtggattattgctcccgttattctgtgcctacaatcaatctctgtacacccaatagaagctccttcgagttcgagagctttatgctagtcaccaccagattggccaggttcagtggttctcattctgattgatatgtatctttccatgggattctgtaagcaaagcaagccttggggcttgtactgatatattgtattgaaagaggttatgagagctgcaagctacgactgcagcttgctctcttgtccagttttgctctttgaagcccgtgtggttctgtttagatgttactatatcttatgcatacaagttttttgtgtacatactacgcacattaactaaaaagtttcaccaaaagtttaaagattggattttatgtgtagatggaatattactaaaggtacattatttttaaagaattttttacgatatttgttagttggtgtgtacaagaaaagacgacttgtgtgcatacgatacgtttcctttttagacatccaggatgccaatagttatttgtgattgtctatttagaatttcagattatcctttgctcacccagaactgatgtagagttggagtttagtcaatgttggcaacatttgggggagactgcaaagtaactgctgtagcactagctatacatgagtatataaagtgatgattgcatgggcataaatacattgatgaaaaaacaaaacgaacatatacaatccatatacaatccgctggggccaaaattttgtatgcaggccattgaacgccaggttgctcgcttttttatggtacaaattgaagttgtgttgggagtaccttcatggcatagaggttctcagagtttctctttgcataagtaggagtacagcgttcttctattttgttgttctatgggttcaagttgagttgaaccagaaccttaggtcacagcctgacccctgataagttaaagtgcaatagtccggttgtatgacgttaatttataccagaacagaaccgtcctatacgagagctatttatacgttcgagcatgggacattggaacatactttcgtcttcctccagctaacggcctcgcattctctacatagcctaatctgcaggattggtttcatgaaacccattctagcttacaccacaaaccatctttacatatacaggagagttagtttcatgccggctgccgctacaccagaacaggaaaccctgcgtggccatgatgtcatggccggccggcaagctttagccatatctatatataaagaagcacttcatgcacaacggcagtacacatatccaaatctacgttgtgttcgatcgatcactgcaacatccattataatacaacatagatcgtatcatggggagcaaacggcgagtaatcttgctgccaactttgggcgtcgtcgtcctggccatcgcggcagccgtcctcttgcacgccggcgaggcggccgacgtcgccaacgggcaattcgcgagggcgagcgggacgcggttcacggtgggtggccggccgttctactcgaacggcttcaacgcgtactggctcatgtacatggcgtccgaccccggcgaccggagcaaggcggccggcgtcctccagcaggcggcgagcctccgcgcgacgctggtgaggacgtgggcgttcagcgacggcggctaccggccgctgcagaagtcccccggcgtgtacaacgaggacatgttcatggtatcgttgcgtacgtgttgtgtacaccatgcatgcgtacgtacgtaatggtgacaattttggataacaatgttgtcgtgtgattcagggactagattttgtgatagccgaagcgaagaaacgagggctgtatctgatactgagcctggtgaacaactgggacggattcggcgggaagaagcagtacgtgcagtgggctagggatcagggacacaacctgggctctgacgacgacttcttccggagcgacgtgaccaaacagttctacaaaaaccatgtcaaggcacgagctaacatccgatacgctgacagtttataacctgaaaaaaagagaggaaaaaacatatctgacagtaaaaaacgtcctcgattagtcgatttgacgttctgctcgcatgcatgcaacaggccgtcctgaccagagtgaacaagataaccggagtggcgtacaaggacgatccgaccatctttgcatgggagctcatcaacgagcctcgctgccagagcgacctctccggaaaaacacttcaggtaaacaaaactcagttttaaccctcgtttaattcgtcaccggcccgatcacgccatgtgttgcaagatgtactaatttgtgatcgtttgatcaatgtgcttgcaggcttgggtcacggagatggccgggtacgtgaaatccgtggatccgaaccacatggtggagatcgggctggaagggttctacggcgagtcgatgcacaagaacttcaacccgggctacaccgtcggcaccgacttcatcgccaacaacctcgtccccgctgtcgacttcgccacgatccactcctaccccgaccaatggtatagcacacgaatgacaaattaatccatccatccagtgtgatatggttaatttaactggtgaaaaatcatattgcggcagggtgtccggcgcgagcagcgacgagcaggtggcgttcatgaggaagtggatggccgaccacatccgcgactcggcggcggtgctccggaagccgctgctggtgacggagttcgggtggtcggcgaggtcgaacgggtacacggtggcggcgcgggacgcctacttccgcacggtgtacgacgcggtgtacgcgtcggcgcgggagggcggcgcgtgcgccggtggcctcttctggcaggtgatggcgcccgggatggagagctggaccgacggctacgaggtggtgctcgagcgcagcaagtctacggccgacgtcgtcgctcaccagtgcgccaggatcgccggactcagcccggcctagtttgccaattcacgagacagcgataatttatctacacgaagataatcaggagaggatatattgttattattatgcatagggagatattcagaggagcttaatttatttttctaatcgacaatatcgcgatgaggagactttgcgatgaggtagatgttgattttcttggagagaataatattttatacacgtatactgaattattccctccgtccctaaatatttgacgccgttgactttttaaaatatgtttgaccgttattttttgtgaaatatgtaaaattatatgtatatataaaagcatatttaacaatgaaccaaatgatagaaaaagaattaataattacttaaaatttttgaataagacgaacgattaaacaaatttaaaaaaatcaatgacgtcaaatatttatatacggaggaagtacttgttattactccactcgatgtactttgtccaaaggaaaaagtaccccgaaagtccctcaacttgtcattgagttataaaatcgttccccaaccacaaaaccagacatatgacatcctccaacttataaaaaccgtgcactgtaggtctctcagtggttttgacaccgattttattctacgtggcggctgagtcagcatgggaccccacatgtcaggatgccatgccagcaccctccctcttcccctcctttctctctctcacctctcgacgcggaacggctatcctaggaaccacgccgacgaggtgtccttctccacgacgcacgacggggaccggagcagcgacgacgtcgtggcgattgcaccccacgtcctcctcctcctcggcgagggcaccggagctgctgtcgtggtgcatgcggaaccgtgggaggagaagatgtagacgcggaaccgtggcgacgccgacggcgaccgtttctccttggagcagtcgtactcgtcgagcatgtgggtcaggtcctcgtcccaggtgacgaagacgagcacgtcgaggtcctcggcgacgaccgccacctccgtcctgaacatctcctccaccttcttcttcaaatctgcacgcggcgagaagggtatcgagcggggcacggcgaggatgcgggtctcgctgtcgatgtacttgagggcgtcgtcggatgggcagggcatgatgcggccgccgaagctgcagagtatcttgatgcggctgccgccatcgacgcaggctccacgtccgccgccgctgcagatgctggtcgggtggcgtacgtgggcggccgtcgccgtacagctcgcgtggcggcggtacaagcaccgcaagacgctcgcgttgctctccttcatccgcgcgcaggccgctgtcaggcggccgcccatctacgcctgtcggtggcgcgcacgtagccgctgctggcgcgcgcgtagaagcctgcgcccggcgttgaggccctcctgctctcgcgtcgtcgtcgccgccgcctcgtcgcccgtcgtcggccgctggactcccgcctcccccaccggcctcctcccaccggccagctgcccctgcccaactgatgaggagaaaagtgagaaaagaagagagagatagaggaagataggtggagaggggaggggaagaagaggctgacatctgggtcccatgtgggtttcatgttgacttagccgtcacgtaggataaaaccggtgttaaaaccatcgaaggatctggagtgcatgatttttgtaagttggaggatgccatgtatctggttttggttttgcggttgagagacgattttgtaactcgatgacaagttgagggacctgtggtgtactttttccttatccaaaaggcctaatgcaaagcagttaggcccttcccaccaaggccacactatccagcccaatgctaggtgctccctctcacgcggcccgcgtcacggctgattgcctggttggtggtggttccaccacgatccgcaccgtccacctgtcccctcccgcccgcacagatgctcccacctcgcgtcctcccatagggcagtccgtcgcgtcgccacccgtcagcatcgtgcggatgccgccacgtttcgcgtcccccgcgcacaatcctcccccccgtgtggtccccaccacgttgagtccagcatcccaaccaattgaaccaaacacgattaaaataccttatcccactcgacccaccccaccccaccccgcagatcccccacaccactgacaccccggccccactgcgaagcccccgcgagatctgatgaccggagtacgagtggtggaccaatcgctgtgtgcgcggtgcgaaaaggggaggaaggagtatactaaaactttattacccggcacgcactaatcgagattggagggtgtcacttcgtcgctctcgaggccggcgttttaaacgccccccccacacggctcctcgctgccgacacctgtccggtttcctctcctcgcctcgccgcggcgcccgcgtcctcctcaccaacgccagagctccacatcccacctctcctcaggttcccgtctctgatccctcgttgcgttacggggaagcaggcgtggtggttgctccccgtgcggagttttcgattggtttggttgggtgagtttggtgctggggtgttggggattggttggttggagtttggagatggattttccgggagggagcgggaggcagcagcagctgccgccgatgacgccgctgccgttggcgaggcaggggtcggtgtactcgctcacgttcgacgagttccagagcacgctgggcggggtcgggaaggacttcgggtcgatgaacatggacgagctcctccgcagcatctggacggccgaggagtcgcacgccgtcggcgccgccacgacgacgacggcgacgacggcgtccgtggcggcggcggagcacgcggcggtgggggcgccgcccgttcagaggcaggggtcgctgaccctcccccgcacgctcagccagaagaccgtcgacgaggtctggcgcgacatgatgtgcttcggtggcggcggcgcctccaccgcgccggccgccgcggagcccccgccgccggcgcaccggcagcagacgctcggggagatcacgctggaggagttcctcgtgcgggccggcgtggtgagggaggacatgtcggtcccgcccgtcccgccggcgccgactcctacggcggctgctgtacctcccccgccgccgccgcagcagcagacgccgatgttgttcggtcagagcaatgtgttccctccgatggtgcctccgctctcgctgggaaatgggctggtctcgggagctgtcggacacggcggtggtggtgccgcgtcgttggtttcgccggtgaggccggtctcgtccaatggcttcggcaagatggaaggcggggacctgtcgtcgctgtcgccatcgccggtgccgtacgttttcaaaggtgggctgaggggaaggaaggcaccgggcatcgagaaggttgtcgagagaagacagcggcggatgatcaagaacagggagtctgccgcgaggtcgcgccagaggaaacaggtgaaaagtcctttttgttgcaacttgcaactgtttagcatttacttgtcgaattgccttgccttctagtacttgcctgtagtgacatgtgtagcacatatattttcccttttaagcatttcttttcttttcgatgcgacaactaacaaatagtaataaccgtgagaaatgtttatcatcatgctgatcgttttatttgctaactaggatatgtgcctcatatttgcaaagtttatgctgtatttggttcaaacatactgaaatttaattagtataaacgctataaacatatcttttgcacgtattaagcctagcctaaaattagtatacacgctataaacataaaacaaagtggtgtttataaaacataagcatatctttctccttgctaagttgctattgatgttctaaaactttttgtcattttttatggatttaatttgtgcttcctgatatggagcaggcatatatgatggaattggaagctgaggtagcaaaacttaaggagctgaacgatgaactccagaaaaagcaggtactctccatgttctgtttacatttctagtttgagttttgttcgttataatttggaaatacttcttcatgagttgaagtacgtagtacactttggtaatctttaaactttcaaacatatggaattccaatgaagcatttgatgctggcatattattcatttgcctgtgaactgccactctttagattggggatttgatgatacgccattgatttcagagggacccttgtgtcactgtcacatggtggcaagttgctaatcatcaaactaaaaaaattgctgttttgaaatcttaaactatcagtttttgttattctcaattgtcactagtttgccacatgtccacttagtttctagcagtagtctccagagcatttgaccaagtgaggtccttaccaatagaaatattataggtgttttcatatacttcctccatccttaaaagagtatctttttagctatgaacatagacaataccactcttttagtgacagaagttgtattgacgctatactctagtgtagccccttactttatagtctactcttgaaattggaaactaattctaaactgacaagttaccatgaaatatgttccacgcttgaaagttagttctaaacaaaactgaaggcatggtagagtaatcaaagtcggttccattttaaactgtttaaatagtttggtggtggactgctggttagttgcttgccttctttgtacaggatatttcattttataaattgtaatatacgtagcttatcatgcatcttaattgcaagtctaactaaaatagtacttatgaatgttgcattgcacccacacccacaattgtgattatttcattttgcactgtcttattacattctttgaggtttgcccttgttttgtccgcctttcatggtaagtacttctgagaaggaaaacaaaagaaaggctttacatgattcaaacataagtgccttaagacctgacaattctattcccttaggatagtggactagtaggcagtagctactctattcatttgattatgctttagcatttgaacttatttttatgtattctaatgtgcaggatgaaatgttggagcagcaaaagaatgaggtaattgcttatcttggaaaaaaaatcttttgctctggataggtactatgttttgcttattaatgtcaaacaagaaacaaaacgaagctgtgcaacctaggcatgctctgttttactgatagcttacttgtttaccaaaaagttttactctgtaaaatctgatagttttaccctttacatgagtattacagcctaatctgtcaatatcatacatatgctctgctctatgattatttttcgctcgtaatgtatggtgtgaattttaacaattattgttaggaaaatgtatgctgtgtatattaacaattattgattcacttgtttgaatgtcaaacgttatgttctgattgatagctactggtcgtgagttttggctttcacactattaccttatagtatgggattttaagcaatgatgaagtaaagctttgtggggggttgagaaataatgaggcaaggactgatgtcgatgtgattgattgcattttcctacatcaggggttaggtggcagcatttaaatggcttaaactaaaaaagaaattctttgaattgatcagtcaactgccatcattgttgaattataaccatttaaatgatatttcatctataataatacagttttaactaaatgcaacattggaagggcaagcaaatattaaagtttattcaaaaaacagttatttgatgtgtgtatagtttaatgcctatgtttccatcgtagtggggtataactgtattttccacaacataacacttaaaaaagttatgacaggatagacaattgtgaaactgtcaatattgtttgttacaatcaatttaactgacaattttgactgaactttacatgaagttaacacatctctcaacactgtaaaatctgtggatacctccttaggccaatcgttgtaaactctgctgagaagactgactgttctctgtaaaaagggatatgttctcataacactgaggcggcagaatttcaaaccgcactccctccatgtcctagttgtttttccacatcttagaccactagtttgaatgtgtacagaagctaagggagtgccacaaatggtttgaaacttagaatcatcagttttttagaggctactctaaccctgaaaaaatgtggattggacaaaaactgaattactgaatgcttgctctaactaatactggtatgtagcacacatacttggtatttctatttctgagaaagagcctcttgtagactcttgccacttctactcgacataattgtattttggtaaaaaggaaaacaatggagcctctgatgttatcataaactgtacaattcatttttgaaaaagcaaatcaccactcaattctatttaatttatgttgtcctttggttgggttttaatgacttcaaaatggggttccttatttttctgtcagcatactatctgacaattgttcctggtaaatttgggagagaagtttccaagcttttcgtttcctagtttgagattttcctctggcttcaagacaccaccgcgtaaaagtctaataatgcactgttaatggtttctgcaggttctagagagaatgagccgacaagttggaccgacagcaaagagaatttgccttcggaggactctgacgggtccatggtgatcgaagctaaaggcctagttacctgtaactagaacacagtcctttcaatgtgagcagtgatcatagtagttgtaggatggtgaagctgaagacctggttacctgtaactagaacacagtcctttcaaagtgagcagtgattacagtagtagtaggatggtgaagctgccagttacctgtaactagaacacagtcctttcaaagtgagtatagtagtaggttagttcagaatcgccagatcgatctgcccttgtaggccaaccattagtccgtgggcttgtctcttgggcggacaggctgcctgagatattcactcgataggttttagttgtctgagttatatccaagcattgtatgtaacctatttaaccatggtgcctgctacctgtattgtattttgctgctgtaggaacctatgtcggtgttaccatcttgttcttaatttgtgtacttctcttgccattttggataagatgtatctgaacttatacatatgtacttttccttgccattttggacaagatgtatctgaatttacatgaacccattttggacaacgtgtatctgaatttatatgaaccatggcactgggctgtgtgtgtatactgtatagcattgtgccaaatttgtgagaaacggattgcttatcatggataacacttggacaagatgtatctgaatttatatgaaccatggcactgggctgtgtgtgtatactgtatagcattgtgccaaatttgtgagaaacgcattgcttatcatggataacaccacgagcaatgtgggggcgcctggtcatgtggccggccagtgacgcgacatgaatttgggggacgtttcgtgtagctgtccgtctccgtcgtggccatcctactccgggattgatccaactcgctgtccagacacgtgcagcacctgagggggcatctcatttcacctcatcacttcatcggaatagctctcctggagaatctggacaagcatctcacgattctttcaccaattgggtattattagcagcgtcggatagtataacaaacattctcagaggtcacgttagttagtcaggctaaaattctctcagaagtcgcggtaaaatcgtttttgcagcacaggacacacccgcgtgccacttgaagggcactgtcagagccttttctttttacattcactgactttttacgttcactgacagagctagctatagctcttcaattctatcgtgagctgtaggctgtgtttagatacaaactttggatccaaactttcaactttttccatcatatcaacctgtcatacacacacaatttttcagtcacattgtatcaattttaacccaaactttcaactttggaaggtactaaacacagccgtaatgcctgtacgtcgcggcgccaacggacgagcaccgtttgccactcaaaaagagcccgcatcaatgcacgccaattaacacaagattgacctccgggttagtaccagcaaaccttgcacggcgagacggcgttgctgtttactgcgacgccgccgtgcgcctgacgaacgtgacgggtgtgaccctgcgtgtgtgtagagtgaagtgagaaagagacgagagcccccgtaccagttagagacagacagatcgccgtgccaagacgacgacggacagggacgcccaactgtacgtgcctgcgctgcgtgcatccctcctcccccattcggcgccagccggaccacagcctgtcctgcccaccccaaccaaacaattctccgtagaatgcactgcacatcgatgacgaagacgacgatgtacagatgatgcaaagcctgcatcaaaccgggccgtctgctctgcttcacggctgacgctttctcaagaagaatttcaggctttcagattctttcgtctccatgcagattgcagagaacatttcacttttgcatggttgattgttcatcgaattttgagagcaatgagcatgagcaataatcatttttttggaaataaaattagtctacctcatggatttacattgatgattgataaagatctgaattaggggaataagcaagaaatctgctaaagtaaagaaaaaggatggctgaatgactgaatgatattatgataatgttaaatgaacttgaactgttcaagataggatagataggaggaggggagccggccggagggtggaaggcggcggcccaccaaaccctaaattcctttcattttccttttttttttcccgcatccgacgcatcgaggcaggggatattcttttcttatccttctaagttttcgttcttgcattcttctcgatgcaagagaagatgtcaatggcgtggcgtcgccgacgagttcagcaacggttgcgcacggacaacgccaccacctgcgcccactgcttcagcctcatcttcaccgtctccggcgtgtctcctgcaccacatcgatcaatcagaatcgaaatcaaaatccaaaacttttaactaataatcgaataccaaaacatcgagacgacgagacctaaatcatatttattacagaaaagaaaaatctctgttttctctgataagattcacaggtgctctgcatctaggaagtggcctctctcaatctaatcaacaccacgattgatatatatcatggaagtataatcaacaacagcacgattgatgtatcaatgaagtggatgcgacttgcgagtacgaggtaaacacgtatacatacctggagagagtatggacatggggctcccgagcggcgactcctcggacacatccgacgaggaggcgccgcacgagcaggggctcgcggcggcgcaaacctcgcccgcgccgccgccgccgccgccggcgttgccgtgaacggcgtagtagaggtccagcgcggggagcgtctccaccaggcggctcctcccggcgccgcacagcgggcacccggccgcctcgaacccgaacccgagatccatgcacccgcgcagctcgtcgaggtcgtcgtccgtgacgctcctcacccgccgcagcgccgacgacgacgacgatcccttgttcatcccgcgccggccgctcccacgcctcgtccctctccatgtccggcgaccacgagttctgcttctgcagccctagccccacccccgccgccggaaggcccctcctcttccccacgccgccgcagccgccgttcatcagatggctaaccttctccatgacggcggcgagccgtcggcccctccctctccgtcctcctccgcccgtacgccgtcgcgtcgggccgccctcctcctcctcctccggcccccgccccgcgaggcgaaggggggatgtgggagacgagagcttcgaggccctcgaagccgccgcggcgatgggatttttatcctctcctcctcccgccgccgccgccttccttttcctttgcgcggtcagctgcgtgacgtgtgccgacgtaagagggaaagaagcttttatttatatatatatatagcccttgatccaacggtggtggtttgaatcggagggcagtaattataaaggcatttaatttgggtcacggactcacgggaatgaggagcaaatgcactaaaatttcacccgtttattgccgtttaaatcgccgattttgagttcgcccgtttgaatctgtggtgggttcggttgtgatttcagtgcgatgcggtacacactagtatttgtacgacacgagtgccctgctcggctgccttacgagcgcaggtcgatgacaggtgggaccggtagtcagagaaactttatgatgatacagtaaaagataatattttttaaatatatggcaatgtaattagtgtttacaatataataatatgtgtaaaatttatacgactaaaattttttaatacaacataataattgtttatgggacaccgattctaatgcaaacaactcattcattttcaaccaattagattttttttcaaaaaaaaggggcaaaagctttgcctagtatatattgatagaacatatttatagggacaaagagcaaaagccaaaagaaaaaagtctagttagtccgcgtttcctagaatatgaactctgctagtggggttgcccctgccctcacccatgtaaccgcttctttcttgatctttgcaataatggttggtgccttggtggtatggtgtcaacgtgttggaaaatctttgcattacgttcgcaccaaaactcccaagcaatgaggatgattaacgacttcagcgtcttggtcggtctcggcaacctcagcatgaggtgataccaccaatcctctacggacgtgcggttgccccagttctacatgtcgaggtctagaccaatccagcgttggatctcctgccagattcgcttggagaacctgcagtgcgcgagaagatgcgtcgatgttttctgagtggtgtagcatagtgggcagatccactgattcacccatcctctcttctgtaatcgatccacagtccatatcctgttccgtattaataatcaggtgaagattttgcacttaggaggtacgaagggaatagttttatcagtattcaaattggataattagaagagcccatgcttgattttggttttaacatgggaaggttttttaaaaaatcatgccaagatctaatcggttttagcttgactgcttgaaatttgtgaaagtcctgcaatcgaaatagcattgccgttgcttgatcagctaaccacattaggtggtaagagttgcttgcacagaaagaagaatgatcgatcaacgtttacatgattgagtatccacaatccctcatgcatctcactatcaatcgtaatccctctcgacatggattgacaatacaaaaatatctgcagacatatttaaaatccattttcccacccagaaataaacatcagaaaatcaatctgattccgacaacacaatggaacttgtgttctcaccaggatttcatggtttgccaatcgcaattaagcattcctaatcatgtctgatccacacgttcaatgatttgtaccgaggggatgagttcatttcaaacttatttgcaagagtagcttgacaagatatctagcccatttagaatatgacacttcctctaaatacagcaattcaactttatacaaaaaactatggcaattcagcaaccaaaggcaatggaagcacagtagcatatcacagtacactgttcgatcgaaagttctaaacttgtctaaaattgtcaagaaaacgaaatccctgacgtgccttgaacaaggacatgccataatttgcacggcatacttgactttgcttaatactcagtgctagctttcaatagctgcgcgtaatgccattctctccaaaatagttggtgcttttaacttgccatttgggtcatgtttcgaacaaagaattattctgaaatttcattgatttcttttcactgaatgttctagaaagcaatgtaaaccctcctgtatttcaattgattttgtatatatgtaagttgacaaaaattcaagatgcgtgcttactgcttagtcaaattacaacattgctactaaataaatcagaagagagcttcatttgataagcgaggctacttttcttgttagtcaatgtcgtcatggaagaccgcctcttaacttgattacatcatggacggctcccaagtctcaacaaccggtataaagatggtactgatgtgcaatgatatacaggagcaacttgttcttgctcgtcgtttctgattggccaatctgtaaaacaatgagaaggatgacgacctacttcaataatgtccttttataattgcaggtattggggagatttcacggcattggcagccataaagatacgcatatgtatgctctatgatgttgttgcgtctagctgaactgccgagtggtttcgctattgcttttggttggcgattaaacaagcgttttgttttgttttctctgtgtaaaataatgaagtagccagttaggagtacaaccaaactgaacattgacccgttcctaggctgaaattggcatttgcttctaataataataacctgccagttctgaattcagaagaaaataaaagccttaattagtttaaccattatgcagtgacaacacaacttgcagttgtttttcccttcgagtccatgtcatgacagctgactagaagttacctgcattaatcgcactgcgaaatggcaacatagtttcgtgagaagaaggcaagattattcagacaaatacaatactacacctaacaatgacctcacctggaacatctttgtactctttcagaggacttgaccttgggttggaactaacaaggaaccgacactagtttttcgtcaatggtcaatgcattaagtgccattaaacatcaacctggaaggctggaacctcataaattatatctctctcccaaaatttgacagaatcagcaggtagaactcagccacagataatacaggtagcaatataatgcttcctcagtataggtctgttgctgtgggaatagggtattaacgaatcagggttgccgatgcctactggatttgccttcgccatcacggtactgctaatggagaagcatgacttaagctgcacattaatcaaatctggttatatgttggtcatttcagagctgtgcattgcagacttgcagtgcaggagtggtcatcacgaccactgggcgactgggtcctccacccgtatcaactccaacgtgtgggagccaaaagatttaaattagtggagaagccggccggccctaattggctggatcaaaactttgctcttgcatgccttcgatttgaagatattccacaccctttcggcctttcgtttttgtcgcggtctcgacggaatacctgacgatggatcggcagcgatgtcaaacggccgcagctagcagcatgtgcgggaaatcttgaccagttttagcggctgggtttgagctttctccacgaagaaattttcagacgatagatttggaggctgttcgttattattccctcttgccccagctgcatcccattatagggcggctttttttccacatcgcaactgcacccatcacgtacgcagcacgatcggatggtggttggccggataaacggggtcgctcgctggctgttcggttcggctcagtgtgtgcggaggttttctcgtacgtcttgttgcatgtcgcggcggtggtattttagatcgctgacgctcagcgtttagcgttgcgcggtatctccggcgtcggtggcggcgtttggaccgacgacgggcacccgaaaagaaaggccgaagggcgacgacgccccgcgcggcagggaacagctagtagccaggaggcccgtgattgcctacagcccagcgcccagcctgccaagaggagagcggctgggcctcctcagaccgaaccaaacccgcctgacggtgaatggcatgggctgtcccgatcgaaatcacgttgggccaacatggcgattccataaaagagccgaaatgcaccatctgcgcagatgatacgcgtggtgaaaaggaacaaagtccattttggcatccttaattatttgcccgaatctgattcacatttcttaaccataaaattaggtatatcgtctttcccagctatgaaaaccagttcgttgttgcctccccaaccggattgaacaatgattttgtcctatataacatgtttgacccggctttaatcggtggcgtcggaccctatcctatttctctacctctctcctctcaccctcaactctctcgatctctcccgtctttcctaatggtcactagggttggcgtacaaaggatgacctcattggcgggataagcgatggcacgatatgataggaagcagacaggtagggtctagggaaggagtctagatcaggacgaggtcaatgttgggattgtaggcaacgagtggtagtgccggtagaaccgtgtgagcaaatcaaactctggagagcgtggaggaagccatgcacaacggctatggcgaccaaacaaaggtagggacaacgagtagtatagtccgaagcttatatatgctaccgtcataatgttgataaaggagaaggcaaacggtggttggtaacacgggagcttgaggagtctactggcagcacaacgaggagagctctacgcaacctccagatgtatgacaaggtggaggtcacaagcatggtaggtgatgatccagttaggagtaatgcgagggaaagcgaggccaacctagcgatggacacattgacatggagtgagatgtggtgggtagagatagaggcgtcaacgaagaggaggaggagcaagagtgaggtgtggaggtagaggagcgggatgggagtcatttggaaagataacaagcgacaaccatgtgcgcaaagggttacattagcgatagattttatgtgtggtgcagccgtaggcagtgaggagcctgatggtggcgtgggagcttgacgagggcgtcagcatacgagaccttgacaaggctcgaggagatggaggaggaaggtgggagggagattgacaccctcctcgctgttcactgctctttgctgccaaatcaattcaagggagctctgaaggcacgttgtcgtttacattcacatgctgactggaaggggcgaagaggaaatcaacttgtgccaccagcctttgatcttggaggtcgctcaagggctcgtcggttatggtgcgagagaggatgaggaggagagtaggagggggagggggagtggcgaggaaaaatacgagagatgatcacttacacgtagatttatttttaatgattgggctgtcatatagatatcctgttaagaaaccactttaaaatatatgctacagagaattgtttttttaaaaatatgttacagaccaggctacgttcgttgcatcaggttcccaacatcatctccctcgtttttcgcgtacacgcttttcaaactactaaacggtgcgtttttttaaaaaagtttctatacgaaaattgcttaaaaaatcaaattaatttattttttaaaaaaattacctaatacttaattagtacgcgctgatggaccgttccgtttttgtgcagaggggatgggttaccaaccccacaatcgaacacagccctagtttgaaggcgaatcaaaattgacctttccccggtgagtccggctcaggtgcagggaaccctgcacatagtaatatacaggccaaatcaaatcgcgacacctgtacacaaggtaggtccacccaatcaaccaagtaacaatgtaaacggaggtttaaccacgatcccacaaaatcaggtaacagaaccattcacccgtttagtcctcgttaaacctccgttgcatgcgtaattaagtagggccaccctgaacaggtgt

SEQ ID NO: 5420 - DNA, 37514 bp, Oryza sativa
tctcccaaacaccccctcaaagcagctatgcagctatgagtatactgctagtatttgactaattgtagttgcaatatttctcgagtattctgcaatatactcaggcctagtaggctagtactatatatgactgccattttgaggttgaccactttgtatacgtaggtttgattacttgtagtgctcccaactggggtctgcaatttaatagctagcgcaaaatccaattgaaccacatccggtgaaccacaaaatagctgctttgacaaattttacaattcaaattaatctgatgaatttaatttaagccatcgaatcaacatccaagcatgtacatggcccttgaaaggtgaatatatttctcgatgcatgcatatatatggttcaccatcatcaaccagcaaataaggaatgacttggaattaagcagtggggatcacactatcacaaacaatatattggctgtgtttagatccaaactttcaatccaaacttccaactttaatttttccatcacatcaacctgtcatacacatacaacttttcagtcacatcgtaccaatttcaacccaaacttttaattttagaaggaactaaacacagccattgacgagaaaagtggactactgcttaagaaaggagtattcacgagcaggcgatccaaaaacaacgtagcatcaggcacagtggcccgtcccgtaaggcacgcagaccagtcggcgtgatttgatcaggatgctgcctctccgatgggacgctcgcctcgcacccatgtgtgccccatcccatgcatacatgcttgctagccagcttaggctgtgtttagatccaaagtccaaacttcattccttttccatcacattaacatgtcatatatacacatacaacttttcagtcacatcatctctaatttcaaccaaaatctaaactttgcgttgaactaaacacagccttactcgtttgtccacccaaactgtctctgaaccctctttcaggccggagtaacagtgtgctaattggccggccattacatgcatgcatgctgcagctatctgacccggactaattttacatcgacggtaataatcaaagatagtactggagtactattgatatctttaagttattcgtcgagatggaagccagagagagagagagagaggcagagtgcagtactgagaaacatccaatccaatatcgtggacaggcaatctggcatctcttgagtttacgcaaacggcaaacgtatgaatcctcccgtggaatattataacaccggtcaactgtttgcgaatacggagagaacgttataatatgtggtcgcgtcgatcatcgcatccctcctgccttcgtctggtcttgtcgcgcgccacaggcgccggaacttggatcggaggagtactagctacgagtatcatatggttcgtgctcccatccatgcaccagagccacgcctgcccccggccggtaacatgcatgcactgccggaaaggctacgagtcaaacaccctctgctagctgctcgtactcgtagatcggtcagtacagcgacgacgtcgacgtacgtacatttttcaatggtactagtagaattctgcatgtctgcttcttcttcttcttctctctttagcaaccaatattacacagtttcacagtgtagaagaggggaaagatattgacttagtagccatgtcagataaaattgatgtcaaaactaccgaaggatctaaagtgaacggttttttaaattgagagatgttatatattttatggttgaatgacaattttgtaattcgatgacaagttgacggaccttcggttgtactttttcctgtccctcaacatataaaagggccatcctacttcgctgccgcacacgtaacaggccggtggagagttctacctggcccaacttgtgaggtcgtctgttcatgggctatgccacaccgtcccttgggccacaccgctgcctgactcattgcagcccaatccgaaacacagttcgcgactctgccaccaagtcagcgacagcccgcaaggccgcaagcgccaagagatcgtgaccgggtcacagcccgcacggcaggcgaggccgtcccgtccgttctctgccacgcggcccagttcagctcacgtcgaccgttgcgccggttcgccctcttttcgaaaggcaaagacgcaccgcaccccgtcaacctcgcggttaaccaaaaccactccatgacatgtgggctccatggtatcctcggacccaccaggcagtgactcagcctcgaaaccaacgcgtggcagaggcaaagatatggtgtctctgagagcaagtttaatagtttaactcactactagctccaattcatctatagccaatctaataactcatccatacaatagttatatactacactattaatatatggtcccacctgtcatacacatactgcgtcttggagtccgtgctacagctagctataaatctgtagaccgctgctcttttctctccttatttatctttttaaaatatatttgcagctgacttatattatgctattgtacctgctctgatgatacctttccctcctcccctcgcttggcacagattcccccatcgctgccaaaagcggacgcctccagcgtcctcccgccattactcacccagcaaccgactcgctcctccctttccgccgctgaccggtgggccatcccccccaccctcctcctctcagcttgtataccagcgcttccgcagagtcacgcactgcacagttgaagttggtggagtgtggagtggagtggagtggaatggcgggggtgtgtggctccgtcgcggcggcggcggcgatggtcgtggttgtgatggtgtcgtcgttgccgggcggcgtggaggcgaagacgacgatcgagccgtgcacggggtcggactcgtgctcggcgctgctgggctacacgctctacgccgacatgaaggtgtcggaggtggccgcgctgttcggcacggacccggcggcgctgctggccgccaacgcgctggactttggggcgccgggggcggcgcaccgcatcctcccgatgggcctcttcgtccgcgtccccacccgctgctcctgcaccgacggcgtccgcaagtcggtctccgtgcgctacgccgcgcgccccgccgacacgctcgccaccgtcgccgaccgggggggtcgccgacggcgtcttcgcggggctcgccttcgccgaccagatccgcaacgccaacgccgtcgcatccgcggaccccgacgcgccgcttgaccccggccagaagctcgtcgtcccgctgccctgcgtctgcttcaactcctccgacaacaacctgcccgccgtgtacctctcctacgtcgtgcaggtcggggacaccgtgcccgccatcgccgccagctacgagaccaccgtcacggatgtcatgaatgtgaacgccatgggaagcccgatcgccgcgccgggcgacattctcgccatcccattgccaggtacatgttcatctcaaactttgcaaacgatatcgcagatgagccgtatggtttattgcattgagctaactgttttgagctaaaactttgcaaacgagcatattttctgcaggcaaattggttcgtcagtatgtttttgttctgaataaataataatcagacaatgcatcattggggatataaacagtatgcatgctagtggacattgcattggtgccttagctttaatatttgattgcttcataggctgcttatattctagggtttaattgattagtacagtaaagaaaatcacatcagtttaatgtcgggcttcaccatcttgctcgattttagtcttcctcatgttggtccgaactgaacatttgaaattatgaatctgtcgtcattacagtagcccaattactagctgcagtttgatgtttggtacttcctccgtttcataatataagtctttttagcattacacacattcatatagatgtttatcaatttaaacatatatgtgtgtctagattcattaacatctatatgaatgtggccaatgctagaaagtcttatattatgaaacggaaggagtatatgcgatgtttcaattcgctaacatcggagtcagataaatagaactttgtttaggcaatcgattactcttcaataggaattaggaagatactattggagagttatgcacgaactgttcagttttcctttctattcattcagtgagtttcagattgtgtatcctgtaagaaaacataagcatcatattatgatgagcctctgcgtttatggactctatcttttgttgattgctaattcttctgttctgccttctgtgacaacagttgggctgcatcatttatcttttctaaatatcagcattttctccctagttcttccagtgacaattgttgcttgtttctgtatcttagcatgtacatctgcatttcccaaatctgcttcagaccatggactaattgtggcaaatgggacttatgcacttactgctggaaactgtgtgcagtgtagttgcgggccagggaatctcaagtaattttcagattgtaccttttctgtttaacacgatattatatggaaccattatttgggtcgtaatgtctgtcttctcttctgtctcagtttatattgcacaccagcttcattgacagggtcatgtccaagcatgcagtgcagtaacagcaatgttctgctaggtaatgtaagcgctcgttccaccagtgcaggctgcaatgtttcttcttgtagctacggaggttttgttaatggaaccattaccacattgtaagtaacatgttgctcagagtctctgttttttctacttctactatcaagttgttacattctaccttcctttgcaggctgagcacaggtcttcaatccagatgtccaggtaattactgttgctgtgagcttgtggcctgcaactggcttacaatgcagcaatatcgtgcatttgaatttcaatctgcctcagatgttagtatttttcaggtttttgaactggaaaagcatgcatccttttttattaaaaaaaacagtagtaagttgcatcaacagaattaacatcccacctgaatagttgcaaaaattgcactttgtcactttgaattccagagcaacctgcatcatactttgcgaatgaatacattcataccttcgctttggctgagcagcaattgttcgttctatgattacaagttctttaactcggctcttttagtcagcattgccacttttactttgatacatgtccactgttttttattcttcttctgcacgcaggaccacatcagttccctgaactcactgaaccccctaccacggtgaaccatgattcaacgtttctcccgccattatcggcacctggacctgcagaagccggcggcgccattccccctccgaactcaggctcaccatcagtgcaaggagggtctttcacactgcccaaagtatccactgcaaatggccctgccggaagcgtttcagaggctccttggatgaacaagccgcatcagatcctgtcaagtttcatcttgtgtctactacttctctactcgcagatgtgaattgcaatgtgtagtcaaggaccaattctgtagtaattgtaaacttgaagcctcatttaggcaaggggaggtggacagtatcatatcggcgatgtttttggagcttctttctatgggtatcaattcatgccatgaattgtggctttctttcatgacatcttccagctgtcgtcgtactcggtcgcatctctgaatatggccgagtttagttccaaactttttcttcaaacttccaacttttccattacatcaaaactttcctacacacacaaacttccaacttttccgtcacatcgttccaatttcaatcaaactttaaattttggcgtgaactaaacacaccctatatagctttgcaatctttgcatgaaaggagaggtttcaagtactctcttctctgacgactgtcaattctgtccatgttatcatacatgaccattggttggcttttctttactggggagccacggacaagctctttttcttcgacccctcatctgccggcgtcgaaaaagatctcgctagagtgttacgggtaaatttttttaactgcttggaatcagatctcgttgctgatctgtggtctacaaagcagttttgagccatgtgaagttagctttcacgctctctccttttcttctaattctctttggactttggcctcatctttggtacctttccgtccgcgcaatggtactttcgctttcagtctttcagttgaaactcattttcatcatgtaggagtagcttcttgcctaacgcaccacactgtttgatatgcagttctgcacatttccaatgctgaattccctgaccaaagtagggaagccagtccactaacacgatgcacacctcatatcccaaccaaccaacgcataggaccagcaggaccatgccactgtatcaggcagaagtgaaatgccattgctcttctctctgaaatgaattcagatgctcagctccagataacatttcgcctttcagaagcatctctgcaggttgcaacaagtgtctgctcctgtgccgaaaggacagtgaatagctccatgagtcatggcccgtggaaggatcaattggcgctgcaaatcggaataaaaatccaagaaatgcaggaatatccaacggcgccaggctttctgaagaatatagttctgctgctgctattgctgatgctataagctggtagctctcgccatttgctccgtgtaaatactgtcaagttaagagtgatacgcacgctttagcaagtgcttttatcggcttaagatgccaacctcacgtggtgattatccactttcggtaatgtagcaaactagcagcttatcttctttaatcaagaaggagagcagtgcctttcacattttccttttgtagattcctgaccaaccaaccaaatctatgatggtacggagttcaggattagtttttgttcactagttacttggatttatctcacatgagaatagctgtttttttttatgttgatcatgtgatttacagcacaaaaattgatcaataacaccacaaacatgcataaattgtgcctggtaacttagatgaagcgtagagcaggcaagttccatcgtcctaccatttattttcagatcagcataatttcatatttacaaaataacattttctttaatgtgtcacagttcatttagctaccgtagcatctctctatttcagctattgtacttatcgtcatattcaaatactaccaaatataagtcaccggtcatttcactcatttcactttggtaccatagcaattcaataaccccgctgtacacacctcataaacacacaaaagtctgatcttcagagtttttttttcgagtttctccagatcttcggagtttctttttccagtacatgaatggtactgacaggaccatagtataacacagagtcttgtctaaggttttctctaccgacgaaggatcgagtatttttcaaccagtccaatcaggccagattcaaaagaagttcacaaagctaaactctttttcacgtgaacacgcaaaaaaaattgcacgttaatatattgaaaggaaaaaaaaaattgtaacacaacgcaatccactgcccggaatccgcacaattctggtggattgtgatgaatgccattgggcgtccggatctcttccctgcctctcagaactccatctcttggtggtcggcagccaggaagggagtgacgaagcagctccgtcgtggtttcgatacagttgtggtcctagccgcttggttcatatggaaagagaggaacaatagggtttttaaccagaagcagtgagcgtgagaggaggttgctagggcagcagcagaggaggccgccctatggaggctagcaggtctactccccgagtagatcatggctgtcgtggttgcaaagttgatgtcatgagattatagcttagcctccttttcttgcctttctttttcggtttctctttcagttgcactgtaaagctgtcacaatttctccccaatcttaatacaaaagatgcgcaactcttttgcgcattctcgaaaaataaaagctactccaatcagcgagagggtagaggtggagccacactacactaaaaaaaacacaaaagcagcaacgccagtggaagaccacagacaatcctctgagaggatggactcgaaaaccacggagaccgaggagagcaccgagttgaaaaccctaaaattccgctcctttcacagctactaagagaccagaaggaccagagagtcgaagccgacacgaagatgttcaagtaatcaggccctagaagacggccaccggtcctgaagcgagctgccacgggcctcaaactctcaaagataatcccaaagaataatctgtgttcaccaactgcacacatcacctccaaacacgtacgtacggacgtaccatggccgccggcgacgtctaatccaaaatttccaaaccaatgaacaatagccggtttgacacgacgaagaagcgacagaaatgcagatagacgtgtcgaggccgattggctggcctcttggacaatttacgaggagtatctgtctagctgatggcctgttgctgcagaagtagcaattcgtgctctcccttttcgttgaaagagagagcgatcgagaggtagcaattacgtgctcaactgatcaattgacaaagcatactatacatttgtctcaaactgaaggattccgcgagaagatttgtggacttgttttcagagatgctaggcatcatatgaaacactgctcatgacgcagatctcagaaacttcagagttactagaggatcacattcacggtcatttttcgtcgccgttgtaaactagcttttactactacttccattgacaggcagggaaaacttcagagcgatccaatctgttcttttctgttaatggtactaaaatatttgcgaaaatctcatttggaaaagtgttctttgcactaataactagtactaacagaagcacttttattgcgagaataagacgagccatccaatggcaactcgttacgctggcacgagctctgaaattccgatctccacttgggcagcacatccaaataaacaagctgcttatgttgtcatctctgtccattactttgccctgcaattcttcgtgaatatcgttatctggaacatggatcagaacaatctagtggcagccagattagttgctgccattatctcttggttaattaaaggctaagacaagctcaggttaaagcgcaaaaggaagtggaaagaacaaatgagcgagctgaggattggttctgacttctgtaggagatgatagttgaagttaaaaaagattaaacttgagaccactcatgcatgcatcgaatgagctgaactgcactttgggtgatttttacggcagtagtatatctgatctgatatttgtttactctgaacaaagcagatcaactgcacaaatggagtgagatcacgcgcctctgctagccttgcagctggattagtacggcaactagtacaagttgacagtattgtcaatatatacagttacatctagtgcttctgttcgttcacagtgatcagttttgttctttttgaaaaaaatcagtgttcagttttgcgatcggtgaagattgcaggcatttattattattattattattattgaactgagccacgaagctatatcattattgatcgagataaaatagttgaaaaatgaaagtacgttttatatgatataataattcttgtgtctacgcagttatacatggggaatatgctggaaatgtgctaatggagagaagagaagttgatacggcaaggggcaagaaccatgtacttatcaaattgcaactatttgtctagcttgtttcagctttccagatgagtttctttcttgggctatggtaatggatgtacaagcttttgtaaggttaatatatcattaggcatctagtgttcacttcaatttgtactttctacctgaaaactttaattgattaaaatcaacttgcatggtgatatgatatctgtgtattgctcaaagataagtagtcactgtacattactattatggtatttcccattgttccaccagatcattaatcctactatacaaagtccaaattgacttatagctttacatcttaaatacattagaagtcttggtggcaagaatacgagtcatgacttatatccactgagttgcaaggacaactttactgtattccctccggtcacagaaataatggcagtctaaaatgaatgtaatcttacggtgttaattttcagctaaaagaaatgtcaaattttgactaattctagtgtataaatttataatttggatgtacactaatgtacaagtaagcctgtcataaagaccaccacttttagtgtataaatttataatttggatgtacactcatggtataagtaatgagtcttttacctttatgccattattaagaaagttggaggttacgcgtgtgccacaaaaaagttttgagttacatgtataccatgacacaaattttcgtttacctgtgtgccattccatccaccttctgttagagaatgagctctgacatgtgggacccacgtatgaaaataactaaattgcccctaaagcattttcatctccactactcctctcctccagtgcgccttgaaccctagccgccgctgccgccgtttgtcgctgtcgccggcacgctgctgcctcgcctcgttttccgtcgctggcacgccgccgccgccgccgccggtcgtcgccgtcgccggcacgccgctgtcgccgccttgcctcgccggcacgccgcagcgccaccaccgccgccgcaaaagtggatgaaatagaagggcaaaatagatctttcaaacctctgttagtctttgttagtgctaattccatccaaagtggcgcacaggtaaacgaaagtttgtgtcatgtcatacaggtgactcaaaattttttttgtagcacacacgtaacctccaacttttttaatggcataggggtaaaagactcacaagtaagcctgtcataaagaccaccactttttgttgactttgttaactcaagaacaccattcttccgtggctgttgggtgggcagggtgtaggtttggcaatgtgcccagagcctaagaagaagaaggaaaacgatgaactgctgaaagccttttcgggttaaaactgtttttgccataatatggggaggtacacaactgcgtctcttgcctaggcttagcctcaagtaccacctataaattcacgttaaaaatgaagtagtggagattttggttgtcaatttgatttgatgtatagtgcaaagaaaagaaggaaaagaaaaggaagagaaagagatcgagagacaagatgcactgaagatcaggtcctgagacgagtgctgtcacctcttcgcaaattgcctcaatgctgaacctatcctgattcagtgattcctgatggacacgacatggatgagtcgtccagaggaaaagaaacgccgcaccgagaaaaccaacaaaaattaaccctcatttgagatcatacatgcccttaattgaaacccatcgacagtcaaaagataacttttctcaagacacttattagtcaatcaagattcaagagcctggaaacaacagtcaaagtagatcttatacatactaatcaaactattttgcaacaaagaacatatagaaactaaccgatcgattgggttccaggagatcgccggagctccggcgagttcgggcattcggcaccagaaggaagagagtcgccggcctaactgataagagcaagtttaatagtatagcccactactagctccaaatcatctatagccaatgtaatagctaattcatacaatagttgcttactatactattaatatctggtctcacttgtcatagacaaattacgtcttggagtccattctgcagctggctacatatctgtagtttgctgctcttctctctcttactttatcttttgctcttctctctcttactttatctttttaaaatatatttataactagcttatagcccgctattgtatctgctctaatacgaacaaagaggagggttttatgaaaaacaagtcctactctctccaatgggattgatatcgaccgtcagatgataatcggacgatgaagagtgatccaagatggtcgcgatccaaactctcgggagtattctcaacgaaaacgtcctacctgcactcgagtccaaccaatctgaactgcagagtttgatcgaacggcgaagaggtattctagtcagatcgctaccattaatcgcgacccaattctcaggggttgtgaaagataattcgacgaaaacgagggtttcctgtgtaaatatacctccaccccctcaactcctctctctgacaggtgggctcactcgctgacccgcagtcaacggcggctttcacggtgagctaccgccgccgctgccgcgactcctcgccgtgccggcgttggtgagaggtgggcctcgccggcaggcggcagaagcaatcgcctcgacctcgagctcatgcctaatccgtcttgatcaatcagcggctaattaattcgtctggcttagcaatggacagagaagcaaatcgagctataaaatgtgtgaagagaatataatagctatgaactgtgagttcaactgataattatacatacataagtcgacctgtcaattctatcatacatgcgtctatacaagatcgatcaaaaagatcaagaagaagaaggggaaatcaagagaccaaaatcatgagatcgaaaacccggagcaaatcactaatcacctagctactgtatgccactccactctcctctcgtcgtgtactgtctctgctagctatagctaatcgctactgtacacgtacgcggggcgtcctcgccggcagatcgactccgccatggcgcacggaagcgagctcgatcgatcaggagctgactttggcgcgggtgcacggggagaaggagtagtggtggtggtggtgcgatccgccgccggcgtggacgcggtgcggcgacgacgagccgccgccgccgccgccggccgcgtgggtctcccgctccacgagcgagcggaggcggaggaactcgtcgacggagcaggggagccggagcgggccggccgagtcgtagccgtaggcgtcgcgcgccgcctcaagcaggcggcggaacaaggggtggtagaggtaggcgatcgggatgacgaaccgccggaacccgccgccgtcgccgccgtcggcgccctccaccccgaccctcaccgccagccaccctttcttcaccttcccggccttcttctcctccccctgcagcatggcggaagcaccaaccaccgaaacagacgccgtcctctcctccgcgacgacgacctcgccgccgttgcagctgattaacctcgctgcgcaagtgcaatcaagctacgcacactccacgagctggagctgatcgatctcgaattggggcgtggtgtgctctgccacgcgtggtgtgtcttttataggacgcggcccgtgcgggcgaggagtttggctttagcttagctagtggcagtggcgtacgtacgtcctttgctacggaagccggccgccactgtcatggcgtgctcgcgttccttccggctcccgtgtcgctgacacgcgggcctcggggaatatcagggttcaggtgaaccgctgcagtgaacgagagagagattgttatgctcaaaaacgggaaactgttttgaaccctccctcagttgtctcctcctccatctaaaaacaattcaatcagttacaaaaaattctgaaaaaaatagatgatatttatgcagcgtatatatatatcgctccacaaaatcttaggtcgttaaaactcatcatatatattactaagatataaaaagtttcagttggtaaatagtagtggcactatatatttatatccaaatttgtctctttttcttctttaatacgtaggtcgaatttgatgttgattttcggttaagcgctagatttcactgtagtctatattgttattttctttaaatctttttcataactatttgcatagaatttagaaggaaaaaagtacacaagtctaaaaaaaaatccaaaatataacatgtgagcctgtttggcgcctacacgaatcgccgatgacccgggcggtggcgcccaccgggggatcgagtggggtggcaatagcttgtggtggaactgatccggccaagtgggggagggaatagcgtgtgttcgtgcagtgtgtgctgccccacgagagatggtggggattggcatgcagatcatgacggaatggttcgtcagattgttgttgctgctgctgctgctgttgttgagtactaatcactattggattttgttctttgtgcttctgcttctagctgtttcggttatcttttccagtgatggtgggggatgcgtgattaacccaatctcatctatggtgtgcgatcgatcgacatgactgcagatatgggcgttcctttaatttgatcgaggatgatacacatacatacgccacaataatctgtgtggttgcatgcagtgctattgattcagttcttctcgtcaatctttatctctgttgaaatatctctgttgtcgtcctcaatagttattctgaggttagtcttactggtagacagggaagttgtcacaggggaaatctcacatcattctagctccaaaccaaatgacaggtgctttgtcagggggtgtgatggattagcgatccaggattattccaggcagctagggccacaatgttttactaatttgtttctttgcacgagtgagagcaccatgcacacagatatctcgtactactactcttctactagtaatttggataaaatacgcaactactcctacctacgagttttctttttaaattttaacagatgcacgcgcctaatggttgtctttctcgaaaggatagatatcatatcacgatgagtagaccgacatcttggactgctggattgcttatctacatgtatgtcatgattattggttatgtcagccaactttgtggtcacaagatgtgttgtatgcttgtaaagttgtactaataaaactacccaaaattttcacgtaattctacgcaaatcgcaggttaaggttcatttacaagtagaattgcatctgctatacaatttcgttgtgtttcgacaaattaatatgtatattaattgagtgaattgtagcttagactactttctattgccaatgtttcaatttatactatcttttgactaatcctttcgctttgcattagttaaatacttaaatttactctctctctctcactctggaccaccccaattctcttatatacccatatctaactacgcctccgacaaagatatagcttggggagggagtttatcagtgtattggaaccaatattggttattgatgtgcttaaaaaagtggtttgggtggtttaaatctgttgacagaaaacacgaggcctgggagatctgcttaactccagtgcaggtccaaagctcgtcttcgaatgtatgagcgtgccagttgatttaatcctgtaatcaacaagaaatagagacaaagaatttgtggttaaatctataaatgatagccgatcggctaagtgccgatgacatatcatttatctttgagccgatgtcatttatgaatcgatcagtggttataaatagatagtaaggaactaaatctattcgataggctgtagatattaacgatatatagttcttatattaatatatacttcaatcaaatgattgggatagatcggtcaccatgccgagacagtataaatcacttaaatcgaaatatatattaataataggattatatatgtttatagcatagccgatcagatagatctagcatgtatcggttaatactccgatactactctatataaagatatcaaaacaagtataatataccaaacaaaagcttaatatacttaaatgcaataagatcttgatataaagggcatatttaacatgtcactgaagcatatagattgaatatggttaaatcagataagatcggctgaaactccgatattaccctaatcggtaaccagaggacatgctagagattgatattctaagcacgacttaatagatcaaactcaactaatacagcattaagtatgaaaagaagaacaatatctagacaacaaagccgctggatgtttcataaagtggtagatatcttatataatctaggacaacgtcgctatttaacctaatcggctgccttctattaacagatgttagccgattgtaggttagatgacgatattgccaaagattatgtaagatatataataactcgacgaattatatagacaagattagagtgtcataaagatggaagcactaatctcgagaacacaagtcgtcataacaagttttacctcttgttgaagatcgaaaccgatgcagctcaacccgaaagcaagaactcgtcgaaacaaaactaaagcaaaaaggtggcgatgcgccgaaattgtattgaatgtgtgtgttaaaaattacatagggctcggggtctatttatactcgagaattacaagatatgtccataccggacatgaccactatctttaacaaacactaagataccataagtctttgcggcagacttttgcccaaacatatctctaaggaagttacataaaacatcctaattaatagatacaattgccttcttgggactctatccatgtgcggaaatcatcttgaagcacctcaattcaacccgatgtcatacaccaaattatactgtcggaatcggctgcatcggcttacctagtccgactcagacccagccgatcctaatcgtagccgatctggacttcagccgattcttgctctgttctcggatcaatctccgccttcgactccacttcgatctaatctccttttctgatgctgatattaccaaatttggtcgttaacacatgccccccaagtccgggatatttgataatgttccggatttgccgtgtaccgactccgagcaagtttcgcactctgccgttttttgaccgttattctatcgctttaaataccaaccgttgccctcgagaaatctcacgccgtgacttccgttttcaccgctcaagcaaaactttgtcctttctctctccggcgattcctccgacgcaaaagcgatccccaggcgatttcgcttctgatcagatctccgcctgcggtgatgtcgtcttccactagcccgtctactgcgccatcagccgagtacgctgaggtaagttctcaccggctagatcccttttcctcgcatgaaatcgatttctccttttctcattatgttttctgcttcccgattcctttggatttgcagcacctttccaacctagttgcgattcccagcctatcgcacaaaaaccattattttcttggcccaatcggcaatcttgaccccactgatttcatcattggtgaaaccaacataatcccctttagactagctaaccctaacctgggtcactggaagaataccttcaagtcttggccatctctcgaaaggcctacccctgataagagctggaccacctggtaccatcgcatatcggctagtaagaaagtccactgggatgagattgggatcggccaagcgctttctctcaccatagccaattctgctaaggatgaacctctaatggctgccgctacctatttttggtccaacaccatcaatgccttcttatttaaccaagggccgatgactccaactttgatcgacatcatcatgattactggattagatgtaacttcatcggctaaccctatgagtatgaacaccaagaaccaatttgacttcaagaccaaaagcataggagggtggtctggttatgcagcggcatacatgggcaaaaggcctgtcactcctcgagagcacgtagctttcttgctaatgtggctagaaaagtttctcttttgtggatccagctgtggtctcacaaccaattggcaatttgtagccggagccttaggatcaaagaaacaattccccttgggcaaaatccttctcggctatctataccaaatgttgaacaatgcatcggctaagatagccgtcggctcaatagttggagcaggtggaccatggtggctactgcagacctggctaaacctggtagtcatgaaagttgtcaatcggccatatgtaacagaagctgaattcccaaggttggagccaattgtagaagacgatggagaagaacgcacccatcgcagatgcatgtcatatggagaatatgcatccacactagccgatgctggggtaaaactattggctgagctgctcaaagattggttctgcagcttttatgaaggcttccagaaagatgcccgggtttggtttctttatgaagacttagcagaccttgagctcccattagacttcagatttgaagacatcaatcatgaaagatatcaaacgtccagggaagtctttacagctgcaatcagcccatgcatcctacatgtcggtattcaccaaggaagaaatatccaagtctcctacgaattctatcaccctataagttcagctagacaacttggattagaccaactcccaatcggcttattctttgctgacaagatccaatgccgaggagaaatttcttcaactctaatgatggatcgactgcttaacctccaaggaccttccttaggcagtatcgacaatattgagttagcaggatttaggagtaggaactttgacagatggtggggtgaatggaagttgcatctatttcatcaatcggccacaatgtatatgacagatctattccctgacgtcataccccaggtaaactttgtcatcactaaatttcataacggttagccaattcattacttgactaatcttttgttcttgttttgcagacaacagaatcctcccctccacatcagagcaatagtggtaggaacattgaatatgccctaggtctgattcctaatggaggcagattgtctccccctgtcatcggctatcatgcccccttaggtctcaaccctcctccaaggcgccatcagggaaccaaccgatgtaaccaagaaaagaagaactagatcattggctgtgagcaccttgactctagctccaaagaaaaaggccaagtctaagaaaaccaagccaaccgatgacctgcctgctttggatccatccattgaacaagctctggatgaagaagatattgaggatgatgttgatcaggctgcagccgaagtaagtgatactgaaaaaacaccatcggcttcgcctaagcatatacctccaactccttctgcccccactccttcagagtaaaacgtctttccctgcaaacccttttataatcattatttttcagccgactactcataagctttgtaattgcataagaagaaaactgctataaagaagaaatcggcagcagcaattctcaaaccagctccaccagtaagatactctcaattttactagttgattccagccgatattgtctaacacttgtctttttacagcctcctcctcctcctccttcttcccctgtacaacaatcatcgagtgaccgaactccatcggccgtggggagtcatcatattgtggaagaagaacaaccagctgctcctgctatcccagtaagttttcctttgatgcaagaatttagatcggctatattggcttagctctcaaactgtctgaacttatacctgcaggttctagccgatctcttctcttttgatatcaaagattatcttgatgaggcagaagaagatacttcaagcaaagctctagctctcttatctaacaatgcaaagaaaacacttgaagatatctcgcgtcggctagaggcctcttctctggatagcttagtggtcgattgtagatcgattaggacacgattgcacgaagttcaagctctaattcctgaagaactggccgatgtcctaactccagccgcttatcttgagcaacatcaatttaaactagaaaaagccaagctaagattagccgaacgccgtgaacgcaaggagattgaagccacaatccaggtcaatcggcagcttgtgcatgaagaaaaagtcaaactcgatcacctatccgaaggtccgatcaaatccaataccgattggcttgaagcccgcaagatcgatctcttagcacagcttgaagaatgcaatgctgaattggatatggagcacaaaagctagccgatctctcaaaatctgtcgaagagcaaaaagcaaggctcaaatcggctatcaagaatgttgctgacctaaccaagtccctgaaggtcatttctggaactgatgctcaagatgcccaagccattgaagaagtcgaacacattaggcaaagagctattttggctatccagcagtacttgtctcaataacttttgtgtaataggacttagaaattcctgtaatcggctaagataccttaataccctgctgttttaacaatcctttgtgccgaataacataacttctaattttcactttcattttttgtatatatgtgccccccaattttataatgtcaacagcattgataaaattagaaaaacaactaagggcgatataacaatatcggtcgttatatatcggcaaaccataaccgatgacaattggaaaaacgactaagggcgatataacaatatcggccgttatatatcggcaaaccataaccgattacaattagaaaaacgactaagggcgatataacaatatcggccatctcaagacgatgtaaaacacatcggctgtcatgcatcagcaacactagccgatcatgcgtcaacccaaacacttgggtaatacttcttcaagtatttgccattgagcgctcgtccataaacctcaccatcaagcccttgcaacatatatgcccctttagacacaaccttatagatttgaaacagtccttcccaatttggtgaccacttgccgaacttgttatcccgagttccaatcggcaaaatcaacttccatacaagttcacctttcgaaaaatccttggcactactttcttgttataatgcctagcaactcgttccttatctttggtaaccttagcaagggctcataaacgcgattgaaccaagtcctccctctcatcggccataaggttataatactcatcagctgtcaaactgtcttgcaattctatccttctagagccgattctaacttcccatggcaaaacagcttcatgtccaaaaacaagcttataaggaggaacttgaattgatccatggcaagccatccgataaaaccacaatgcttcggccaaccgggtatgccattaccgaggataatcagaaatcttccgcttaattaatttgatcaagctcttgttagatgcctcggcctgcccattagcttgtgcataatatggtgaagaattcaacaatttgatacccacgctatcggcaaactgaacaaactcatcggacacgaagattgaaccttgatcagatgtaatagtttgaggaataccaaatcggtagattatatgttcttgaacaaattgaattgcatccctagaatcaactttcttcaaaggaatggcctccgcccacttggtgaaataatcagtcgccaccaatataaacttatgccttttacttgatggtgggtttatcataccgatcatatcaattccccaacctctgaatggccacggtttaataataggattcatagccgacgtcggcactcgttgaattgtcccaaacttctgacaatcttgacaccccttataatatctgaagcaatcctctagcattgtcggccaaaaataccctgcacgccgaagtaaccaattcatcttatgggccgattggtgagtgccacaaattccttcatgaacttcgccgattgcaactttagcctgatcggcactcaaacacttaagtaacactccatcaatcatccgataataaagctcatcatccaatagagtgtacttcaacgccttatattttaatttcctagaagccgattgagatggattatgtaaatattgatgcacatcatatctccaatcatcggctgttattgctgcaatttcaaccttaacatctttgatcatcggcttataccccgatgccccttgggccaaatcattagcttcaatattttgttctcgagatacatgctttaaagtaaccagccgaaatttcttcatcagttcttggcacttctcattataaaccattaatgtatcattcttgcattcatagtcccctgccaattgactgattaccagcaaagaatcccccatgatttcaatagcatcagcttcaacttccttgagcaattgcaaccctttaagcactgcttcatactcagcttgattattagtcgcataaggtttaatagtataagcaaacttgaaacatgccccctaggggaaattataactaggccgataccacaaccatgagtacacaccgatccatcaaagaataaagtccatggcaccatttcaactgagccgattgaatcatcacgatgttccacgataaaatcggctatagcttgtcccttaatcgccttcggtgactcataccgaagatcaaactcagttaaggaaaatatccaatttccaacccttcctttcaatattggagccgataacatgtatctaacaacgtcggccttgcatataatagtacattcattggatagtaaataatgccttaacctcgtgcatgaaaaatataaacacaagcataacttctccacaggagaatatctagtctctgcatccaagagccgacgactgagataaaatacaactcgttcttttccatccaactcctgaatcaagactgagccgattggcttctcaccggctgacagatacaatctaaaaggtatccctttctgtggaggaatcaaaacaggaggggaactcaggtatcctttaatattatccaaagccttttactgctctgccccccaaataaattgttgatcggccttcaatctcaacaatggtgtaaaaggttctaattttccggacaaattagaaataaaccttcgaacaatattaatcttgccgatcatctcctgcaattcggtcttgtttcccgggggcttaatctttttgatcgcattgatacttctttgagttatctcaattcccctctcatggacaagaaatcccaggaactggctagccgatacaccaaaagcacactttatcggattcatcttcaagccatatttcctggtcctctcaaaaacttttcttaaatcggctatgtggtcttttatttccttagatttaacaaccatatcatcaatatagacctcaaccagccagccgattagatcatgataaatataattcatggcccgttgatatgtagctccagcactcttcaagccgaaagtcataacaacccattcaaataagccgattgcaccaggacatctaaaatctgtcttatggatatcttcatcagccataaaactttgattataccctgcgtttccatccataaaactcaaaattttgttccctgacgcagcatcaaccagctgatcggctactggcattggatattcatctttcggtgtagctttattcagatctctaaaatcaatgcataccctcaccttgccgttcttcttgatgacaggaactatgctagaaacccactcagcatatcggcaaggacgaataaaaccagcatcatataaacgcttaatctcagccttgataggttcaagcatatcggctttgcatctcctcggaggctgctggtgcggcctaacccctggtttgataggtagccgatgttctacaattgatcggctgagtccaggcatctcataatactcccaagcgaagcaatctctaaactcttttaagagctctatcagcttggttctaaattctggatacaaattcttactaataaatgtcggccttggccgatcacctggacgtatatctatttcttccaaatcatcggccgacataaaaccttgaccttgcttgtcatcgagatcatctaccgtatccttagtgtagacatttgaaccctccacgacaccctcaaaataatagcttgggttctccatcttcaactggctgtatatcagaatcggacacttttagaaaatctccatcccaaacttttccagataaacaatcaaggccatccatctcccaaagagctaaatcggcactggcaacattaactgacatgtcggctggtacgatctctattttgtcgccttgccactgaatcaagcattgatgcatagttgaaggaatacaacaattggcgtgaatccaatcccttccaagcaactagctgtaagaacccttcccatcaatgacaaaaaaacgtggtaggaatagtcttactgccgactgtcagctccacatttagaacacctttggtttccgatggattgccaccaaagtccttgagcaccatatttgtcttgatgagatcctcggcatttctacccaacttcctgaacgtagcataaggcatcaaatttaccgcggccccaccatcaaccatcattttagacatcagcttcccattgacatagccatttatatacaatggtttaagatgctgattctctgtcccctcaggcttctcgaacaccgcatgttctggtgatagaaccaacttagccgattcctcttccacctcgtcgacatcggcttgatcgatcccgaattctgctggcaaggtaaaaaccatgttaactggtgccgtcacaatactctttccttttgccaacctctttgcctcatcggctgcaacatcatcggctacaggagcctgattcttaacacgccactcctgcctcggttttgctttcttcagccgatgatcaatttcttgctcgacctcttggaagcgttccctactcctcaatctttgaacccttcttttctaattcttcgtaaaaataccagaaggacaccattgagtcttcctattttcatcatcttccgaatcaccacgttggtttactgggcccaatctttgatgaacaggtactcttgtctgttttggtcgattgcctctatcgtacaatcggcttgaaccccctgcaacatcactgcatccaggacaatcctcgatagatggtagtctcataccttcattccaacagaacctgaagaactcacagccccaataaggatcaaagccaccattatcttcttcatgatgcctttcctgttgcttgtcgtattttctttgatatttgtttataattctagctgaacttacttgataatccctcatgcgccccgtatcagctgttcggtcagctgtgtgtaccatgttaacgggaaatgggttaccatcgaccctcatcggctttttggaaccatcaaacttaatcttgcctccctcaatgtccacctgaatctgttgtctaaaaaccttgcaatcgttagtagaatgggacctagaattatgccatttgcaatatctctttttgcctaattcctcagccgatggaatcgtatgaccaacagggagttgaatttgcttctctcggagtagcagatcaaaaatcttgtcagctttagtaatatcaaaatcatacttctctttctttccagaactctttacccattggcacggtatgacctttttacttctcacccatttggctgcagctatttcagaatcatcctcatcgtcatccgacccatacatgtaaggacaaacatgattaaccttcttagagctttttctagcctccgcagacctatgctcgtgcaaggttaccttttgtatcagatgtgacaagctatcaaagtcttcagacgagaatttctccctaatcggagcaatcataccctgaaaggccaaatcggctaactgagcgtcagttaaactcaagctaaagcatttgttcctcatctccctgaatctctgaatatactcgtgcacaggttcatcatgccgctgcttaatcgccgtcaagtcagataacttcatctcatgaaccccactgtagaaatagctgtggaattgcttctccaaatcggcccaactattgatcgacccatacggcagagaagaaaaccaagtaaaagccgatccagataaagataactggaacaacctaaccctcagagcgtccacagccgatgcttcaccacactgagctaaaaatcggctaatgtgctcataagttgacacaccatcttgtctcgaaaatttagagaagtccggaactttgaaccgattggggagaggaactctctcaaaccactcagtgtaaggctgccggtacaagcttccagtctcttttggtttaagcccaaaccgttccctcattacatcagcaatcacattggcccacggtcgttgctgagctgttccctgtgactgttgttgcatgggctcgaactgaccatactgagatgcaaactgaggttgagccagtccccctggctgatattgggcttgcggggaaggagactgatattgataattcaagttgccccccctggtaattatgaaggatcggttgaatattacgtgccaaatgctcgggaacaacttgaggcattactgtgtcatctggctatacgtggtgaaccaagtgttctgtgacgacttgatttaaaaattgttgtataggctgtccaccaggcgtcacaagcccggccgatgcgctcattgagccttggtgctgaatcggctgaccgatttgctgtcttaatggcgtctgctgaatcggccgcggaggctgttgccttggtaacgtttgctaaactgattgcacaacttgttgctggattggttgtacaacctgctaaattgggagtgtctgttgaatcggttgctgttgtattggatcaacagcaggttgaggcggcagaaacatggcagcaacctgatcttgcgtcagccgattcgcaacctgcccacatgctgtggttgctctctcattaacaaccgagagttcaccagctggcctagtgccaatgctgacggagcaggtaagggagtcgatgccggcgccgtcagctgagctgatggtgcgatgggggaaactgcctaaatagatggctgggcatcagtgatcaaaggccgataatttggaaagacacctccttgcaaataaactgggcctgcagcctaggagatctgcttagctccagtgcgggtccaaatatgatgagatgcgagcgtgccagtcagtttgatcctgcaactgacaagatatgcaaatagtatatcaaaatagccaatcgactgacaagccgatggagtagttccagcaaatagccgataatagccgatgccgataccagccgatagtgatagggtttaagcaatgggctatatgtcaaatgtagataatgatataacggcaatcgactgatgataataaaatacgacaacaatataatccggtataaaccaatcggctatcaatacaatatgatagaataagcattgatccgaaggttaaagcatacatcggctggaggtccaatgtcataaaatccacaagattggattaaacaatgaaacctttgttacgatcgactaaatccaatatgtatgcaatccttgtaagccgatgcaacgtccacataactcatcggctgaaaccccgatgaaacccttattggcaatcaagaagcaagctagagattatggttctaaacacgacttagtagatcaaacttaactgatgcagcactaagtatgaaaagaaacataatatctagacaatcaagccgttaactgatttttagggtggtagatatctaagctaatctaatctagcaacacgatttagccgataccggcagaaaccctaaagcgagaagcagccgatagaggtaaattgatatgctaagactagattaacagagacatatgataaataggtaggcaaatatatcatccaaatcagagcaatccaagaggtcgaatgtactgatgcagccttgaacgacgccgacgtagacgatacaattgctcggaccggcgaaacattggacttaccccttcgctggagatcgaacaccgatgcagccccgcgtcgggtgccaagtcccgccggatgataaaataaggtagaaaaggtaaaaggggtggcgatgcgccgaattgtattaatcgtggagatagattacatagaccccgggtgtacatatttatacccatgggttgatacaagtccttgtcggacaagaaagaaactaacctaaagataaaaggaaaatataaagtccttatcagacactaaacacactttcctaaagataaaaggaaactaacaaactattcctaattaatagataaactgtcatgccgcatcctctttaaactcggtcacttagggataagcttcctttagtagattgatttccttaaccgaatatagcaggaatccgactattggcgacttgataactcccatcggcgagatgctgcagccgataatgattctaacccgatgacgtcgttgccgattaccaaatttcactgttaacaaaatcacaacaaagataaaattactagtttaaagtgaaaatatggtataaatggtggttcaaaataaaaaacttgaaaaatataagtggtccagactataatttattcactaattaatttataatgttatatagtctagaccatcacaatatactgcgtacatatttctttttctaaagttaacatgataaattataggtcatcgatgcaaacgtgttgattctttttttttagttggccccttttcagaacataaactttataatgcaatacatggttttcgtatcagctccctttcatgaggatactggtctatatatgttaaactaacctttagctacaaaagtaacgtgtacctttttttactggtatcaactttagaagataaataatgaagcaatcgattaaaatacaagaaggcatgcatgcacgccttgcatgcttactgtaaaaccacggctaactgtggttttgatggcaaaacttcgaatatatgattggtgataacagcaagtttagtactagtatatacgtttctctttaaaaaagtatacttttgtaaaaaaagaaaaattgaaagtatatcttccaatatgagtatggacttctcttgtcgactcatgctatagatgctaatgttggatcttcatggtgggcatgtaagagtatgctacacaaaaacccacggtgaatttaacaatgtgcactatcaacaatcgtatttgtttttttcctgcttgtataggtcgaatttagatttgtagagtgatatatatcatatatctatcaattttttttcaatttttatggcgttttcgtgacatgtaaaaacaagggggcatcctctttgaaaaaatagcttattcacactacaaatatttcgaccaaactatcataaaactacatatttaaagtgttgtattataaaactatacattaagtagctaaattatcataaaactataaatttagtaccaagttaaccacaaaactacgccatttatagctccaacataaatgtagtgttatggatttaaactctaataaaggttataattttttgatgacttcttcgatattaaatctatacttttatgatactcaacattaaatttgtagttttattataaatttggtactaaatctatagttttgtgataaaataccttaaatttgtaattttacgatcgtttagttaaaatggttgtagttatgtaatcccttcatccaaaagtctaagggtgtatttggttggggtgagtttttatgagagattagaagtttaaaaggatgaggttattaactattctatttggttgagagacaaatgagttttcgtgggatgggatggggaattgagggaagatctccctcctttttaatatttgggtaggggctagtaattgataggaaatttctcctttacgttgcctaaataaatcttagccatccattttcatttaaaatctagtcaccaactaaactccttgtcaattcccaccacctctatcaaaaataaaattgtgactaaaaatcaaattcacatgttaatctcaccatcaattccctcatctaaacttccaatcatttttcctcaagttgccaaaccagccataagacatatttttcttttgtcactaaaaactaaatagaaattaactcatacaccatgtgacaaaacgaaagaaattatacgcatgcaaccaatgactattaagatagcttttcaggtattggtcgataatttagtttagcacatagaaactacaaatatgtttatctcatttaaaaaaccagaaaataaaatatatcttaaactttttgatggagggagtacattttacttcaaataaatgatttcccacacaaagctatgtacactatacaaccctgattaattggcctcaatattactactacatcaataactaaaattagcatgcaaatcaaacatgcaccagcacaagactgtatacatatcctcttttattctccttttgttgccactttcgctattcacaaacagctatctagggtctatcaagctctgcaggccccccgagaaaaaagggcaaaccaacaggggagaaaaatcccggccgttgtgcacccgaacagccaaacgccacccgacccacgaacatggccacggtcgcgtcaccaccaagccatctcacctgtccggtggccaccccgcatacgtgccctattgcgcttggcatctggcgcggcatcatccattgtaatcctcctccccccaccaccaccacggtctacgagaacgggcctgtttagtgagcttaagattttgagaaacaactgctgagaaactagctggtgaaaatctgaagaaactgaaaaacttagcttctggcttctagtttattttccagattctacaagcacatattctcataatctaggtaaaaaaaactatactgtttgggagagcttctggtaactggagattctagaagaagctgcagctgctagaagctctctaaacagacccaacgtctgctccccccgtccgcgaaacgcccgatgggtgtaccgaacggttgcgtgattccaccacgcctcgcctcgcctcgccgcaactcaacgcaacgccgcagccgcccccacgcgagcgagcgacgtagtactacgtaacgtgatcgcgcgctcgcgcgcggagacgataaggcggaggcgatggcacggcaccacggtggggatggtggatgatggatgggtggatggacgcgggatcgcgcgtgtggccgtcgcgagcgcgagccccctctctccgttggcaagctgacagcgaggtataggtggtggtggtggtggtgcgcgctccgctcccggggcgggcgccacacggtgtttcgcctttgctcccgcccggctcccgttgtcgttgataggaacgggagtgcacgcgcgatcgatcgatcgatcccctcctgtgcggtgcggaagccgtacggggctcaaccgctcaagacgcgtcgatcggtggacgtggaggcacccatcattcgatttcgcccgtgcatgccggccccgcagcctcttgccacgttggctttgtcggtacaacgacgaaaggctcaactaaattcttcgaagaaaaaaaaaggagaaaaagctaaactaacaaaggaggaggatggcgatggcattgcgagcagatatccgctgtacgttggtgatcgatagtacgatgctcgatcgactttttatcagtgctcacaagatagtgtataataataatttcgtaaaggaaaagtgcacaaaatggagctttgcgagtttgtcacgaggtgacggagtacacctgctttggtacttgtttggctcgctcgatcaccacacatgaaaaaaaaaaagtgacctaccatggtaagtgggaagggcctgcaatcaacttcgtccccttcagatagctaccctttagagtaaccaatcaggacgtacatgatatcctagctagaaactccagttcattttagtagttattgttaattatcctacaactaacaaagcgaggagagatcaagacacacttggattagcacaactggcgtgattaactccaggggacagcaataagatcgatacgctcatgattaggcgccaagcgcacaaagcaaagtgccgtacgagtaaagcagcaaactccatgcaaaacacaaagccggcagaaagtgccgggccattcgaggatggccggggtcaagaggtcaacaagaaaatctcgagctagcgcgtgggcatctatgatctatctccatcctcttcttttctcttctcttcctctcctgcgtgctatactagcttgcaagcgaaagaaagctaagctaccggcttcgatcgatctccacttccccccggtgcagggcacggctcccgtcccatccatcatctcgaaccgcacaacaacaacaacaacaactagattgcaatgatcgcaatgtcgtggtcaccgagaccctgcaggatcatcagaacgatcgaagcagatcgatcgatcgatcgatcaatcgaacaaccgcatgcagcagcagggcaccgaataatccgcgctttggaggtgaaagcaacgtggggtatcggagcccagccacacgccgagcccgagccactcgcggatcgaatcgctctccctcgccgccctgctcctggcacgtacatcgtcgagggagatagcacatgtacaggagcaaatattcctcctcctccttccggttctttttccaaaagcaacaattcgctggatgattggtcagcaatcagcactgttcattggtccaagctagtagctgccgacccaagctgcctgaatgagggtactggccttttgttgcgcttttgacccagtgctggtagggaacgacgagacgcaacgtagggccgtacaggcaaatatgcaatgcaagagaggagaagagaggctcccgtgagacgggcggctcgaaatctccccggcgaaaagggacagaaaaacaggagtcgacgcgaccgtctagaagcagagaagcctggagatatcagtgcgtgtgtgtgtgcgtgcgattttccctgcaaaagacggcgcctcgcgcggctgcaacaacaggattcggtcgatcggttggagatgcggcggtggtggcttttcgaagggtcggtcaagttggagttggggggtcgcatcgcgtgcgccgcgcaccacaccgacatggcctgtcacagtactaccaccgtatcacggatgctcattcgtcccgatcgatatttttgctggtcggctcggcttcgtgccgtatactgtcgtgtcgtggccggatggctgcaagcctgcaacgagtcgtcgttgccttcgctagctgacattgtggctctgtttattgcctgctagtatatctcgcggcggtttttcacgcccctgcacgggtactgatctgtacagcaaggctgaacagagtagagaaattaacgtgaagcctatcaataaaatgttggttagtcctcaccctcctacgactacgagccagatgattccaacctactccctcagtccaaaaacaaacacaattctagatttgaacctggttcaaatttagaattaggttttttttaaggacggaggaagtagttcttttctgtcgactctgtaaatagctttatttatttgttcatatttgtgtaatcagcaagcatattactcagtgctacttttttactagtttcacaatgattattatctagtagttatcagggtatgaataagacatacctcagtatccttggggttgtgcagtgtacagatatgatataccctcgaatatacgggaaagttatcttagtcctaaggaattcagcagatatataagaaaactgtctttccaaatataaggtgttatagtcatattcgaaggagttgcggactctgtgatctcgtacgcgtaaggtattctccaagttctatttgaaggccaagacacttaggggtataaatacaaagctctcaaggatacgggatcatcgaatcataatctcacaaccgggcatagcagaatcaattcggaggactcggagccaagccgccggttaatctcgtcgagttaatctcgacaaaggtctaatcggtactcgtcggttctattgttctcttaatttctgtggttttcttcataatctcatataaactggattaagcctatcaccttacgaggggtctgaaccagtataatctttgtattctgtgtgtttgatatcgtattgtgtagatcctactccagcgtaccctgataccctcataataggtctacgggtatcacctgtcaacaatagtagaggagcatctaattcttatttatcaatatatctctccccatttattttctattaaaatgtaaatttttttcatgattttcattagcacatttttaaacggttaaacggtatgcttctttctatatagaagttgctttaaaatatcaaatatttttttacatgttttaataaataaaactcaattaattatgtgcaaatagtttttttattttgtatacactgactttgtcttcatcttaatctattttaaacaccacctgaatgctctatgactacgagcgtatcatgcttacatgttactgtgcattgcgtttctcgagcatgtactaatcggtggttccatccaagtgataattaaccgtggaagaacggttaatcgagggagaaatagtagtagcagtactgtattctgtatataaggggacaaggtacacattgggaaagggaactgtactctaaaaagtaagtgtaaggtcctatgacagtgatttttgcgacgtgcccatatctgctgggacgcgtctaaacatcaacgccgtagaggaaaaaaactgttattgctacgatgactccaaaaatttaaagaacggccgcaaattatagccctacattcatccaaaaaagagtataggtttgtcttggttattattaacgtttgaccatatgtcttatttaaagaaattatgattaatatttttattgttatcagatgataaaacataaatagtactttaggtgtgactattttttaaaaaagtttgctcataaatttttgaaataacgaacacaaaaatccataattgcacttaaattgagacggaggtagtagtaatgaccagctaaatcattcgagttaaatccccaaaaatttacaagttaaatcttgtatgaaccctcatgtagtacatcagtatgtgtttagttcctgtgctaaaaattttttaagtatacggacacacatttgaaatattaaacgtaaactaataataaaacaaattacagattccgcccgtaaactgcgagacgaatctattaatcctaattaatccgtcattaacaaatgtttactgtagcatcacattatcaaatcatagcgtaattaggctcaaaagattcatctcgcgatttacatacaaactgtgcgattagttttgttcgtctatatttagtgcttcatacatatgtccaaacatttgacgtgacggaaaaattagaagttcgaagaaaaaattgagtctaaacaagcctatgacaagtaggcaggacactggcgtaccgaaataggagtgggtgacataagcaaacgcaatactgaacgcataccaatattgcaatacagtaacatgagtactggacagcagcattattacgtgcagtacgtcatacaacggtttactatatcggcagccttaagctcagctttccgacgactaaaaaacaaaaatgcaaatgcgtacaattaatgacaaatcaatatttggaaatatacaccaggtacttggggtccggtccaagcatacaacaaatgaacataagtaccactaaaatctttagaaaatgtttttttacatcgtctgtgtggctcccaatggtaggaaagattattaacccaagttacaaatctggacggcaagaggaaaacacctgtctcagactaaaaaattatctgcatctaacatataaaaaagctgactaccacaccagactaagttattactagtcattaaaacaaaaacctcttgtttgctgaaatattaaatggttgttaacaagctccgagcaagtcacccgcaaccaatcaacataaaaaagaacagggtcagactgtactgctgtatctaaaactataccagctatcaccacttcaccattaaaatggctgctgtaaaccaacagttccatttcaactgctttcgccgtctccatcccaacaggcagcaatgaatcagacctcattagccattaccaattgcctgtctccaatcccttgagcgattatcagccccgcggtggccctgactcgcaccaatggaccatttcttttcttgtaatcccaacaaagagtggttatttctttttttgtcttctgcaaagctaaactatcacttctgcaacgctaaactatcacacgcaaaggcaagaatgtacaaagaaattacagagaatttatatgtacaggcgagaaaggcatctttgtatatcctcaaacaggtaaatccacccatgttgccgttcacccgagcgacctgaggcggagcaagatttctggtaaagatcccacaccatacattcatctgtttcgttctctcgttcacattaactcagtttgcaccgttctacaacttcagcccaattggatcatcgtttgcttggaaccctttgtagcagcaaaagactggccagccccacttgacgcttgtactttctggctgtgaagaccaaggaaacaaacgtcttctggcctttcttgagacaagattaaccatcttgatctcagctgctcctatccaccaggctcttgtggttcatgggcctgtgtatttcgattccgcaacttgtctttagaaagagagtcacgaggaacatatgcataccccttcggaagacgttggttctgtgtagaagcttgatcagatgtcataaaaagctccttttgaaatgtttccctattctgaaaaaccatgtggtctacacattagcaaggtacagaaaagaagtaaaaaacctgaaaacagaagtacaaaccttcttatccttcgtcttcttttctccagcttccaatttctgtgaggtaactggtcttcgcgggagctgcttaccagcaagtgatcctctttcactaaacttccgtttgaacgatatcagtgtccttgagctatcagctgtgtttatctcagcatccctgttattcagagaaaacctgatcgcctttttcccagaaatagtactgtccactgtgacatcatcagacctttgcatggttccactgtatgatttgttgttaacagaagtagtggcagattctgaacttgctccatgtgtaaggtagg

SEQ ID NO: 5421 - DNA, 32264 bp, Oryza sativa
tgataggcagtggaaaacgcccgacaggtccactaatgtagcatcattttgaggatctggtacttatttttgtttcagtgtgttggtgttgtttggcattagattgacaacatggataaggcattattatgtcattagaatataaatgatcgcttctgttctccttgtatcatatcatgctaaaataagtgatttgagcttgttcaccttgcttgccctttatatgatagtaatagtgtttacctttttttttttaatcattttggatgctagcctgctcaatcatatttctacaacagctagttcaggggaaaataagtttatgcctcgcctttttgttcagcttttaattgatggtgttgttttactgcttttgtgacataccatatgttttgatctgtccttaaaccactcggtacttgtaaccctgagcaacttagacccatgtagatgtaattttttctttctgacatcatagaacatgccatgagttcctgcagtactttaattgcatttgaattgaactgttcattttcattgtgtcatgttgtggaatgtctattcttcaggatccataccatggacctggtcaggcgatggggttgtctttctcagtaccagaggggatcaaaattccttctagcttagcaaacatatttaaagagctgcaaaaagatctaggttgcaccgtgccttcacatggaaacttggaaagatgggctgtgcaggtaaggcggtttgataaacatccgaataaactgccctgagtccctgacatttgtaacaacatgccgtttctcttatttttatcttaatgttaactcgtgttgcaaaaacaagaggatttgtatgcactaatacctttaacaactagatagtgttgtattttggggtctatatataacactatttggacgccatggagaccataggtctgttactttgagacaggtcttgtgaaggaaaaaatccactagggtctagtttgttcttattaattctatctgatatagaaagtggataagctgttattccattagttcttagcaaagcatgataaactttctatgactgttttttgggagatgttgtctaacatgggaaacacatgttttacagggtgttcttatgctcaacactgtattaactggtatgattattgttcccatttacattgaaaactatttttatttttgttgctttgttagctcttatgtattcataatcttgattaaactgtgatgtaacttgtaggttcttttataatcatgaccacaaaaataataaagtgttgcattacacataggcctgttttgggagcccacgatccatggcccatccacagagatgggctggggattacaggctccccaaaggtttcttccagttgctactgtatcacatttatttgatgttgcttgtcctcttcctctagcttagtgcaaagtaatgcattcctctgttgagaatctttattccatgggaattcactattgtgatcttagttgctctatccttgcacgagtttcttatcagcactgaacaatcctacttcttaattttctatagtgtcaatctataatcagagaaataaaacatctcttttgttgttactatattgctaggataataatgtaaacgctaaacaatttccttactgaaagctccaactagaagtttggttgccaccagctgtgctgttctgcatttccagcaggagataaacaatactaatatcattaccatgttagtttcccattaaaatctactctcagtatctgatctgcctgaatgctgtggtagaattgatttgtttggaagttgtatcttgttgggtatatttttgctgatttcattttcatcttgtcgggccagtgagagaacatcaagccaattcacatgccaagaaaggatgggagcaatttactgatgctgtcattaagacaatatcactgaagaaatctggaatagtctttattctctggggaaactcagctcaagcaaagacaaggtattgcttcgttcacatctgcaaatctgtgacttggaatgttggcgctatcaaaagaatattttgtaaaactggctattataatgtcagctgagagacaagagtacctgcatgctgttttgcagattgattgatgaaacaaaacaccacattttgaaatccgctcatccatcagggctgtctgcaagcagaggtttctttggatgcaggtttgttttcttgtcagataaaatgaactttcttcatttgtttctgtgagttaaaaaataagactagactctacataggagtaaaacatcacagaagggagagctgatatatttctgtaacttaggttaaatttgaatagcatacttcagagagaataaagactatgttacttagtataaaactgaattattatgattgttcagcacttgcatatcaggattgccctatatgcggcgccataatatctatttgatgctagacaacccaccaatggctggtatctttgttactgtagatgatttagtgggtgggttataatgatttatcctaagatcaactttaactcacctgcaccactatacaatggtactgtcggtccatgctgagtggtgctatactgctataaaccctcaatgcttttggccgtcttgtcctgtcttgtttttgccaacttgatattacttttgccttttcactcactagtgttaatggctagatccaaatgagcattagctcaggcacaacatatagaacgtgaattggatattggcatctcagatactgtttatggggccaattcaaatcattctaatgctacttttgcccttgtgattatcgttgaatcagcctgcaataggataaatttttattgatgatcgttgtgctgtgcttatcttaaacaggcacttttctaaaacgaatcagatcttggagaggctgggactatctgccattgattggcaactctagaccatttgaagacatcatgtggtctgtctgcctgacaaccacctcagctttgaaggtacttgttgcaaggaccatcgaattcggccaaaattttgtaggaccttaaattatatatggccgatcaaaatgctaatgtaattacgcagttcttatatggtatctaatgccgcaccgaaacatctaaattgtttcggttgtcgtatgtgcagctactttgcgtagcgcttgggcgccattttggtcgctttgttagatctgaagaattgcttaacaaccgtcctggcctttcaagttttttaaataccataaagccagatcgtccttcctcatctgggatccctttgtcctcttagattttgctcgtaggcctgtcaccaacccttagatcctaagaaattcccgtgctagagacatgtcccctcttttaattcgatgagtgccgcacctacgtacagagtgagtatttaaagcccgtgatgagcaggtgaaagggtacacgtctcgcacgatacctaccgtggctgtagtattttttgtacagcaggtggttgcctgcaaataattagacagatactccatgcttctagagcttgcagaaaaccggcacgtcagtcgccgtgtgtgcagccagagagtgacatgtaatactccagaaccgcagcgtaagcgttacaactccagaatcgcagcgtacgtacgcatcaggcatcgcaacgtgttagtccatccagagtccagatgctttgctgaaacttgacacacaaccatgcacgttgtctcatcagctcaaaccgggggcagtagaaaacgacatggtggcattccatgtattgacatcgcatccgatccttccggctccgtcaagtcttggatagattgtgattgtgagatcgatgcatcctcccgtcgtaatctctcggcctcacatcaaaattttaagtattccattccacggggcaaaatcaccggatctttgcagatctgcaagcgtgacttccatgtttcacccagctccatctcatgtttgataacatgactactaaatcgcacctacgtacgtacagtgggctccattgcaatggaagcatcgcaagtcgccgatcttggaaaagatcggcacgcacttggatggaagtctagcagcaaagcagccggtctcttgcactgttcgcaggtcgttctgaaagcgacgaggtgagctagctcctgcccaatctccttgattgtaccgtgcccatttgattatcattacgccctggggacatgatagcatgtacctgtggacgcaattgacgacctgagacgctgtacatcgtaagctcacctaccggtcccatgcatggccggtgtctgcgggcaaacgtacatgtcaccgtggacccgtattttatgttttcactctctagttccttaccttcttcactgggtgaatgcacgccacatgcatggctgatattctttttaggaaaaattggaaccatgccattatacttctttttaagtagcttatggtaaagttttaaaaaatatatacggagtcctataaaaaccataagattgtattcccaaattatagactcatcagctaaattaccattagctgtttcttactaaaatctaaaagcttcgggcttgtttggtacagctccaactcctaaatttaactctaggagttgagtctggagtagagttgtggagctgcctaaacccagctccacaactctagtttattttgtgagagagctccactcagctccactcctagttttgattgagccgaaactatttttggctgagctccagctccagaagaggtgaagctggagctaaagctgtgccaaacagtcccttcctttgaaaccattagctgttactgctggtgggtagatctctctcctgtgacactcaggactacagtggtaagtaccgtactagtgttccctattctagtaggggtccggatgagcccaaccccgatcgaccgtgccgatcgatccagccagtggcagcggccagcggcatgggaaggccaagcgtccgcgtcggcgctggccgctatcaagcggtcgggtggcggtccaccgcgcgagatctcccccgcgatcctgcggtcaaatcccccgcgatcgcgttcgtgtcgcgggcgaggcgcgaggcgacgcgatccccccgaccaatcaaccaccagaccgcgcctccatgccatgcaaaacccgcgcgagcgagccgcgagcgctcatggtttccacgcccacgtttccctcgtggatatgccaaatacgagagagctgtccagttcatttctatagagttttggatgaagataaaaattttcatgacacgttttttaaactgataaatagtgtgtttcgtgcgaaaactttttatatgaaagttattctaaaatatcatatgaatatactttttaagtttataataattaaaacttaattaattatacgttaataccaacttattttacataagtagattgatctttatttttatttttaagagaaaagaacaccaccgtagcctggtggaatgtggatggctgcctgccgttttgcatgacctggggctgggattggagtatttggttccacctgacggcaggtagccccaggtctcggttcttctcgcttgtcgcctctgccctctcgattgtatgcgcggtttgcctcgctcgtcgtgatccctttcccgtaatccccgagatttggatgcttctccatgggatgacagccatgccaacgccaacgccaacgcccatggtctggccatgcaacgatgttcagtcatggaggcctcaaccgtagcacgtgcctagttgcaccggacacgtctatggcctactgtggacgacagggtaaacttcatgtacgacatctggggttctcaatttgcatacactgtacacaacctgacagctctgcttgtgtcgtccattctacgcgaatgcgaggtcgtcattcattttcatctactaatgtactcccatctggtaaatgcaatgtgaccatgtgctgcacctgtttttcgtacaggagtgcttccgtttacaaataaatgacgttgtaaaatacgtgccgttaaacctcaaaaacttaaatatacaaatattagaacttcacgcgagcaggagcggatccagtatatggtagcggggtctcgagtctccactattagcgtgaagactctaagagccctgatgaagccctcaccgctattttttttaccatacatagatgagagagatgattgtagctttatctagtttgttttctggattcaccactgcacatgagaaaataccgtggaggtgtttggttcctagctacattttgccacgccatacttttagctgcaaagtatgactggtaatcaaacacaccctgcgtaaagtagttagaaaaagtaatgacaaaataattgggaaactattttaaactctcgaggagatatttcctcgttgtttgcatatcactcaaatggttatattttttttagaaaatcaacaagatagattaacatgtgacagatcattccacaaacatgaaatgtaaaattaacttctacatgttacaatgaaaaaacatttttttcgaggaaaaataaatttaattgcgaatatacattaactagttgtagtttaattttttttaacatgtaaaatttgaatttcaacttgcatatttgcagagtgattatatgctatacatcttcttaatttattttataactacttgagtgacatgaaaaaacgagtgaacgtttctcgagagtttaaaattcactctccgaaacaatatctactagtactatataatatacacatcaatacacatagttagagaggtagcttcaggtggcaatgtatagacctaaacgtacatctgattgggatcgtatgacatgaaatcagaggaacgtggtcactgacaggttaggcccaccgcttatgggccgacctatcaatgaccacgttatcggttagttcacgtcagaggaaccgcttccacgtacaccataattaagtactcctagcttaggggatggaccagttgttaaaaagaggatcccacgagaagcagcggccgtggcagtggcaactggcaagtagcaactgaaccaaagcacacagggtttactagcttagtttaagtacaacgcccccacctccccccgtacaccacgtaccacacacgggatacgatcccgtcgggtccccacacgcgccgcgacgcactctcgcacgcacgctacacgacccacccgggccgtgttgcgtgcgcccgtcgctgtctcgtatctgcatacggcctcggccatcaactctccccgtacgcgcgatcgatgcgtttggttgggtttttcccgtagagaatcggaatcgccagtacgctcgatctccgtctagagaaaaactgatctaggacgagatatgacgaactactatctccgttttattttaattgtagttaggagtttccgtattcaacgttttaccgtttatcttgtttaaaaattttttatgattggtatttttattgttattagatgataaaatataaataatactttatgcatgacttattttttctaatcttttcataaatttcttaaataagacgaacaattaaacattggacacaaaaacgacaactacatttatattggggcggaggtagtattagaccacccgcaatggtaaaataaggtgctctctataaaatatgtacatctcagcaatagattagattaatagtaaaccacctcaatagtatgtctacatgggtatctatagctctctaatccattgcctcgtttttctctatagactatccccagattagtagatagttttactctctctcttcatttaatctcttccaagtaggaaaatatgctgacatgtatctcttgtagagagcttatagataaccattgtgggtgcccttagggaaatttttataatggaggtgagtgccatatctaatttaaaccatgtcatattctcattaattaagaggtaacaagtacaacatgccacctatagttcacaaaccccaacattaatttactctcacatcatcttatatttttcttggagattgtgtggaggttgccccttacatgagaggtggctcattttctctctctcctaacttctctcctccaactcatcacctaatcttagggcatgtttagatccatttggaatggcaaatggcaaatggcaaaagtcttggtggcaaaagttttggcattacaaaagtactagttggtgtttagatgcatgttaaagttttgtcattctagcactaaagtgagagagagaaagagagagggagtggtcccaaagcactttttggcacaatttgctactatgtactagcaaatgccaaataccaaattgccaacttttgctactagtgtttagatccaaaatggcaaaaagtgctataaaatgacaaaacttttactattttagagaatctaaacagtgccttatgtggtaaatttaggggcaacatgcagaggcttatacttgcccttatacatttttccattaacgcatttaagatactgctactgtagccgattggtcatgtgacgttcagttggagcagtggtgactggtgaaattaatggtgcccggccggaagagtttagtgaccgtcttaaccgtgcaatgcaatcaatgcaatgtcgtcaagagaaaaggaaagtttctcatcaagctgattccattcgtgccgtttaagctagtactaattcaacacgaatttagacccaaagaaaagcgatttcactatcaatcaggatttggagtacgtgcaggttagattttgagtgtagagatgcaacgaggagcagacgagagacgacctgtcgtccagggaaaaaaaatgtttgatttatctacacaagtgaaacgtccatgcgtagcaatcaaacggagatggacaaaagaaataaaaatgtttgagtacatcgtttttaaccagtaaacaaatcaaggtcaaagtcagacgtgctcacacacacagctgaagcgatcaagcaaaaaaacatggcatggcatatcgcacagtgttttcgtggacttttcctcgcaagcaaaccaaaaactattccaacgaaccaacacgtccaatccaggctctccaactttgacgttccagaaaatcgcaagaaatcagaacagttcctgtacctgacctaacagttgctaaccaatctgaatgcatctctctctctcagatttttattttcttcagatctcttttcataatctggaattagcactgtacattccaacgacatcagggctgagaggccacatgcaatgcagggtctcttttgaagaatctgcttccaggtaagcaaatctctgagcagatccttccaccgtcttgtcatctcctcaattatcttatctatattatgctccccctttggactttttcatttgtttacacaccgtatacaacaacagctcacctaagacaggccaagaacatttgtggtattatttgtttatacgtatacacgctagtgcgatgatcacaacaagattgcgattatacctgtactgatacaataatacagcacgtacagatcatagagaaaagaacagataagagacccttttttttttcttgatgaattagtcatatacagggtagggcagagcagagcagacaagaaagacaatcacaaggacagaaatatgtgaagaaactatgatgatgatgcatggttaattggcaagacttaaattaatgtcaaaactctgaccgatcttgaaacagttaaaaagaacagattgatgctctggtgccatttcaacattgtgacaagagaaacctcctgaacagaagcttcagaagaatctcttctctctctgtttttttttcatggcgtctttgcagagcacacaggggaacaagcaaatgcctgacacctaatttcaattctaacttgctaaggcagtaaggctaatcatctcctaaagccccaaatgtttagcttcttgtttgaggcagcagcagaagaagaagaactatgtccaagaattgagaaagccaccaaaaaaaatcctaggagttaatcatcctctccatgatccaacatggcgagcgagcgatcatctgatacggctgcagagccgcgacacgtcggaggggcgtacgggcttgagcaggaagtcctcggcgccctcctccaggcaccggctgatccggttcggcacgttctccgacgacatgatcaccaccgggatctccttgagctgagacgattcctgcagcaagaaccacacacgaaacaaattcagtctcaagaaattgggggttccacattcacatggatcatcgcgataattcgatcgaatcgaatttaaattaccttgacgcgcttgaggagctcgtagccggtcatgccgggcatccagtagtcggtgatgatcatgttgacgttggggacgaggccgaggcagaggagctcgagcgccctcgtcgccgactccaccgtggtcaccctgtacttggagctccggaggatcttggcgatgacggcgcggtccacggagctgtcgtccaccgccagcacgtgcatctcgctctgcgcctcgtcgccggccgccgccgccaccacaaccggcaccaccttcctgtccccgccgccgcctccgcctccgcctgccctcggcgacgtcgccaccaccaccttcgccgccgccggagcctgcgccgctgccgccattgatcaactcaaaatccaacccaataatccaatccaagaatcctcgagcgattgagtaagcgagtaggagaagaagaggagaagaggctttgcggttgcaatgagttggaggcgcagccatcgctggcgtatatatacaggcggggtgatatgcgtgtcgtgtgactcgtaattagaaaaagaagaaaaagaaaaaagaaaaaataaatgggagaaatcctgcgagatctccaaagggatccgaggctcggggatcgagtaaaccccccctcaccctcacagcgggtggggcccacacccacacggctcgatccggggacgggatccgcggggtccacacgccagacaccgccaccccgcgatccgcctgggattttcgggcttggttggtttcgtaccaatttgtagccctaccaaattcatggtaggttcaatagtaacaaatgtatatttagtttgctatcaattttttgacacaatagtttaaactcaatagcatttaatttgatagtgtcaaaacttgtcaagatttgattttagcactaccaaaatttttggtaaggtcaaaattggcttcaaaccaaagaagccgttcctgcccctctctctcccccgtcgctttcgcctcctcctctcctctcctctcctctcctctgcgtgcgcagctgtttttcttttcttttctttttttttttggccttttgatctcctctcttcttcttcgcttttgaatgttcgcttttgaatgctgtggttgctgtgctgctgctcgcggtatcagaaggcgaatccgagagttgtttacgtgccggagatttgcatgcatgggtgccgcgtgcgattcttctctgcttttttttctctctcgattgcacaatccgcttttgattggtcttggatttagctatccggtttggctgatttagttcagttcaaataggattcgtcgatatccaaatccgtatcatcgttgatatgttggttcggaagaagttttgttctgatctcttctgcagtgcgggtttgactgatgatacagatcgcttgtttttaggcgtctctgtttgaaacacggttttttactattaaaaaaaatggagacttaacccgaaaggcaatacggagtgtgaaccagacaatgccaacatctgggagaggattttgtccttcggagattagcattcctgaaaggtcagctggctctttgctgggaaagattaaagaaatatactagtactaatcgcttctcctgatggccatatttgatttgattagtttttagtctgacaaaacctcctggcttctgggttagcaacaccctggacccgatctcctctggatgccacacgatcaaatcaatccatccatgtagtgtatcaatcagtcgtggcgtgcatggcaggatccgcgcgaattcaaagcccggtggttcaatccgttgccatcaccgccgatccgatccgatcgctcgctttcgatatcgatacgtatatcaatcgatcgatcgatatcgcggcacgtacgccgtccgatccgacgacgaccgcgacgccgcccgacgaggggacctgcaattaaccaaaggtgtaaacgtgtcagtccatatttgggtggctgtgttcttagattttttcgcgcatacgtattttaaacagttaaactatataaaaatataataaaaaagttgcttttaaaatattatattaattcagctttaaagaagttttatttaatacttataattaataatgtattagtaagttgcttttaaaaaattataaaaaatcattattaaagtaattttatttaatacttaattaatattatattaatatgttgttctgttttatgtgtcaaagggatggttctcaccggacacaaacgaacacagcctcaatgcctcataatacggattatccatttattagcactgaaataagtgggttcgtaaattgatccgtttacgtcctttaatcgacacccaatccgcatggctgcacgaatgccggccgaccgggcggccggccagctgcatcgacggcgagcagcggaacaggggatccattaactcctctgccgcggaaaccaatggggattcgggtgcgtaaattcgagagatcggtgtggagatttgctagctgctgctgtggtcggatggatggatggatgaatgaatgtcacggtgctgctgctcgatttggtcctataccaaaaggacagatcggataattgtgccagtaggagtagtagtagggtgcatctgcgttttctgcgatactctccgtgctgtgctgggcctgttcatgttcagaagatcaatttacggacgcttgagatcggaagcaatgtcctttgtgatcgtcctccttcaatgtgtccttcccctgtctctgtctcgattccaacatcggatttgacttagacaaaacgtgtatctttttatccggagtactccctccatccataattctgggacgtatttcattttttatgaagatcaaagaaaaatcagctcatcctatatgtaataaaaatcaagaaatatatacatccatgcaaacagtaagtattaagatagccacttaagtttcaatcaaccattaaatttatctttatttaagttttggatacatgatgattacaaatatgactatctcgtttaaagaaaatggaatatacttaaaacttttggataaagagatagtatttaacttgatcaacaacaaaactgacacatagcgacataggtggtgtttgaatctactgaagatgaaaattaagtgtttcatgcaaaacgaggtgttaatagcgtgtgattaattaagttttaattattacaaacttgaaaaatggattaatctgacattttagaacaactttcatatagaaagttttcgcacgaaacacactatttagcaatttaaaaaacgtgccactttaatacaaaatttaatccatccttttcattacattagaacagggcctataatagtatttctactacccgtaataacttcttacagaattaaagccccccaaaaaaattaacattttgtttagattctcggcttctctgtattctcacctgttggattcacaataactgtagaatataaagtttcctaaaggttgatatatatgtgtgtcagttttacaggttatgaatacatcctatacttatatttctaactaccaggaataccacatatctgatattatacaaaaggtatattcaaatatgaaaatatactatttaagaatggaaactccttcaagagtaaagtccatcaccggtccctaaacttgtaccgttgtgtcatcccggtccctaaactcgcaaatcgactgtttagatcctcaaacttattcgactgtgtcatcccagtacctaaacttgcatattactcgtttaatttctctaacttgtttagtgagaatagaagatgtcagaccccgatctgaataaggtaaggtcttttctgccaagttctatttgaacatgaagttatttacccgcataaatgcatagtttataaaaaaagttatttacccatataaatgcatagtagtagagaataagcaagttgtgcctacttttagagattttctgactccgcccatgcctattaattgcgatgtgttatatgtacacttgactccattgaccagttgctagaagatctccattgatattctacacgacaaaagtttcaggaaattattagccccgtatcgtggtcccatcagctggggcacatgctccctccctctctcctttttggataatattttcttcacgacagaaaagttcatggcttgatgccattgccgccgattcggcacgtcaggagctgcgaattccgtgtgcttttgcaggaaggccgtatctgtgcgcttgcttgcgtcaaccacgtatccgagcggattctcagcgtcgaaacttctcacctgtcgcgttgaaaagttttggttgaaaccttctcctcctccaactaccttgtgtgtctggatgtaaacctgcattgacctgtgaccccagcagcacacactggtcccctttttcatttctctttcgtttccatcttctcaggtggcctacgcttagtcaaacgttaacggagaattggaattaagggaaaaacaagaaacggtctattgccgatatggccggcagtggtatatatctgactatcttgatcacatgggagctgtatgatcatgctagtatcgttttcatttcgggcctctagaatttccgttcactccatggcctgataggaacagtgaagcaagaaaaaaaaagaagaagaaaaacagcgggcaggctgtggtcggctgctgcacctgcttgccgaagaggtctaatttaaatgggaatgtgacaccacataaggtaacgaataatattacacattaaatgaaacacgtgttatacgattgagtaatttgaaaattttagtttttttatacgatgatcattggtcatggaacggagagggagatagtactaatttcctaggacttcatactttatggtcaatttcactcgtaagcattaaccgacttgtgtaaaagttacagagagtaacatggacatgatttgttaaccatcaaatcatcgattggattatacagatattgctcataatctgaaacgcatcgtgcaaaaagaagagggagttggcaacgtacggtgcacgcagtttacaaaataaaacgacggattgagatatgggaggagaagctccaaatcggttttgcttgatcgtgttggatctgtgcacgccatcgatcagtcggtttggcatgtgacggatacggagaatctgggtgggggtgtatgtacagttcagaatcctcggcaggtcaggaattacaatcgtacgggcaatcgcatctgtctagcctttgcccttctttctcacttgcatttttcttttaaaaaaaagttggtacgaacaatcgcatcattcattccttctcactcgtacgtatgtttttttaacgtaatatttacaaaactaaatgtcctttatcgatctatcagaaaatcataaatttaagaacgtgtatgataaagtacagatttaacatcatatatttttttttataaaactacatatttaagaatgtatatactatagttttaactatttttttaataaaattgtagatttaacgtattgtataaaaacaacagatttaacatcggttttattgataaaggaacatattagaagggttcttaaataacttgttgaatgggtgaggctccgaactcagtttatctagcccaccacctcgtggagctagtcagaagaacctgggaatttcttactgtttttgtctctaggttctacatcatgggaagcatcgtcgcagcttgtgtcgatttggatgtcagtcattcccttgttctggtacgcagatctggtacagctaggctgcagctttgagtatcttgcctcgaaggggaagggaaaggagaagagcagctcgctcgctttctctgaaactgtgatactcctagataacgcaagcagaggcttttctctgaaagtgtgatactcctatagagaacgcaagcagaggcaggcgtgatctgcatgcaaacaatcacgccagccatgcccacgcattcctcttcttttttgtgaatttggatatgcttcccgagaatcacaagagtagtcggcgtcaggaggacacggtggacaggagtagtactcctactccgggatatgttcactgcggcaacctgcagctcaagttgcgagtagtagatgtggatggaccacccgggagagtggtagtaggagtagatgaggagatcgcggcaacatgctctcgtgccggagaatcgcatcgcatcgtatcgaatccttgccgctgctgctgctgctttcggagatagagatagagaagggctcgtttgcccaagtcatcagaacccaagtgggggcgtccggtacgagaaggggagatatcgtcagagaatcggttgtgctgctccacattgggaacagcatttacaaatcatccgtatccataaaaaagctcactactgctcctagtaggagtatttactattggtaccgtgatcggtgtacgttcttcagtcagaaacaacggcatctctctcaactctgatgatcgccgtagtagcactgacgatggacaacgccgacgccggcaaaatccaacgatatcaacccgaaaatcaaccgcatccgagataagttagaccactcaagcttggccgacgggaagcatattgcgaaattgttgtcattagaagttgaaaggtcttatgtgtaaacttatttaccgtcagaattgtacagttcttttccttttctttaagccttcggctgggtggcttgacccctatatcaatataacaccaaaccaatctgtttaggtgtttgaaaaaatcatccaagaagatggcaagcaagaaacggcggtggtggcaccggcgcgccatctgctcgatgccggtcgcgcgcctcgaaactgcgcgcgaggcggtcaaaattactcgccacttgcgtttgctactcatggccggatggtcggcatggctcacgtggctgattatccttttgctgctttgcggaatgcggatttgcttatcgccggagattgatgagactgcatcggtttcggtggcagatccctcgccctagagccgtacgcactgcacggcccagaccaccgatcaagatagtactccctccgttccaaaataaatacaaccatagttttccgtgtccaactttaaccattcgttttatttaaaattcttttgaaaaaaattaaaaaaataagtcatgagtaaagtactattcatattttatcatctcataacaacaaaaatactaattataaaaaaaattaaataagacggacgatcaaagttgagcgcggaaaatcatggctgcaattagtaaatctcattgtcatcctggcctgtcgaatcttgatcggttggtgagaaaaaaaaagagatctagagcaattacaagagtaggctataagttagttgtaaacacatatgacacatatatagagaagagaagagaagaaagagaaagaaagcggactacaaatttgtactcttgtcaactgcagcacgaactctaatacgttgtgtgtgtataaaaggtgcagtgggactatatattaatagtttatagataaatattgtatgaatgagctattaaattgactatagatgatttgaagctagtagttggctatactattaaacttggtcttaaaaggagatagtccctctaaacatttattaaaaataaattattcgtgtattgatgattgaacacaagatttcgagattgaggggttgtttggttcaatacttcaacttgccacaccacattttaggctgccacacctccttagccttgtgtttggttcattgccatagttatggcaagccacactttcttaccatcttacctcatatgtcatagacttaattctttgcctaactttgccacaagtgtggcttataatttgtaggccacaaaagtgtggcttgcataacattgtctaaagtgagttatggtaacgttagttaagaaccaaacagcccttgaaaccacatattctctccgtccctaaatataaggtattttggtaggatgtgacacatgatgtgacacataacacattctagtatgttcatattcgttatattaggatgtgtcacatcctatcaaaataccttataattagggacgaaggagtatcttttatcactgccctgtctagtgcatctagatcggtcggtgagacgactgtatgcacgactccttccttccattcttcatctcttgctttcaccttgtcaaatctcaaatataccaatgaacatgcgtgcagcctgtacatacacagtatgtgggttgttgtctgcaaatcctcaactgttccggcgaggcagtttcgctgtgttgagttgagtgactcgaaagtcaacatgaggggagctaatctgcatgtcacaatattctcgagcagatcataggatcgaagagaatcgccacgtcagtgaattttgttgtttactagtgcagctaaatgggatccgtatcaggacgagccaatgatgcaatttccaattccgtagtcgatgtcaacgaggtttgattaaggggagtagtatttgctaactagtactagtatatagtagtattagtcacgcaacatagttgaattcttttaattttgggcggtcaaagtaatatggtttttaaactctgaagatgatgtgcttgcgtctggtgatcttgttactagtttaatgaagccatcggcattgtcaaataccgaagtagtcagctcagaattaagaaatgccgagacattctgttcatggtgagctactattcggaagacccgggcttcagtgtctgggttcagaaaccctccggagctggagagatttcatgagatattcaatgggattttgacagcaacatttgctcaaaagaatagcgaagcaatcttgacggttccagtttgaaatccatattgcattttttgtggtttggtcgtgtcaagcgcatctgctggaaaaatctgaaatgtagcaagtagactagacattagagcatctccaacagtctctccaaatctgactctccaaatgtctatttggccaactctccatctaatttatcaagtcaaactcgttgtttactccaacagcctccccattcaccctctctattctaagtctattacagtgggacccacgcgtcagtgtctcaacctttccttcttctcatctttctccccctttccccaagctctgctggtctgcccccatccgctgccgccatctaccgccgccgccacctaccgtcgccaccatctaccgtcgccgccgccactcgggctccatctccatccactgccgcggtaccgccattcgccgctgccgctcgggttttgctcccatcactcgccgggcgctcgggctccgccccctccatcaccgccgtcgctcgggctctgtccccatccactgccgccatccgccactcgggctccgctcccatccgtcgccgccattcgcggccgccgctcgggctccgtgcccatccgtcgccgctcgacggcgagggacgacgaagactacggtgacgacgacggcgagaggggagaagccagcgccatcaagccgtcgccggcagtagctagttgcgccgattgcaagtagtaggaggtgagagagaagcatcttcaacgtggggcccacaaatagcaaggcatttgggctggccaaatttggccattgaggggaggagtttggccagtcatttggcttagccattctagtagagaggctgttggagtaggatttttttgctaaaatggctaaattttaacttggagagcctattggagagtttgttggagatgctcttagtagttttatactgatttcgctatcaatattattccagcaatcttctaaaaataaataaaaggaaaataaaggtttaaattgaaggcttcaattgactagctcctcccacaaatgtcagtcatatatttacagcctgtcaaggcccattcaactttggaaaaatcaaacatatttcaagtcaattatttttccactatggtgtaaagaaaacagtaaataagcccctacttccagataaacttgagcatgtgttgacaaattgaacactcaccgtttgactccaccacaatagttttgaatcccatgacaattttttttgcaggaaagcatttttttcctcattgggccgggacaacaacttcgaaggcccaaacaagtgctgtgcaattacccagtgggccagaatcaaggcccgaatttctgcatatgtgggctattcagacctgtgcactaattcaaccgtttggttttactcagactagacatagatattagcccataattatgccacttttgggctttaggcccactaatttttgtctaattatagaaggcccaactgcattaatgccaacctaataaacagatacactatattgtgtcctctgaaatctgaaccccagggaatttcggtaccatctctggaaataagctatagaaatattttgaattatatactttaatggcgatatgagctaatgagcagcataaagttataatatacgcgtactaaaatagatggcgaatcaagtcgttcaaaaccaccagaattattgcgatcgagaacaagtgcaatcgagagaatctgatctttgctttcgagtcaacatgaatacggatcccccccacgctttgtgggctgatttctgacgaaatttctcaaaagaggaacacactgcttgatgggaataacaatcgctacaggcctacagcgcaggcgaacacatattcttcccccaattaagtgatgatctggcagtttcctcgtttgagccctgggagttattccgcaagactgtaaggctgatggcatcatcaccacctgcttacgaaaaccatttacttgggatgctaaaacttggagtcactaattatgcatgtaaatatttgtcaagtttagctaaagatttacaaatagatttaaataaatatatttctccttatgtgtttaattaagttattaattaattctgtgcctttttttgtattttttatttgctctttgtttagtgaacattgggcctgttcggctacactcatgcggcggtggtgcaactggccggaacaatgcttgtataagcagtttgtggcaacaataatgttgcagcagagccgaacaggcccattggctgcaataagtggttgcaatttatttgaacaaagatcaggatttgtttctttatagaaaaaggataaaactatatactcgcagctgaaagctctagcctggagagctcctttaaaatataggaattttgtttgataagttatgttctatattttctatgcaatttattgcattacaaacacggtgatcatcctaaagagctaaaattaccacattaattacatatatttttaaagatattagatcatgcaggatctaatgtttttttaagataatgtagattggtagttaggggtgggcagaaaaagaccgaaccgaaaagaccgagaccgagaccgagaaattcggtcctaggtagtgaaagaccgaattttattcggtcaattcagttagtctcctcgggtaaccgaatagaccgaattatcaaaaaatgtctaaatgcaacctacaatccactatgtttaataggattaaaatctaattttcacgtccctacttcttctaggcatgcaacctaataagaatctttactcataagtgcttacgattttttttttatgatttttgtgttgaaaatttccattatttctttgtatatatgaaaatattgttgaatttcggttaggaccgagaccgagaccgaatttgtctgtactaacatttttgcgctgaaattcggtcttcacttttcaaaaaccgaaaagacagaaagaccgaagaccgagaccgaaattttcggttagaccgaatgcccacccctattggtagcaatagttgtatgcaaagtacaattgtactacctccgtcccaaaatataatatttttttgctatgaatttggacacacagttattcagattaatagctaaaaatgcttatgggacatagggagtatatgatttcaatttaactagcccacgcaaaatcgtgcatggaagttccctagtttgaattaaattcctctgttataaaggaccatgatcatctctgacggcaagaattttttttgaattcaaaatatgtggctatttatatttatttcagatcccagagcaatgtactaccacaatgttagaggggggggggggggggggggaaaggagaaaaggacagctagggtggcatacatctccaatgatcacgggggtgaagtgaagtgagagtagcagctcacatctcggggagctggccaatgggaaggccggtatagcgggatgcatgtggtggaggcatggcctcgtttgcgtggagcttactttaggattaggattagcactagcttaggagtagctgctagtatgagtcaaccttaaactcgaaatgattaacgggtgatgataaagccgctccctaatgatgctgccccgcaactgtccagcaactatctggatctctcgctttttctctgcccctctccattactctatttcctcttcctcttggcactttggccttctttaatttattcagggtctaagatatttttgatgtgttttattttctacgactttaaatgtgagtagttgtcctagctcttaacacctttttaaaatgtaattctcctgggaacttctagttatttttcatctttttatcgtctctttgcttttaaccaaataaattgtactttccgttttaaaggatagcaatttctaacgactaaaatctaggaagtgctacagatcataatgtatctcatttaatttcttcaaatacttccctatttcaaccaatcataactatgttctatttaattttacactcatcactaattcttataaaaaataattataaaaatacttatattaattctaggatggatggagtatctctctttcccgacccatttttctgaattgtatcataaatgaaggatacaatcccatctaagttgattttaaattaattcttatgtgccaatgtaaacaaacttatgtttttaattaatcagaggcaacaaattttattttcggtgttagttaatggggttgcttttgtgcaacgtactgctagagctagagtgttaatgcctcctctcacgtcatgcgcggtggcaataatggatggatttggtggagtcgcgtctctttctcttttgtattcctacaacgtcttctgtacttaattctttccttgcgaatatactacgtatgaagcacatttttgggtgcaccagaaaacacctaagttatagcatgtccctgacctgccaatttggtaaacaaaatgtgcaaatagatttggaaatttccaagaaagtaaatgatgattaaatatggtttcaatcatcacccacaaaatttcaaaccagcaaacgacttggtaaccccaataaagtttcatttttcaactaggagtggctcattgatatctaagggctcctttgatttgaaggaaaaatatagtaattttggaggatttcaatactatagaaaaaaattcctatgaatgcctttgaatcaaaggattgaatcctattcgatccttcggaattcctatggaatggacaatattatagagattttggaggaaacttagcaagagctcaaagctctttgaaaatttcctttgaatctctctctcatatccgattcctacgtttttcctacggtttaatcaaatgatcattcctgtgtttttattgtattgtacaattttctattttatacttccattcatgttaaaatcatgtggttttttttattcttacgatgcgcccttaaaacccaccctatatatatttctcgtatcaatattagatttctcctctcgaactctaaattgccatgagatttatgactaattattttttcagtgacagacgacgcaccgaccgacatagagacatccttgatgaccttattaatatatacatataaagatatgttagttcaggctttcgtatatgctctagaaaagtttcacaagtttttagtttcaaatagacctatattatataactagtaactaagtaggccttccaactttcaagatgcgtaccatttgcaaagcgaattttatagcaagagcggtggtcctgtccgtccgttgggggatcacgtagttggcagctcaaaccagttcatcataatatactagtataataattatataaatatgccaaatatttaatactccctccgtcccaaaataagtgtagttttagcacggttcatatctaacgtttgaccgttcgtcttatttaaaaaaattgtaattaatatttttattgctattacatgataaaacatgagtagtactttatgtgtggctattttttaaaatttttttaaaatttttttaaataagacgtatggtcagaacgctaaatacggatatttatggctgtatttattttagaatggaggtagtaggttaatgttgttgctttaggggtaaccaagatgcatgcatgtcttttgccccgtaatcacctagcagcttgctgaaagtttaaggactgctccgtcgtgtcgtgctggccttcatgtagccactcatggagctttcatataatttatttatttagaggagacatataaaaaatgcattttctctccaaatccagcttgggacattctgaactttgacaatatatattatacactctcctggccgtacttatcctgggcaggctctaaccattggctgagactctgagattagaactcttaatctacttaattaattaaatgggatgcatgtgattgagaaaaaggtaattaagtaaatggtacatcaccatcactgtgtggacataagcactaaaagctgacgctaatggtagttaattatcgttccgtttgcaatgatcaagtctactagcatgcgactgcaacgtctcgtcttgttttgctctcttgtgttttgtctgcttgctgttcctgccatacaccgtattctactgtcacttggtacgtacgggtagttattttttaatgaactgtaactgttgttttagggagttgttagggaaaactgtgattattaagccaccggaagaaattaaagatgctaccactagcccctttacaaaggtgagataagctagactactggagggtagcttggggcccgtttggtagtgtaaatattttgggttgtggcctatgaacagaaagaactcgactggtgaacgaaaaataattttattttacagtaagacttttgtacttatatttaaaaaccaaagttaaatgatacaaataacaaaaaaaattattttcaaagttaaattccaaaatttaaaatttgttacggaagtactccatccgtccaaaaaaaaacaatatagatagggatatgtctacctaagacaataaatctggacaaaagattgacaagattcattgttctaggtggagttacatccccacccacacctaggttgttttttaagaacggagggagtacagcttaggtcgggttattttagctcatagcctatcaaccggttatttaatgtgtctatgctttgaaaagtgtgctttctcaaaaaaagaaatctataaccatatgtattgcttagataactttctgaactactccatccatctacttttgatagtcatatttccaaatctaaaaattttatttttgataagcatatttcacttcaacaacctatcgtcttgatgagtttctcggatttaatgcatgactcttcattcttccacacatgattggctacatgggcattgagaaacgtaaatatcaatgaatcgcttgtttacgaggaataactagtagcatgtttatatggatgataagtagaattacttattcttagtctgtgtgccaagatgaaatatgactatcaaaagtagatggagggagtattataaactttatgatgtataattatgtctatatatattcatgcatgagctttcgtgggtatttaggggatgtttagatccaggggtgtatagttttggtgtgtcacatcggttattatacaaagtatcgcatgtggtgttcgagcgctaataaaaaaactaattacagaatccgttaataaaccgcgagacgaatatattaagcctaattaattcatcattagcaaatgtttattgtagcaccacattatcaaatcatggagcaattaggcttaaaagatttctctcgcaaattagtcgtaatttgtataatttgttattttttaaactatatttaatactttatttaggtgttcaaatgttcgatatgatagggtataaaattttagaatgggctctaaacacccccttaagctaaaaacaacattgtctaaaggtggtttccgcagccaaccgaagccacatacgatgaacactgtgaaccacacaagggaaagtattcctcttgtccggccggtatatatatatgtacacatatatgcctttttataactttctagcacagcgatgtgcataccacagaaaggagaaagtactttgagtgacgtatgtggtgccgagtgccctgaccgtctcccagttgatggatcgatctgcacaattgcttatggatatcggtttcatccatccaattccaaacccaggcggaattcaactgaaaacggcggccacccttagtttctctgatgacgcagtagtgaaattacatcacagtttcgagatatcagtcacacacaccctgcaggttttacatattgatcaggattattagtatgaaaaaactacgaagtggcttaggctttaagacatggttagataaattattagctaattaagtcatgtcataatcatgctattgtcatatgcagttactagtactaattaatttccctacactactagatgaaatttgttagtcgctgtcaaaatggaagctgtgtctgctgctgctaagctgagtggaaatttggaggaaaagaaaggaaaaatccagcaggagggtgacaccgcggcgtacgggtagctgtcctgggggtgctggctgccagttgcgtcaacggcagatgcgatcaatgtcgatgcagagatgcaagttgcagcatgttggcgtgtcatgccgaaagaagaaacgggcccgcgtttaattagccaaattgtcacaatgcacccggcttcttcgccgtactatagtgacctcaaacgcatacaagaacaagttccatttcccatcttgctctctccaagttaatagtagtagccttctgtgtagtcaaaatttaaaatctgaaactttgattttaggattttttttttcttatcatagtctatttatcaaccataatttgttagccgctaattatacatgtataagttaatgttttacatatgaattattttcagttgcttcgtttatttatctttacacggctgaggcttatcacccgtagctcaaccaattagtgccgttaaaatttcgcaacaggatgtgaaattatattatttttttaaaaaaaaagattataagataaaggtaagattgtacagtcacactagcttgcctagtgttgagacatttgttagggccttagggcatgtttgcttcgtgccctgaaaaatttgtctaactcaggcacaactctcaggcgtccgattttgtgcgcccgcgactggatcgacctgcctgagcgagagcccccggaccagggcagcaaccaaataagcccttaccccttgcaagtgcttctttgcaacaatatggaatgtgtagcgagcagtgagaggaattttgcattggtacatccctggttcatttgggttgttaagacaacaacaatgaaatttagagttggtcccattttccatactgctccaagttagattggactactgactatactgtactagtagtctttcattgtctgcttgttgacttataagccacaactaattttagaattgattttgggacttttcaccatggtctattttcagccttaacttttaaatcactagttatgcgatataaaagtgttacccatgaacatttttcggttgcttcagttatttttctattgcttattagttgtagctcaagcgatcggggccatgagtaaaaatacttaatagcaggatatgaaatcaaactattattttttaaaaaggagagaaaagataaaggaaaaattatgcaatcacattaccctagtgttgagacatttgttatggacttgcaccttgcaaaagtgtttctatgtaacaatatggaatgtgtactgagtagtgagaggaattttgttttggtaaatcccttgttcactaacaacccaaatttgtaaatgtcattattattcataatactacttgccacgcgctactgaaattttataaagttaggatcatactactaaaattttgtaaaattagaaccatatcactgatatggttctaattttatgctatttttactaccatggtattttaatatttatgtaaccgatgcaccctaaaataatggttattttcatcagaaaccaattaaagataccattgcaatcacccgaaaatatgcatagaatccaggcgagaaaaaagaataacacaaaggttgagaaaagattggatgctccactttggtggattgtgggatgtgggatttcagatttggtccttttccacaaggtttgggacacgcagcagtaggccagatacgaggcactcttcttcttgtctcagcttctccttgatttcttttcccctctttttttttcttttctttctttggtccgttcaaaagtacagtggtgggccccggcgtgcctgtggtgttccccacaggggaattttgtgtcgccctcactgcttgtctttcttttgctttgccccacaaactttctcattgtttttctttttttcttttctatttttctatttttttgcttcatgagtacgctagctacatggcatggcatcctctcgtcatcaatacggccatacaagcaagccctcctggctcgtgatgatcacggccacgcgtacacagagtagtaaatttgttgcttaggtggtgtttggatcgacttaactttagtccctctatttagacactaatttagagtattaaatatagactacttacaaaactaattacataaatgaaagctaattcgcgtgataaattttttaagcctaattaatccataattagagaatgtttactgtagcatcacataggctaatcatggattaattaggctcaatagattcgtctcgcgaattagtcaaagattataaatgggttttattaatagtctacgtttaatatttataattaattttcaaacatccgatgtgatagggacttaaaagttttagtcccatctaaacagggtcttaattaacttgtgcattgttaaaacaatttgggatgcatatcgcgtacgataataatgagatgagaacaacaggaactatcagtcaatcgcaaggttttttcctggttgaccaaggcaaaaattaagactttgtattctatcgcggtcaatgggttttttgtttaagatgattccaaaacgtgtcgggctagggtggtgagaggtgtgtggatatatacaaacgacatgcgaaaattccacttgcaccggtgcaaccaaaatgcagctacatggaatcaatctttggtagaaaaaaattaaaaaaaaaacatgcccaaagtaataaaaagcacacataaattaagcacctaattgaccattactatcctataggtaggctaaaaacaaatctatgtccaatcattacatgacaagtaataatgtatgacaaacataaaagatactcctacaaacaaccacaaacacgctagcatgctttataacgaagatgtttgtataatgaccacaccaacaaagactgcacagataaaatagttctcccatactaggttagttgaccaagaacgttactaagcaacatatataatataaatactgaaattcaacatcatatttcgacgatatctaccatccaaatcggtactatcctagtaagcaacaacgacaaacccagttcgtgtctacccatcattcgaatacgttcatctgtatcgggtgggttcatcactacctttttccctaagatacatgataaagctagttctggatgaaggagctttttccaaaaagcaccacgcaggaaaggcgttcttcaggagatggaaaatggatattgccgtggaaagaattcacgagaagcaggactttgcccggttgggttggaagttggccaggagactcaacgagaacaccggcggcatccaaccaaggcctggtttagttcccaacttttttttcaaacttctaattttttcatcacatcaaaacttttctacacatataaactttcaactttttcgtcatatcgttccaattttaatcaaacttttaattttagcgtgaactaaacacacccaatcggtgcgtggaattttgtggtgtgtccatgcagcatttgctcgatcttggtgggcaggaggtttccctgtgacctgtgagagtccgtgccgccgcggctggccaatcaggtggcgaaacgttgcgcgtctcgattgggcgccgtgatgccttcaccgaaagcaaagagcgtcgcacgtgcgcctgccccatgctagctatagcaaagcctatgtaggccatgtttggatagctcttgttagctgtagcttatgtcaaaaatctcttactactgtcagaagttttctcaaactgttttaattatcatatatattctgagaatgtataattatacaatcagaaaataactagaagcttgagttcctagatttttcggattctcacaagatggtttctgattagctgcttttaaaaatattaagctccctaaggatagtaggacactggctattgctatccattgaagcccatccgcttcgtagcctagtttttactgcatggattggaatccttgtgggctcgcttcctcacgggatgttctaaccagatgggtgtactccttccatactcataaaggaagtcgtttaggataatgtttaagtcaaaccttgggaatataaatcatgaataactcttaaattattgagtttgaaaatgtaaaaattatatgaatagatttgtcttgaaaaatactttcataaaagtatacatatatcacttttcaataaatatttttatagaaacaagaagtcaaagttgtgtattggagaccgtgtcaatgtactaaacgacttcctttgtgagtatggagggagtatgtatagtttgtaggcaaattttgctacaggacatcgcgacttcgtggttttagctgtaggacactgcacgaagtcacttttggggaaagacactctcaaaatatggttatttgccaggggacactgcaaccaataaaatattaatttctggttcaataggagagctaaacagtgtaaaaggtcaaaaatgccctcgggcccacttgtcatattcttcccccaccccaaacctcctccttgcctcctctacctccaccggcgatgacgtcctcaccccacccacccccacccacagccacgagcaacgagctcgacgctaggatgggcggccaactcggcgcagggggaggcggcgcccgccgacggctcccacggcggcggcctcaccggagctccgccacgaatcgaactcgcaggttgagatgaagaagcggaagaggcgcggcggtggcgcctccgccgccttcgaccggagcgtcttccccattctgctcgccgccatcgccccggacagcggtaacccgcgacccc

SEQ ID NO: 5422 - DNA, 51815 bp, Oryza sativa
aacccaaaagactagtctgatgggtgaggaccgcccccaccttttaagtcgtgctcccccaccatcaattaccgatgtgggactaaacccaacaatctcccccgtcacacatcgggcccaataatctcccccgtcacatcaacccatgtgaccccgaagacttcttacctggcctctccaccatgtgacccatggaaattattccgggtttcaaaccttgggctctgataccacatgttataaaatttagtcgatatagcggaacgacgactaaccttcccgatcgcttcagtcgttgatcacccaagacatgccagatgacgacacaggaacacacgatatttgttaacgaggttcagccgaagcctacatccccggggctctgattatggacgctcctccccaaccaacatagcacctagccgctacgagtccatggccacgccgccatcctctcactgcgtgtctacgctacattgtagtcgtcatggttacatcgtggtgcccccctctctatttaagatagttgccgggttacagagtccgactctaactccacccctaacacctattacaactccaagtccaactataaccaaataggactagtatattcgacacctattctaacagagctggcgtggtcaaggtggggcgagcgcgtcagagcggcgacgtcatcggcgtgcctgcctccgcgtctccccgagctagaggacaaggtagaggcaaggaggaaaaaggaaaagcgcgaggcgaaaaagcgaggcctccctctgcttgactgcttctggtggcgcgactggcaaggcggactgaccggcgtcgacgccttggacactagcggcggggccatggtgagacgccggctgtgacggtaaaggcaggcatggtagcttggcgcctggcggcgagcggaggcaaggcggcggccagagcggtgactcgcacgcgagggcgggaaacggcgaggttgcatggctggccgcgctggcgagcgagcgaggttgcctactctcctgcatgtgcgcggcagcacgtgatgagcagccgtggcgagtcgggctcgggcagaccggagcttcggcacgcgagcgtaagggagagggatctgctgggctgtcctgcttagataaagaagggagaaagcggcctgattggagaaataggcatgagagggatttatttggatgaagtttgagggtgatttgatttggatttgaaattggacgttacggagatttgattcaagtttgatatttgaatgtagggactactcaaggaagggaaacacggtgggactcaaatattttggagttgtaagattacttgaaacgaggattggatttgaatagttgaaaggatttactgatagacttaaggagggaggttcaaacaagcaaatttaaactccgagtctatttcgaaacggtaattttgaggagtcaattttggttttgaaggaaaggagataaatagagcactcagaatacgagattttcacggataggtatttcatcagttttgaacgccacgtaaaaaacggggcattacactagctataatctcaaaagaattgtaatttagtaacgtttggtttggctttaaatccactattcacaggatgagaatccagagctgaagctttgtcgtaaaggacagtaatcgtgccctctggtaggcagtgcacctatttgctcgaaaacttccgtaagtttttttttttccttcaaaactattagatttttaaccattggattacctcgagatttgcgcatgaaagaattttttttctagaaataattttttacacatatcacgcgtaagaacatgatgctaactaatcaaaccatacttgaatacaagttttatataagttactatatcgtagttaccatgtaattacagtacagttacaatgtaattgtgtctcaattatatactactattgttatatgtgaaagtttttcattaaaagaattgagacatttttttagatactcccgtaccaaagttactaccactatataaggaaacatgcaatttatcaaaattgtagtaaaaactttatattagactgaaatcgtcttatatccgtgtgcatgggccataactttactcagtttaaactagtttagcggccgtccatgaaatgggcctggatttagcctatataaaataggccgtacatgggccgataattggatctgaacgatactctgaatattaaattctcgcggagatgcgtcccgcccgcccgtgacgcgtacagccgtacacccattcctccacgctgtttgctccccgcgcgccacgaagtagagtactccatctcccaacgattaatgccaagtcaacaagcaacaattctttttgtcgaacaccagcaagcaacaaatcatccagtcagcccgaacacagataatgcagccgtcgcaacgatcccgccggccaccgaggttgagccgccgcaatgccatccggcagtcggcgtacgtggcccggccggcgtcacagctctcgccgccgtcggagtcggaccaacccgccttctggtattcgacggaggaatccgttctggaggaaagggttgtggaagatgaggtcggagatcatgcagaggcaggtggagccgaggcggccgcattggtggtggaggaggcgtcgacttcgagctcgtctgcggtctctgtccacgcggctatggtgatcaggaggagcatcttgaattggagtaagctggatcttatcggggccggatcgtccggcagggtgtacaaagcggtggctgagtaagtccgcttgcgatttaccgtttgccttgctcatgaactgttcgatgcaatgcttcattgtacttcgtgtctggttgtgtgttctattctttcagcagaccggcaatttcggatgagttatctctgtatttctcaatgcttcttcgtattattgccttgtcagggatgggtttgtatttgctgtcaaagaggcttcgttgattggtcccgaaagctatacgaagcaaaccgcatgtcagctaaagcaggtagttttatctcttatcaattaattaggtgaaaaattatcttgtaagtgtttaattaagcaaattgcaatttttgtcaggggtaaaatttcagagtattgatgttctccaattctaaatgattccaagtataagctaattcagtattagtaacaacatttcaggaaatcttgcttcttagtcggttggagcacaagaacatagtgcagtattttggtgccaaaatggtatgccagttctcatatgctagttgaacaagtgtcttcattatgttgctgatcgcctctgcaaactgttgcctcccaaacaccttcattttaggttatttttcttcggtttgagcttactatccctgtttggatttgcttgcagggagaaaccgtgctatgtattttccttgaatttgtgagtgaaggttctttggtatctgtatatgagaagcaacagctggaggaatcaactatatcatctttatacaagacagatcctcaatggattggcttatctgcatcatcataatgtaatgcataggtgataacacattatctccacaaaaaaattcttgctgctggcccggtcatttgaaaatgtacttgttatagtagtgatcaagttaagtacagatgtacaactctcgatcaaatgactaaatgagtgaagtacttctttgtcatattatggtaaatctgcactgtccttcccttttcaatgcagagatattaagtgtgcaaatattttggttgataaaaatggagcagtgaaggttggagattttggactggcaaaggaggttacttcatttttggtttcagtgtccttttttcccctggtttgactgacagattatgaaatgattttgtttgatattgacgatgtgaattctcaacccttttaattgatgtaatgccagataaaagtctggaagcagaaaagatcttgtaccggaagtgtatattggatggctccagaggtaattgtttgacttagtatttatacatagagttttgctcccatccagcaggtaccatcgggactgtccggtaccaaatctcagccatttaatcagcgaaatcggacggtggaaaataagtggtacctccaggtacaaatttgcccatgaggaggtgctaaaaaatttcgagtggtggaagggtaaatttgttttttcgcgtaggagtgtccagggaggcagtggcgagttgcttcgtgcttcgtcggcggcggcgagttgcttcgtcggtgacgacttgcttcgtgggaggaggcggcgtggcggcggctgatccgtttgaggctgcggcgtctgatccgtttgaggcggaggtggcggcgacggcggtggcggcaggtggttcgttgcggcgaggttgtgttgggcgcagtggtggcgggcgcggcagtggcctggtgctgctggtggcgggcgcggcggtggcctggtggtggccacggtcacgaggtagcggcggcggctggtgtgtgggcagccttggctgcgaggtggcgacgggcgcgatggtgccggccgtggtgatgaggtggtcgtcggagccggtgttgtggcggctgcagcgacgagatggtcatggagtcgtcttagcaggcgatgtggcagtgtatacatcgatttcttttcatccgatctaaatcattaggttcggttggttgcagcagtagatactttcattttctgggctgcatatactcttcttcttcattgcttataggatttgtattgtacgatttattggatgttttgatgagctcaaccattacttgttctttgtgaatgttcaaatggccaataccctcccatatcatttactgattactgcaattcgagtaagggcgtgaatgaagccgctggtgaaggagctcgctggttccgccgccgcggatggcagatgcggggcgagcaagcgagcgcacaggcgggggcatggatgcggggtgagcatgcgcgcggctcaggtgggcttcgcacgggtggggctgcgctcggagggaggaaaaaaaaggagattagatgagaaagcagcgccacacggagggaggaaacagagaaagagcgaaaaagagaaagcgagggtgcgactcctttctctgtttcccgatcgtacccttctaacatggacggatggatttatctctgtacctgccggtaccagtacctgccggtacaagttgctggatgggagcaaccctcttagacatattagtatgaagtatctagataaacgttactctgaagaatttattgcacttttactttacgatagtcgtccaactttccggaccagcagaatctatattggttatctgaatatctgatgatgatcaggttgttcgtggcaatccgtatgggtattctgctgatatttggagccttggatgcactgtcttggagatgcttacccaaagaattccttatcctgatgataactgggtcagtaaatcctacagtactcatttagacttcttacagtctcttcaaattcgatactgattcagttctatcaggtatcagtcttctaccaaattggccgtggtcaacttcctccagttccaggctccatatcaccggtgtcacgcgatttcatccacaaatgcttgcaggtgaatcctgatgatcggccttctgcagatgaactgctgaatcatcccttcgtggctgttccagaaccagactagtatgctgcatgtttgcttaacattgctaggcgaagaacattcagtagctccttgtttccttcctgtaagttcagggtcagaaagtcagaatgcttgtggttggaaattcatagtcctatggctaatttcacgagtacttgtttgtacgacatctgttccttataaaaatatcccactatccaactttgcgactttgaccattagttgggagagcaatcaaccaatcatgtattttatggttgagacttacgacgacttgctactccgcgtctgcatgtctgagtctgaagtctgaaccgacggcgctgacgttcccggtgacgaaaccaaacagccacacactctgaatcttacaagcaaagccaattccgcaattcccacgacttggtactcggagatagcggttggtcgtaacgggagcagttagccagttaccgatgacgtcgtctcgatcgacgctcgggtcgctctcggggtacggggagggtagtcggctccacgccgttataaaaggccctcatccgcaacgcgggtctctttccggcgtcgccttgtcactcgctcgccaccacccctcggcgccacggcgagcagcgcaccgggtccaggtcaaaagcgcacgcacccacatcgcacggccgcgtcgccgtcgtcgcgcgtgagccccccgtgcctagtcaaaccccaccacgagcagaatcccccaatcttctcgcgatccgctcgctctgctgctgcgccgcgggagcgcgggggaggaggaggaggaagagggaggggcactggccatggcggcgcgccagcggccgcaggcgcagctcgcgcggatcaacgccatgaggcactcctacaccgccgcgggggacgatggctccggggacgacgtgtgtggggagctcgacgacggcgggggcgagtacgcgtcgcagaccagcttccgcatccgcggggggcgcggggccgcggaggtcaccgccatcttccgcaagctggggctctccgggcccgaggacttcaccatcccgcccgcggtctacgccgccgccatgtcccacctctccagctccgcccgccgccgcgcgtcgctcgaggtggcttccccgccggagcttctagaagcttctccagccgaagccgcggttccgatgaatcgggaagcagtcgagaagggggaggaagctggtccggcccccaaattggttcaatcagaggttacagaagtttccacacgagcttatgcaaatgcaacgcctgcagcagaatcgagcatcagagtagtagctccatcggccaccaaatttgttcaagcagaagctatagaagtttccacacgatcatatgcaaggcctgcagcgagcgtcagatcagtagcttctaaacgagctctgctgaagcaggatagtgcagacgaggacaaggagaaaggtaaattggtcagattggataaatcacgagaggaaattagaggagaggtggttgtggaggcgacaagggagaccaccggtgcctcggctctggtcgtggaggcgacaagggagtccacttcacgtgacatcgagcatttgatttcaccctctcctcacaggcggtttaggagaaccatcacgtcctggcttaagggagagcatctcgggagtggatcgttcgggtcagtgtatgaggctatcagtgagtaagtatcgatctgcctactctgtcttgacgattgcataattcgttttcattatgtttgttgttaatatgtttgcatttgctactgttttatgagaggaatacaacgaagaaagaatatcaatggttttggactatgcagagaaatcagaatatgtcatctgtctagttcacttaattgttggtatatcagaatgagtattagcttcatgtgtccaccgaactgagatttcacaaattggctgcatccatttcaacttgttgggctatttattttatgccgggttgaatgaaatacttgaacatactgatgcaacatattatctgaatcatgcggctagctaaatttcttactcagtgcttttacacttcatttggcaaatttaattatttaggtgaacccttgtgtagttcttttgtagcactgcgtggattccatctaaaccactcttggaaaatataacttctgtcaacagttactatatagccgtgcctcgttttgttaataaaaagcttcataatcgacttttaacatttattttacagtgatggttttttcttcgctgtcaaggaggtgtcattgattgatcaagggatcaatgcaaaacaacgcattgtccaacttgagcatgtgagttaccctgtttcaaacattatgtttgttattgaactatttaatatccaagcaacaattgttttgtttcaatccactgagaatactggtgaatcatttggttccaggagatctctctgttgagtcgtttggagcatgaaaacattgttcagtattttggaacagacaaggtaatcctcctttcttatagatgttaattccattaagattacagttgtgaatgtattcttttcgtttgattttaatattatgttgcttttactctgctagttatcttcatgtaaacaacagttgtctgacttgagttgctgatttcgacgtttacgtttactttgttggataaacattttacaggaagatggaaaactgtatattttccttgaactagtaactcaaggctctttggcagctctatatcaaaaataccgtttacaggactcacaagtctcagcgtacacaaggcagattttgataggtttgaactatctacaccagcggaacgtgttacacaggtgcattactataatgctctatcaatgtgatagtgtactctagcttagatgtttttattgtttaggatttgctcaactgtattcttgctggcctattgataccccgttctttcctatgttaccagagatattaaatgtgcaaatatcctagtggattcaaatggattagttaaactggcagattttgggcttgcaaaagaggtatttgctctatcaaatatctgatgtaatcaatttgtcactagactacatgttgccctcactctttctaatttggcatgtcccagatgtcaattttgagtcaggcaagatctagcaagggaactgtttactggatggcccctgaggttagtctcacagttatgctttggtcctttttgtacaacccatttaccttacgctcctattcagaagagtgtaggtgctttaccattttatgttttaagcatatttctatgcctgatctattatgttcatattgttcacctctttatacttgtaagatgttgcatggacacataattgtatctctgtggtcaaaaagtcacggtcttgcaagttcaagcaatattttgcataaagtggtatgtgtctccatattgtaccgagcgtgtaaattttctgatagcatgttctcattcaggttgctaaggctaagcctcatggacctccagcagatatatggagtcttggctgcacagttttagaaatgctgactggcaaagttccataccctgatatggaatgggtgagtatatctcttgtcttactttccagtaacagcatcccatttttaaataccaaatgcactgatatacgcgggctgcacgctatttaattaaaggagcaaaaacattgatgacaacttcttcatgttgatgacttgtttgcttacatcagtacgtatgaagtatatctttttgggaaaatcaaacattagtttcatcaggaaaatttgggtagtattggatttaaaaatgtcagtaggaaaattaaacatttctattcagaactgcaaacagcaaatccactgtatgttgctgtgttaattttcttattatccgggaatttgtattattactgtccgtgatgcagtcttttcttctgctatgtagacgcatgctttgcttaaaattggtagaggaataccaccagaaattccagctacactgtcagaagatgctcgtgatttcataattaagtgtgtaaaagtaaatccaaatgatcggccatctgctgctcagctgttggaccatccatttgtccagagatcactgcaacataaaggcgcctaatcactcttgtgttgctaacaaacttgcttgtacataagctggtcagtattccattctttctcatacaaaaatttcaagaaatagggcgctatgactatgatcctgtattgcaaacattaatggatttctctctgttgcatttcatagattttaattttacctgtggaaacaggaaagctgttgatgctgaggatgatcccaaatcccttgccatgatacagcggtagtttgtaggaagtcgagcttacagcatgtgcaagctatattcaactgaagatacctttcaggctgctggatcatgtgaacagaagataccttgtcaggtgtttactccgtgccttcacaaccatcagggtgaacagttggttgtccaaagtttttagtgctgattgtcagggattatgagttccagtgcgaaccatcgaactacgtttcatgacttggataaaaactgggaaaggttcaaaaggaggattagtggtatctcgcctagtggcctatggaagcagccaagcaggggacgtagaaagctcagtgctcacggcacagttaacttttctgaccgcgtttctgtacagcgtttttgtacctgtaaagtggcttccttgtgtatgtcattgactgttgacgagaaaatccaatttgttttatagccataccgtgaaattgtccagaaaaatcagtgtgttttgcgataattcaattcatgttggacttcactcctgtgactacacagatgagggggaatcatagtggcaggacagctaaatgtactgaactactgatatacaacagttctctaatctaacgtcggctatcttttgacttcagaatatcagtcttctgcattctccagtctccagggtctgaattcatcccccatccaagcaatcgattacatggtcataatcatgccctgccatctcatgcatgagcaacccaagcatctgagatatctcctccgcctgtggatgcgaccgatcgccggagacgaactcgtgcacgtcgccgtcgatctccacggcgctgtagcccggcctcttcctcagcccccgcgccttcatcaggctccggaccttcccggcgccgtcccacttgccgacggcggcgtagatgttcgacagcagcacgtagttggcgtcgccgccggggtccagctcgagcaggtgctgcatcagctgctcggccatgccgacgtccccgtgcatccggcagccggcgaggagggcgccgagcaccacctcgtttggccgcatcggcatggtggtcaccacccgcatcgcctcctcgagctgccccgaccggccgagcaggtcgaccacgcagccgtagtgctccatccgcgccgcgatgccgtactccgccctcatcaggtcgtagtatcttagcccctcgtcggtgaggccgccgtggctgcacgccgtgagcacgccggtgaacgtcacggcgtccggcttgaacccctccctccgcatcgcctcgaagtgctcgacggcgtccgcgcaccggccgttggcggcgaacccaacgatcatcgagttccaggagaccaccgtccgcttcctcattccgctgaacacctgccgcgcgagctccacctgcccgcaccgcgcgtacatgtcgatgagcgagttggctatcctgacgttgcgctccagcccctgccggaccacgagccggtgcacccacatcccgagccccagcgcgccgacctcggcgcacgcggagatgacggctatcagcgtgacgtagtccggctcgacaccgtccagaagcatggcgcggaagcagtcgatggcctcgtcgtggcgcccgttcttgacgcacccgtcgatgagagccgtccaggagaccttatccggcgccggcattccgtcgaacacctcgaacgcggcggcgacgaggccgttccgcatgaggccggagatcaccgtgttgtaggtgacggcggacctcacgggcatggcgtcgaacagctggagggcgaggtggggcaagcgggacgcgaagtagaagcgcacgaggcaggtggagaggaggaggtgggaggggaagagcttgagcacgcgggcgtggacggagagcgcgaggcggcgggcgagcggggaggacggggagtcggcgcaggcggagaggacggtgagaagggtgacgtcgttggggacgggcgccgcgggggaggagagcatggcggagagcgcagcggccgccgcggggaggtcgccctgcttcgccgggcgcgcgatggcggacgtccatgaggcgacgtctcgcggcggccggcggcgaggtttaggggttgggttctgaggaggttggggaagggcaagggaaggaggggctacgacggccatgaggtaaggtctatggctgagggctgaggcatttccccgcgggcacgttggcacggagcctttgctctcccctggtttcttcaggttttcttcagaattcatccccttttatcctggtttcattagcatcccaatgatatgttggcgatacaattcacaacatatatagatcctgttcatttctccaacaagagttggataaagataaagattttcatggcacggtttttaaactgataaacagtatgtgtcatgcgaaaactttctatatgaaagttgctctgaaatatcatattgatctatttttcaagtttgtaataattaaaacttaaccaatcatacgttagtatcacctcgttttacgtaaaaaaacttaaatcttcatctacacctttatcttctaactatgcctgaataaacacaacagtctggttttcagttgaagactataaggtacgacgtgcatatggagccacaaaatgaaaatatgcagaaaagagaaagcaacatactgccaatacgagggggcaagccatatgcatcaaaaccacaaaaggaggcaaatcaaagtctaaatgatatttttgaacttccttaacgaaaagaaattacatacagcacaagaagcatcttgcactagataattgcgcacagctgaacataattctgcagtccagttcttcagtaaatctagtgaaagtcagatacagaagaaagttgcttaagggaggtgtatggctggagggcagattcattggaccatcggatcagggttcccagctgcaagtatgtccagcaacgagttctggggctccagctcttcatgccacagttgtagtttgtctccagggtgaaatttcctcgaaacaccatctgcgtttatctgcaagattatcatatccataagttcaagaatcattggtctttcagaaaagtaatagcattttaagcaaagataacaagacatgcctcaacttaaaatttactttgccacatgctacacattttcagaaaaaggaagagctacaagaaaatgcaatcaaagcaaatagatgcccaacaaggacataagaaaatttgttactaatgcttccaatcatccaatgtcttgtctacaataccctaacacattttagtaaaagagtaaaacaggtctgaatgaagtataagggatatatcacactgaaatattatccatttttggcaagaaaaccagtccatggaagttaaaaaaggccaactttttcattttaagtttcatctgatactatattctatggccatcacagcaaacagcatgacaaatatagcatagaaatttacatgtttgtatgaagtcaactaaagcaatcagttccggtatctgatgtttcaaaatatctacaacaagggaacagacaatgacaataaggacgaaaaaagggagcacttacagtgacggtacgaacaacccctccactagcaccatcacgggctatagcaagggaaactaccttaaccacaaacttctgtaaagatgaagaggaaaattaagtaataagagatgtgatgcagccagcaatattatacagggaacactgaagtgatggaaaatgatctttgcactctatgaatctggacatataaataatttgtgatattttcattaaatcatggcaaaaatgctgacaaactatctcttattactcatggattacgactgtttgatatttagatgatgtacctcagcttcttcctgggacatgccctccttccattcgtggtcaagcaatccatagaggtaactagagcctgaacctgcaaaactcagaaatagcatctggtgtcaggcaaacagcaaacaggggcttgggaaaattttatagtcaatgattataacagggcagggttgcacaggacagtgttggtaaacaaaaaagaatgaggcaagctaattcaagacatcaacaaataaagaaagaaatgaatcttgctaactgcaaaagattgcttctgctttgcttgaaaaaattaaactgctcaggtaagtttgaaaaaaaatatctcataactaattggcttatactattgaactgacaaattattcttgtacgatatgtagatatgttatatatagacacaaatgttggtgggaaatatgtttcccattagattactctgagcccaatgaagagacatttgccataatatatatacctccgattgcaaatggttgcctcagaattgttccaccaagggggactgagaaaatttggcctccctcatatttatcccatccaccaacaatcatgccagcttgcaacatgttctgaaaaataaaaaaaatggtaaaaaaaaaaccattgcgacaataaaacaacaacttaaaatcgtgtatcagagaaaccattgcgacaataaaacaataacttaaaaaatcgtgtatcagagaaagaatttcatctcatgtagtcatggagttattggatcgcagaatgctatagaaaatataccttgttctgataagccaacaacctaattaagttggctgcaactttcacggtagctggctgcccaagctgaattctgaaaatggagggaaaatttagcatgaactgtcttgcacatcaaatgtttccagtaactagtagaacaatatatatgaagagttcattcaacttcttcctattcgcttcaaggggacaacttacgtgtgttggtggagaaaatagcgtacataatcggaaattacttgtgtatcagcagcctgtgagacagagagaaacaaatatttacatgtgaatactactggactcttggaaatgccttagctgataataattagaagccgactactaacaactacagaataaatgaatcaaagtaaaatattgacaatgagagtgtaacttatgagagggcaatgaatgactgggaaaaccgatcaagatgacatgacacagtataacaaaagaacatatataacttgatgaataggaagctcgtgatttcccaatatcttatggccacagtacaatgagacaacatgaaaaaggagtaaagtccctaatatagatacttacagatccagagcggcagatgtacacattgtcagttagctgagtaatcttgtccgacgcacggtttgccacatacattcctaagaattaataccagacaacaaagggtatattaaaggaaagtaacaaaaaccaacatagtacgtcaacataacatcgatttcagttggttcagaacatgcacatctaagataacaagtcagaacatcaaaatcatctaagaaagcttgttaatcatgtagacacgagacccaatgttctaaatttccaaaacagcaacatcacgctaaacaccaatcgtgtacacttttctgactcttcactcttcagggccaaacgagaactatatggacagaaaaatacaactggaacaattggtgttgtttctagtttcctctaatgctacagtcacgattttttcacatatctgccatacaagttttagcacgcattctactcgtcacatacagatttaagcaggataaattagtggtaagaagcaattttccatcaacactacattacgtgatccactgtggacgctatatatatattacaactaataatctcataagtcacaaacctaaaacagtaaaacttgaatcaggatcgcagaggctaacaatcactactcctattccccccatcccccgcgattttgcatcaaaattgggcccgcgacgccaccggctccacgttaaaccccaaccacatcaatggaagagatctcccgcatcgggaggtgtcgaggcataccggtgctggttctggaatcggcggcgaggacgacgccgccgtcgtagcagacgccgacgatggtggtccccatccggtgctccccggaggtgggattgtctcccgctgcggcggagggggcgcccatgagagaggcgtccatggctggccgggggcgggggcgagatcggcggtggcggaaaaccctagcttagctgcgcggcggcgagatgcgagtcgaggcgctcctttcagtcgcgcgagcgagaagagaccagacggcgagagagctgtgtatgttacggttttgggctctggtctggcctcccccgcaagaaagaacacgaaacggagacgagacgaggacgtgactgggtcggagttgtcgcgtgctggtgcggttcgacccgatggcaccacgagccggtgcaaccacataccgacttcccgagcccgaccgaggtcgggtcggagatgacgtcagcttgacgtagtccgcatcgacgatatcccacagcataactcagattcaacactacttacttccaaaaaaaataatttacatagtatatgatgtaacatatactacgaatcttaacaacttgtattccctccattctaaaatataagaacttatttgatatgtagggaaaaacaacaattttagaggattttaatcatataagaatatttcatatggatgcctttgaaataaaggattgaattcctatcattttaaaattcctatgaaatggacaatcctatatagattttgaaggaaacttgaaaagagctctaatctattgaagattttcccttgagcctatccctctcatctgactcatatgttttcatgcattttgcaatcctttattttgtagttgaattcatttttgttttttccatgcctgcgatccaaagagtccctaaaggattttgatcgaatgggacacatctaacactataaatttggttagaacatcctagttctactaattttgatagaacatcttagcactacgaaattggacaaagctattcataataatatgatgtgtcccatctaactaaaatcacttatattttgggatatagaaagtatattacatctcatattatgttaacttattttgggatgaagggagcagagaaaaaaaaagttgcaatgtactctacaaaaacagcattggaggaaactgcaagcactaaacagatatcacaaccaccttactgtaaacaactgaggaggaaagcaatacacagaaatcaaatgcattgattaaaatcgatatacatatttcaccggttgatccatacagcaaaactggaaaaaataactcttcaatttagtatttacaaaccaagactctgtacatcacctgctgaatgttttacagccatttacatgtacatacatcagacgacccatactgtacattggcaagaaaatacgaaattaataaatcgaacatgttggcattacaatttacaactttacatagaccgatcaactatgcctgaataagtacaccaatctggttgtcagttgaagtcttgaagccgcagagaaaactcaaatatgcagaaaagaataactaacatacccccaatatgaaggacaagccccatatgcatcagagccacaaaaaagaggcaattaaagtataaacgatattctttttgaacttccttgatgaaaagaaattacatatcggaaatgaagcatcttgcacttgataatggtgcgcaaatgaacacaaccaaaaacctgcttggctgcttcatctgacgtttcaacaatcaagttctgctcatgccaacaacctacaaagctgagcaacctaagaaaaacacagcccttcttacaacagtcaaatctgatccatatctgacaacaacgttggaagtgttattgtccaacctgaaaacatatcaaggcttttctgtcgtgctggtagacagatccaatctctcaaacctcagtattaattctaatgaatttggacttcatatattctaccacaagctcattccagtctgacagggaagcaaatggcagcaaaccagccaagcatgggagaataaccgacaggacagtataaaatgtgtatcggcaaacccgatatggtaaatcagacgccttcgttctgtcagtcactgaaataggaccataaagcatgcggtataaaagagatggcctgctgttcccaaataaatggatgaagcagagaatctcccagaaaaagagccagacatttccatccccgcctagtgtgtcaacgcagaaccttccgacagaaccacagagaactcccaataacataacattgaacgttattggcatgtttggtccagtcattgcagaacgctggaatatcaaccaagcaatcaagagaatcattaacatgccaaatgacatccttgttgctgctattaaatgacacctgaaaaacagcaaacccgaattgaaagctgatactgaatttggcatccaccaagatttaggttcctgccaaaaaaaaagtgggttaaagagattagttcatagcacaaatatttactagcagttagtagcgaaaaatgatgggacatacccttgaagccgctgcacaagctgcagtaacagcagttatccgcttgtacgaataaatataggttccataaccaaaacagacagacataaataccactgcggtaaggagcaaatctataagcctcctgaggagttcagcatgtcttgtgtcctccatttgcgtcctaaatttttcctctctgaaagaagctttctgaaatcccatagaaattttgatcttctctagcatgtgtgagtatgagctgagagctatctgagattgcttcaattgcaatttcctcatgtttagtcctatttcaagttccttgagctcatttgaacgagtctgctcattcagagatctctcaaatacattaagaatgtgcctatcaaattctggactagctttattatgaggtagtttaaccaactgctgatcggtgcccgcatgaagaatgatttgattatccattgaacttaacgatgtactctcctggatatcatgtaccggcctttttgaatcagcaccactcaatttgatttcagcagcagaagtaccatcttcgtgagaaaaccgagagttatcttgctcatagacaggtgtctcattaattaaatgaagtgtcctcaatgtacttccaaatgatttctcaaagtttttcgtgaagttgtcgaatctatcaccatatatctgcagaataacgtaagtcagatatgtaaaaaaacctgtctaagtgtaatcacagacaaggaaatgaaccattcatacatttgtcaaggactctttcactgctgacgtgcacatctgcatcaagattcagagttagcatacctgaagttctgttatagtccatggccatcatttgtagaaaggctaattacatgaactgtgtacctttgaaaggaaatcaggttgtaatcttccttcagagcaactgcttctattaaggacctgaaacaggataaggtcagttcttgttaattacgagtaagaaaaggttaaaccatacaagctgaatccatgcttcagaaccacagttctctactggagagcccaagaaattcatttgattcatttttgtaaataaacaacttcattttaatttggcttggatgtatttcatcatcctaatggcgagacgatcatccagagaacagaaggattacatatctgagcctacgcttcaaaacacacgcttctgttcattagtgccgtcccatgtaaatttgcttaattcaatttggttatataaacgactttagttgaatttagatgcaatgtgaaaagacgcccaaaatgagttccggagcaaaagaatatctctacttctccatcctaaattcataatccaatgaccgtcccagcaaggcaagaattgggtgaaccacatgaggagggtaaaaaccgaacctttccgccgcgactaaacaagaaaccagtcaagaatcgaagcgaacgcgcacctgggcaagaaccgccgcgaaggacatcccgagaggcagcgcgaggtcctgcgcgccgtcggcggcgcccctcccatcccctccagtcgcaagcagcggtctccggagcctctgccgccgccgccgcaggcgcacccccttctgcagccgggacgcggagccgtacgacgacgccgacgaggacgccccgccggactccggcgagccaccgccgtcgcagcaggccccgtccataataagggagcgtggcggcgaggcagaggcggtagggtttagttgccgcgccgcaatttcttcgcctcgaccggtgcgcgacccgctctccggtgggcttctcataacgggggagagagagagtctaggaaaggcaagtcaaaatgggaacgcgacgcggaacggcttcggggtcgcgtcgcgtcacggtgcggtttacgttagccgttaagcaaactcggaaattctgagcaaactttgtgccgttttgtgcgtgtatattaggcttttggcctggtttccattaaggaaaaatgttgtaaggaaggaaagcagtgttaaattattataggaatattatttaaactactggtgttgtagtatccacgaagtttaccgtgtcatttgaaatttctaagaaggtttcacaaactttttccgaaatatttgcccgtcaaaaaacatgcactgaaagatcaaaaaactttcttcaagttttcgagagaagttggtcagtagctttgggccctgcactgccactcggtctttgcaggccggtgcacatcaagattgggctggatactccgctatcaacgggttccgcacccacaaggcccgttacgctgctgattttgcttgcgcgcgaaccggattcgatggcacgaaatctcgttcaatcctcccttgattaacctgacgattaccttaacatatctgccacttatttataaccacctcatcccataatcccatcctcatccaagagaagatagatatccatcaatcaaataaccatggatgatgcggcgggtagaccaccgcgcccggcggcgaggtgcccacaggctggccggcggccgacctgccgccgatcaccaaccgcgacggcctcattgtatcccgatccagctgaagcggcggcggacgtggctgatgattgctcggtctcccgccgcacatcatggccgacgaggaggccatcgaggatgtcgatcatgaagacgttcgccgggctggtccgcatcatatcgaccggtggctcgacctgacggatgggaagacgacgcacgcggctcgtctgcgaggtggacgtacgtcgtcgccgaaccatgcgaggtgccgcgcgtcctcgcgctccacctcgtgcccaagtggctcgtcaccgtcgtgctgcggagacgcgacgacgacgcctccgatgacggctgtgacggcgagtcggctaaggccttgttcggcacgcatgtttccaatccaggccaggaattgatcaaggccaggtttcagtggatccgggtggattcactggaaccacctgtggattgaatccattccttttttcaatccacctcttcaaaaatctgtgttcggtttgacctggaatggaatgaagccattcaagctgccgtggattgtcgatcgatcagatccagtgattcagaactcaaaacattcagttaatgtcatcactcattagaattcagaatcatgcacatttctaatttctaacagtaatagtatattgcaggagttaattaaccaaaattcccaaatagaaagacagggaacaccctgaatagcatcaggacaattcttcaccatattcagttgctgtcatcattcatcagaattcagaacatcatgcatatttctatctagttaagcatgaacagtaatatatttcaggattaagcacattcttttcaggactatatcactaatcaatctggcttcgccttcctccggtccctctggtagcaatccatcggcatttgggaatatcaattgattatccgctgcagccatagcaaagaaatcttgcggttaagacttagacagtgtgatatagaagcagtacaactcttgcaagtaaaaacagagcaagtaaaaatacaatagagctgttgaacttcacacttattatccattttacaagtttgtttgcatgcattcaaacaaacttgggggatctgcatttgtgttatcatcataaaagggctatcctatgtggacacaacatttgatatcttcagattcgaaaaaaccaaacttgtcggcttatataataagtagatatgtgaagtctaatacaacataatatcaagtaaattcaaaagaaaatttggtaatgaacagagaatttccatttattcacatgtttgagttttttaattagcctaaactacccagagcttagaaagaaaatggtcctattccaggacttagatgtaattgaaaaatatgagcctatttgttgttgtcatttattacagactacataagaggcaatttagctgaaaaaaatgttaagatactgcactgtagttgccagaatgaggcagccaaaaaagaggcaacaaaatcatcttcctactgcagttcaatttatatttcagcatcgatgcgcaaagctttcttctccaaataaagcagaaaaatatgcttgttaatgatgtttgctgataacaggggctggtttgttaatggatcactagcaggattgcagtttccaccaccctcaacaatagttgtcagtaatgccaggccttcatgtctgttgaaaacgcctgaagcttcctgcaaattctggttatgaggtgcaaattgtcatgcatgatgatcctcagagaaagaggatggccccatcggaacaaggacaatctacaatgatatatgcagagaaagggagaagggaccaaagcatctgatggaaaatggctaagatttaatgaatcataaacagaaagatggaaatagaaaaggtttataattagcatagtagtttgttgaggcagccagtgctggctaaaattaagtatccaagctaaaaagcagctaatccatgaggacatgtggttatcaaaatctgaataatgaacagaaatgccatcaagaactgacaaaaactggttatcaaaggatcttttcttatgcaacactgaatttaataacaatcttgacttagcctggcttgggtgagtacaaaaacagagatggagcaccagtccagttacagtgacatgtttttttttcagcataatttcctggttcattcgagaagaagacaaactgaaagggaagctggttgacagatccatggctatgcaacacatcgatccttcagccaagatctagggcaagaaacagaaccaagaacctagggctcttccaccaagaatcccccgcaacactgcaagaacctaaaccacagaccaaatctccaagaacccatcacgattcccccatccccaccccctacgcggatcggaatccccaacaaacaccagcccttggaaagccctcatttgggcggaagaagagcagcagcagcacaagaaccctagcaagcaaaaaccaaggaggcggcggtggcgtgctacagcggcaggggaggaggcggtggccaagaaccctagcaagcaacaaccctagcgccggggagagaaaggaacaaggaagacgacggtgatgcgttactggcgagaaggcggcggagagcgtggacgtcggatgggaagcgggtcgtcgtcgccgtcgcctctcgcgtcgccagccgcatgccgtcgcctcttcgcttctcctctcgcgtcgcctcgcgtccggattggaaccggagggtcagaggtggggaatggatccgggccaggaacagggggaggcaggccaaaccgggcccgtttccaatccgggccggccgaaacgaacgacgcttccgggccagaccagatttggaaacgggccgcttcgttccggccggaactgaggccgttccgggccgttcctggcgctgccgaacgaggcctaagatggagatgctgccgtggttggatcgtctggccgtccaatgcagccacgattttttttatggcggtgagaataaaaccatccgttgttcttggtgattatggaaattaaccggaacaggttctgataactctccgcgaggagagcgccgcggcgtcggtagcgggcggcacggcgagttcccgtggcgatcgacgaaatgggccggaacggtaatgcggcctacgtgcggaaatattggtcggaactggattcccacgtcgcgaatgttgggctgatatcgcgctatggacagaccacaaactaccagcccagtaacgacgatctgggcctgagccagattcccgtgaactgtgccgatatgttgggccggcctcagcaattgtgggctgaccaatttgtgggttccagctccacatgtcctggagctgaaccaaccaaacatttgtagctctagctaaaacaagagcggagctcgcgaagctcggtggagcatttttataaaatgaactagagaggcaaagttaggtttagactactcaacaattacactccagattcaactcctggatccattgtaactggcttttttttcaaaatcaaaaatcagaccaagcgaaaaattaagagacctaaagtgaacttattccacccagatggtgctctggaatgggataccgacgccgcgtcgccttcagttgtccacggtctagctattttttttttcaaaatcgaaaatcagaccaagcgaaaaattaagagacctaaagtgaacttattccacctagatggtggtctggaatgggataccgacgccgcgtcgccttcggttgtccacggtctagctactacaaaatcaaggccaaaatgcagtcttctgcttctttttttagaagggtattttttacccggcctctatatccaaccgaatatatgcatccattgaaatagggaatttagttctgcaaacaataaattcgctccatagaaaatttgaactcagaaccttggggtactactcaggtcactgtagccactaggctatatgcaatcttctgcttaattattattgtcaaaatcaagggtcattttccgcttagataatccgcacgacttcaatgttcgatcgtatcagcatggaatttgtttcaccattcaccaaatatgaaatcagccctaggcctatatatctagggcactattacttcactttatagagccttgatgcttgtcgcttcagccacagcggacagcgtccgtccgtgcgtgcgtgcgtgcacggtctccgtgacgccgaaacaactggccaacaacaacgatctgtgggtgcagtttactgtagtgccaaacttctctctcttcgtgtcctaggatttgtttggatgagcttaagttttgagaagttgtccttggtagttaacttatgagattcttgagaagctgaatttctcggtttctgacttttatttattttattttggaatctgaataaaaagctaaactatttataaaagttttaattcttggagctcgatcatacatcccctccgtcccaaaaaaaaactcaacctaatataatgaatatagacatactagattatgtcacatttcaatcctagattgttttttttcagatttattgtactagattatattagtattatattatagttctatgttaagtttctttggaatagagggagtatgtcacagctgtcacctatcccagagcccgaaatgtttgacatattccctcgtctggtgctttctggtaggctatcacatgatcatctctaccagtcagttcttgccgctcgacctgattggtcacctaagccattaggtccacgacgatctctcaccttgcacacgccatggctactgtggtaacagtgttataaatggagtgcacgcaataggtgaaactaccctatgggtagctgctgctagtagctttgagagcgtgcaacttgtcacgtccagctagagcgagtcactgactcgtgggcccggacaccgtgcgtttattagatggcgaattgtttaattagaggctaatttggcctcgacctgggacggggttgataggctaaacaagggtcaaaccgacccctatcccgactcgtacttggcccaaattaaacctgtgtgcatcgatcggaccgagccggtttaccccagcacgaatcgtgatgtatcgctgatcacttggtgactcggaaaccgagagccctaggtagctactaatccatttgcacaaatttaaatactacctccgtctcaaaataagtgcagccatggatatccgtgcccaacgtttgaccgtccgtcttatttgaaaaatttgcgaaaaatttaaaaaaatttagtcacacataaagtagtatttatgttttatcatctaatagcaataaaaatactaataataaaaaaatttcaaataaaacgaacattcaacctcaaacgttaaacgtgaatagtacaaaactgcacttgggacggggggtataacgtaccgaattgaacccgatccaaatctgcactcaaacccatggcataactaaccacaacgtcgtcataaatggatcacaagggagcaaaaaccacttgtgaataaatttttactaatcccagaaaggtaaactctaatgatctgcaacatggccaatcagatcgtttcaaatatcatggccaatcaggggccgtacacgttcatgcgaaggatcgatgcagcttgcagagtagctagcagtagaacttctggtagatttgcacgtgattggtcgttccgatccattttgctttgggctacgacgactatgagcagagttcaagttgaaccttgttttgtttacatgcaacggttgccgtgctaattaagcagtttattaccaagggagttagttactactggtcttgtactattggagtacaatattttgttgaaggcatgtgggaagagaattaattttattcgggaagtgaatattaaactcttaagaacatatcctcatgttgtctatataccatctaaatatttatgaaaaaaattaaaaagataaattaatatgtgatatattactccgtaaatatacaagctataattcaactctcacaagttacaacaaaaataactaatcaaactaatgtatattcacaattaaatttgtattttttaacttataaaagttgaatctatcattgcacatgtttgtggagtaatctatcacatattaatccatcttattgatcttctaaaaatatttcataactatttaaatgaaattctaacaacgagatgacgtccctcgagatagtttagaattatcttttatctattcgcgatcgaactcactgataatagggagcaaattctcttacgtgtaagatcgaatcacaagaactaagccaaccagagggggggtgaatggttgatataccccaaaacccaaacttttagcgcaaataaaagttaccctcaaattcgatgtaaaccggtctgaccgaggttgatccgccggtctgaccgagctcgtgccaccggtctgaccggtgttgatccgccggtccaaccgcctgaagattgcctgccgcgtgtgaagtcgccgccggtctgaccgccgcctgccaccggtctgaccgccggtatgtcgttggttagaccgccgaaacccgatgaaacacaaatcgaagaactctcaaaatagatgacaactttattacttctctctgtgtttacaaagtgcaccaacatcactccttacaaaaatcttgactaaactcgaaaccctaactaaactagcaactcaatagctctcaaaagcgataccgggaagcctcacgctccccctctatttatacatgatgtaggcagcctaaagccacgaaccaaactcatactaagagtcctaaacaccttaggaaaccctctagtacaagacacaaactttacataaccaactgtaccaaatttggactccttccaaattcgacttcgcatcccatacgcacactatacctccatcgtatgccatatggaatcttcaccaaccacgtgcatcaactctagccttagtatcccgcatgatatctgaccaccacggacatcgtcttaccatcaagccgactcccagtccatcaccgcaaatactcttccgaggcatcgagtcacctacacacgaaataaacaaagaaaccatattccgataccaagctatccccaacttgactcattgttagcaaacaacagtattacatacgtatagtatccatctagaagccataaccatgaaacaatcacggatatccaaagaaacaacccaaaaccgaaaccgacacaacatcggccggtcagaccgcgggccggccggtctgaccgctcgatcaccaccggtctgaccggcatacaccacccggtcggaccggtaagataaaataacagtgaatctgatcatcacctgaaaattgattatctccaaaaccacttcgacgataatctccaaatatcaaaaccaataatcacagatacctattgttcatcacagaataagaatcaaaacacactttgatcttacaatctcccccttgatgaacacattggcaaacctcataaaaaaatgttttggtgtttggaaaaataaaaacaaaagtggtaaaaaacacacttcgtacaaatgtacacatcgtgctcaaaaatccaaaagaaaacttctccccctttttaaaagaaagaaattctcaattatacacactgtgctcaaaaatccaaaagaaagaaattcccccaattgaaccaaaaacatgctcttctcaacaactctcaaaattcaccttgcttctccaaaaatccaccttgcttctcaaaaaatccaaaaattttcacattacttctcccccttttgacaatgatttcatcaagcataggaattatgttcattaatgttcaagagcttagtatacatatagcatatcaagtcatgtattgcaataaaaagaagatgaacccatctataacagaacaagcatgcattaaagtataaccatgaaccaaagattttacaattaagcttgaatcaacaatcaaaattcatgatttcatatgatttataatgcaacatttttacaagcacataggttgaagaataaacactaaacacatatacctattgcatttatcactctttctcaaataacctttagcacaaaacaaccaagagaatttttaactttttctttttcttgagcatttttgctcatatttttctctttttattccgggtacgtccctgtcatcaagactgtttctagggattcggcacccattattttgctcacatcgaatacgtccttgtcgtcaagactgtttccaaggattcggtatttatttttttctcatatttttattctgtttttcacaatgagcaattaaagctatttgaggaataacaagtcaataaagcatatatataaagcatttataaatcaaaccatatgctagcatcaacattgcatatttgcttaattcaagtatagaatttaagtgtcatgcattatctcccttgaaagcaaaatctaaatcacatgaaaagactagaatacatacaagctttgctagagacaaataaaccttcaaagtattgctagcatgcacaagaaaataccatatgtataaaacaaagttctcttttctcaattttttcattgtcatattattgcttgataaaaccatgaggtacaaactccccctcaaaacatgccaaaaggattcacgaataagcactaactccccctcaaaataacctccaattctccccaaacaaaaatcaagaagaaatcaaagattttgaaaaagacatccaattgccaatgatatcaccaagattatcatgaattgacatgtatacacttgtattaacaaaaactactacctcaaacacaagcatatgaaaagctaataattaagaaagtagaacaaaaaatatgtcaatccaaaattaaattgatgttaccttgtgaagcaatcgtcatctcaaaattgaacactcatagggagtatgctgccaaaatacctacgaacgagaagatgtcgaggccttcgtgttggggttagaaataagaaattttggaatccaacactgagttacacgacctgtagaaccagtaggtacaaatgcactgacaaaatcagaatcagacttacctgaaaaattacctttttccttcacaaaagtctgagttaaatttcgtacaaaattgccccgaggtcggtctgaccaccgctgtgcctacggtctgaccgggcctgacagccggtctgaccgccggttcaactgcggtctgaccgctggacggtctgactgactggtcagtgtcggtctaaccgtggtcctcgaattaaaacccgatttttgccaacgtcgttttgcaaaagcaatttctctttccttttttctgtttatgggcaagtttaaaacaaaaaccaaccaaatgtccatcttttccacaaaaagaacaagtgtacttctcacgacaagtttgtgaagtggatggttttgaaattgatggttttgcaacaacagaaggttttgcattcacaacatttgatttcgaagaagatgcattcaaagaagacatgatgccagcagatttatacacagtgttcttaggctcagtttcaatcaaaatttcacctctcccagcaacacccaaaaccgtaggaggatgtctagtatgatgagcataagaatcaaaacctaaaccacgattgtgtgtgctaactttagattgatcaagaatcatgttgaggttctttttaccatcagaaaatctttgcaaagaacttttcaaataagaaacctcctgagtaagaatagcacaatttttgcaagcatccaaaagacctttttgttttctacaagttgagcaagaaaacacctcatcttgtttaacaatttcttccatgtgtttaacacgctctaaagcatctttcaacttcaactcattcaaaacacactttgaacaatcttgagaaatcaaaacaccattgttttgttttgccttatttgcacatgaagcattgaccaaagaacttgcacaaaaagcaactttgtatttttttcaaaacgttctttgtcaaaatcaactcatcaacaacacgagcatgtaaagcaaatccaagagcaaaagaagactccaactttttagatttttcaatctcaaattccatttttttgcaattaacagaattgacatatcgcaaagcattaatttcagaaaataaaacttcacaagattgacaattatcatctttaggaatcaaagattttaatctagcaatttcagcattaagaatctcaatcgtacgatccttctcatcaagcacaatagaacatgtttgaagtttcttagcaaatttgtaagcatcatattctaattgatcataactaagcttttcttcattatcatcatcagattcatcaacatcagaacttgcattacgagcaataaaagctagatcaacaacttgcttacctttgccctcatcttcatcttcagatccatcaaaaatttttatgagttcttgaattaaccactgcatgcaatgtttcttcttctccttctccttcatgttcttcttcttgttcacgtcatcctctttgactctaccatcatcttccttcttgactctcccaagcttagggcaatgcgagcgaagatgatcaagtgcaccacactcaaaacaacgattcggttatcctcttttcctgttcctaacatttttcatagctcgagaaaatttgttaaatagcaaaaccaagtcctcctcctcgaactgttcgagttgatcatcagacatggcattaaataaagtaagaacataagacttcgatgaagaagcaccaacatccaaagaagttgaagacgaaaccaaagcactagaattagaatcacctttacgagaaagaatattcatctcatgagttttcagttttgtgtaaagcgaatccaaagtcaaagtagacatgttcacagactcctgaatagatgtaattttcatctcccaaatagacatgtcaagaccattcaaaaagtgacgagaaatctcaaattgtagataattagcatcataagaagaatcaacagatctaagatcacccaaaattttattaaacctaaaaaagatagtcatccaaagcttctccaggtttcatctcaaatttaatgtactcctttttgaaaagatcacaacgaagttctttaatgttattagtaccttaatgaaaattattcaaagcaacccaaatctcatgagcagtttgaagatgagcaacacaatcataatccgaacgagaaatcccactcaaaaaaatattgcgagctttgcaattcagttcaaaagcagttttttcagcagcagtattaataacttcaggaatcacataaggaagagaaacttttctccaaatatcataattctcagccataatgtaagattgcatcctactacaccaatgagaaaaatccattccatcgaaaacatgaggcttagttgaaaacttattagaagcagccatggcaaaaactttggatcggttaaaatccaaagaagcaaacaaagctctgatactacttgtaggatcgaatcacaagaactaagccaaccagagggggggtgaatggttgatataccccaaaacccaaacttttagcggaaataaaagttaccctcaaattcgatgtagatcggtctgaccgaggttgatccgccggtctgaccgagctcgtgccgctggtctgaccagtgttgatccgccggtccaactgcctgaagattgcctgtcgcgtgtgaagtcgccgccggtctgaccgccggtatgtcgccggttagaccgccgaaacccgatgaaacacaaatcgaagaactctcaaagtagatgataactttattacttctctctatgtttacaaagtgcaccaacaacactccttacaaaaatctcgactaaactcgaaaccctaactaaactagcaactcaattactctcaaaagtgatactgggaagactcacgctccccctctatttattcatgaggtaggcagcctaaagccacgaaccaaactcatactaagagtcctaaacaccttaggaaaccctctagtacaagacacaaactttacataaccaattgtaccaaatttggactccttccaaattcgactccgcatcccatacgcacacaatacctccatcgtatgccatatggaatcttcaccaaccacgtgcatcaactctagccttagtatcccgcatgatatctgaccaccacggacatcgtcttaccatcaagccgactctcagtccatcaccgcaaatactcttccgaggcatcgagtcacctacacacgaaataaacaaagaaaccatattccgataccaagctatccccaacttgactcattgttagcaaacaacagtattacatacgtatattatctatctagaagtcataaccatgaaacaatcatggatatccaaagaaacaacccgaaaccgaaaccgacatagcgtcggccggtcagaccgcgggctggccggtctgaccgctcgatcaccaccggtctgaccggcatacaccacctagtcggaccggtcacataaaataatagtgaatccgatcatcacctgaaaattgattatctccaaaaccacttcgacgataatctccaaatatcaaaaccaataatcacagatgtcaattgttcatcacagaataagaatcaaaacacactttaatcttacattacgttattatacgttcaccgtgaataacatttagacccatcactctcgagttcatatatcagccaccacatcggaggaaagttatgtgagagaatttcaatcggtgataatataggcacgtacgtgtcgcctctcgacgacatgtaagacctgatgactgaaaaaccttagcgcagtactactctgggccccggcgttagtggctacaaagcagtacaccagttggtgtgaactaatttgacagcttaattactttgcagtcgtgttatgttagagtaccgaaacgtgtgcatgactagtgtaggtgacaattacatttgggatcgagttaatggtgacaataacattggcatcgagttaaacacgccgtacattgaaacttactctacggatatattctccttgtctcgaatgaaaaagaaagaaagaaaataattaatgatgaggtcaagaaaatatcacatcgttgatctagctggagaaaaccaacaagctaagactgctagctactgaagaatatcaaccatggtcgctataatggaacgatcaaattagaccactcgacaagatgttgaaagattccatacctttgactatgctagagcattttcaccggtacgttaattaccgcgtgttaattcgacgtacgtcaaaactaaacacctggtagtacgtgttcgaactctcctgttgcatgcacacgtaagtgacacgcataagaatccagaccgatcacacgtaatacacatggaaatcaaatcgcacagagactaatgctgcaattaaaattccatctggaatttaacacgatcagtacgtctgaacatgcctacatctacctgaaacggacccgtggaaaaccggaaaacgccatggccgacacacatctacactactctcaggctagtccaatgagcactccggtcgtcgccggccgtgcaaccgccgaaataaacgacgacgacggtgacgactgatgagacgttacaagctaggcaagaccataaaattaaattaaaaacaagcacacacgcactagaattccaagaaaactacgtcttgttacgactctttgcttgtagcagtacatgtgtcttgttgtgaaatgttgattaattctagcccttgtaagtgttatccatatcgatgcaatgcctgatcccgaagccacgtcttgggatttcgtacggggctcctcctctcacgaggagctgagttttctaaccaaaaaaaactgttacttattgtgcatagtcagatcgatagataggttgtttcaaaaaagaaaacgatataagatagatgttgcatgcatatacattacattagcagtgagattaattaatagtaagaacattaattatccataatatgtaattaacattcataatatatatatgtctgttgcattgctggtggtaatgagaatcttgagatctattccaagtccaacgtccaattaaaggagaacagcttatatattagccagtttttggttccaacaaccagttgacctcaatcatcatgacgatcgaagagctagagaaaaaaattatcaggatcaaaggtgtattataatacagaagagaggatagttggcgtaaaataataactatacattgttactgaaattctgtgtggcccaaacaagttgactcgagattttatacggagacgcaactgctagtccggccttagttttccattatactgtataaatcttcggtcatcggtgagctatagaaggagatcagattaaggcactgaaatggctatcaccttacaggatgcagacgatggcatgccatgagtcaacattgcagaggtccgacttaagacatcgaagcatatatatacactaagtgttgtgaatcacaattaatgcatgcgtttagaaaacaaaatggtaacaccttaggtttttttttctaactaatttttgggttttgctaggtttgcatacaagctagctagcaacctcaatcaagggcactccttaattacataagaattatataaaggtcatgaacgaattatattgtctaacacatatatatcatcaaaaaaaaatttgcatgttgttttactcaattcctaaggtgctgtagacagctatattctccatgaaatgaagtgcttgcgagccacttgatactaaattatagtcacatacacaagtcaacagttcaatttatagcgcgagcgagttctataaaagtactaaacatggcattgaaagttgacattgtgcaactagaatgctagatttatacatatgaaaagaaaatattaatgtatatatagctcacattttaatctgtcattttggtaatggggaaactaaggtgcgtgatgatagcggccctgaagaaattccaagagttgacctgggctccatacaatactaatccccttagcgttagaagcgctctctcccatcatgcacatgaccaagcccccacttgacttcggtatcccttgtcatttggatcacaccaccgtgcacttcacaattcacactactccttcagattaatccatctcgttgatatttcatctcgagtcgtaaaaaccctcatattgtattcatcactgacatgtgtgcccccaaaaaatatcaataggtgtagaaggtcgtgtatatatacgcattcatgtgtgtcaaggcaatatattttgttgaatatgagatgacatgggataataggattaaggaggagtcttccctcctcattgcccttttaatacgtcttagacacccagacattgacttagatgcctcgggagaagtagcattaggatttaagaccgttccccattttagctgtaccaagagagacaaaggtacacaagattaccagaaagaggccaggagcatgtcatccaagaagaagagagctgccatagatctctccctggaggcagagagaagacggccagaagaacgcggcggcggcagcgatcgcgaagccagcgatggcgccgctgctgcagctgaggaagatggtgatgtcaagcaacgagagggccctaaagaggaaaccggcggcgaggaggagaaggtagttgaagtggttgtggaccaaggagaagacggctccaatgaggagatcaaatataggactcaacaagcagagatgatcgaggaggacaagcaaccagctgcagcagcaaacgtcgacgacgatggcggcgacagcgacggagtcggagctagcgcggaagagaagcacatggtaacagaggccaccggcggcgaaggcgacgacggaggcgatagccgtacccccatggcgcaagatgaggtactatacacagtactacaattaaacttaccgacgattataaaaactcctaattatactattagctggtgatgtgatgcaagtagatagaattaatatcgatggagatttctcttgtcctttgctcccatttggagttgacatatatatgtgtgcttcttcagctcagcgagatgcaggaggagatggagaggatgaaggaggagaaccggatgctccggcgagtcgtcgacaagacggtgcgcgactactacgagctgcagatgaagctagccgcctaccagcagcaaccggcagcagcagatgagcctaaggtgatttaatttcttaattagctgagctagcttaaccaagctgatttagctagctattatagctaggctaaatatccaattgagcctacccatgttgaaactaagcttagctctagctcgcgcgctcatctcgtgcatgactttaattattcttccacgtgacacaccataattaccatattactcaattaagtcacgccttgttgtttgcgaactcgtgattgattcgatcgatttccgtgtaggagaccgaggtgttcctctccctcggcgcaacggccgccgcctccgccggctgcggcggcggcttcccggaggcgaagagcaaggagcaggccgcgtggcggcggcgctctgtcggaagcgacgacagcgactgcggcaaggaggatctagggctgtcccttagcctgggagcgtcgtcgtcgtacgacgacgaccagaaggcggtggaagcaaggccgcacgacgtcgacggcgcggcggctgcggccatgatcggcggcgacggcagcaggccggcgccgagggggtacgcgctgctggagagcagcaaggtgcagggtggcgcggcgccggccgccggcgagctcgccgcggccggcggcatcacgagccagagcgtcaacccggccaaccgcaaaactagggtttcagttcgagtccggtgccaaggccccaccgtaagacacaatgcatgcaacatctgtgcgtgcatgcgtgcagtacatgatacgagtactaattactaatattgatcttgtgatgttgtcgcaccggtgcagatgaacgatgggtgccaatggcggaaatacgggcagaaggtcgccaagggcaacccgtgcccgcgagcttactaccggtgcaccgtcgcgccgggctgcccggtgcggaagcaggtgacgatcgaaactgacaagaattcagattgattagcattggttgcatgcatgatcatgtgtgttcgtgcatggattgatcgatctcgtttgattgtgtgcaggtgcagagatgcctcgaggacatgtcgatcctggtgacgacgtacgagggcacgcacaaccacccgctccccgtcggcgccaccgccatggcgtccaccacctccgccgcggccaccttcatgcttctctccagcaccacctcctcctcctccgtctccgacgcctccgccgcgccgtcgtcgtcctacctcagcccgtacctgctcaactccgcctcgccgttgctaatgccgggcgccaccggcggcggcggcggcatgcagcatctcaacctgttcgggaattcgccgtcgtcgtcgtctctgctagctccgcaagcgccaggctccagcaagtacccgtggtctccgaaccaccctccgctcgccggcgccggaggtaataagagaccgttctggagcgccggcggcgacggggacaagccggcgccggcggcattggccgagaacgtcggcgcggtgatgtcggacccgaacaagttctcggcggcgatcgccgcggcgatcaacaacttcatggggaaagacggcgagagtagcagcggcaagagtagtagtaagtggggcgtggttgaatcacttccaccccatgagtagtagtgagaattatattactagttactagctaatcaaatgtgacaagattgattcaatgattgggaaatcagttaggattattgcgtgtaaacaaatcaaactaggggaaatcacacattggaaacatttttttcggggagatttcgttgtaatttttcagtttttttttgtttggaacagatcgaattgttgttaaccgtaaattacagtatctgttcatcgtctttattaattaacaaggttgtacgatcatattcagatcatacaaagtagtatcctatattagtagggccgtgggggttcagttctgtgtgctataacagttttttatttactacatttataagcatttttatggttattttaccatacttaaggagttatcgggagttaccatattttctatattgaaaatattttctagtataaaatttgatgcatatggtggtattagttatcaaaatttttagtgtaaaatgtaggtacctgctctattaagaaccataaaatttctcattttcttatgggcagtcgatttcacacttgcccttggtttattcaagaatgtttgccggcattttaaattttggagaaaaaaaactaaccggtggatatatcagtgcatttaatagtggtttcaatttggtccctatgtctaaattgatcggttgttttgctctctccttttatttatttttatttttttaacacgcaaaacaattgcacatcaatgtattagaataaaaaaatgttacacaacgtaagtggctagacatgtaattaatgaaaaagagttttcattatttggtctattaattatacacatgatctggttgtaactatatatattgtgacaattattttttctgtttgagaaaacaaatgtccacagaggttcgcttaaatagtaagggttacatcatgacaggatcgcatcatttatgaaacactgtatgggctactgtgccagggtcacacctgtagctgatcaagcattatcagttggcttccagaacaacaatactgaattaggcctaataacaaaaccacactttgaaatcttgtggctagtactatatatatatatatatatatatatatatatatatatatatatatataaatatatagcttgatgactacttcatccgtttcataatgtaagactttctagtattacccacatttatttagatgttaatagatgtagacatatgtatgcgtttaaatttattaacatatatatatatatatatatatatatatatatatatatatgtggataatgctaaaaagtcttacattctgaaatgaagggagtattaattaagacagatcatacgaattcagcaagtattgttttgtgctgtactgctagcagtgcaagagttgttccgcgaataactcatttttccttttgatttttcggtttgagaacgtcgtctagcaccattcaaattaaggaagcctgcagtgcactgtgcactctgcatggtctcctgactaattagcaatctggcgccgtcagctcagctttctcttgtaaaacatactccctccgtaaaaaaaaaaagacaaaccctgggttttcgtattcaatgtttaaccgtctatcttatttgaaaaaattatgaaaaaaattaaaaagacaagtcacgcataaagtattaatcatgttttatcatctaacaacaatgaaaataataattataaaaaaatttcatataagacggacggtcaaacgtttgacataaaaatctagtgtttgtctttttttttttaaggcagagggagtacgtagagattggcgcggccggggatgcaatatgcaagtcaaggccgttgcagcgaaccagcttgttggtagcggccatcaggatgcaggccggatcgatgcctgcaaactattgttgcgcatgaagcgactgttgtagcacattagaagccagtatggtggacaggatcttccggcaggcctctgtaaggccccagaggaatttcacagagagaacgctaagccgctaactcttcagttcagtaagatatcttatatatggggtatatagggcaaagttgtctcggtacccaaaaagaaaggggaaatgttatcactaaacaaggaagaacagagatcgcatattacattcgtatagaggaaaacaatcactgtacgctccggacaagcttctccagactctagagtggtgtactacgttccaacttccaaccccttgtttccattgatcattctaacacctctggtcacatggttctgaccatttctggaacatgcctatgctctcttgcagtagtgtccttcgcgtaactaagcctattttccgttaagctcagtcattgcttgtacttacacgagtgttaaatcccctcctggcatgtactttcatcagcactaaagtctgaaatttcttgtagtattagggtgtgtttgagaagaaggggattggggagattgggaagatacgcaaaacgatgtgggccattagcatatgattaattgagtattaactattttaaattgcaaaaatggattaatatgattttttagagcaactttcctatagaaattttttgcaaaaaacgcaccgtttagtagtttgggaagcgtgcgcacgaaaaacgatgagctttctcacccaatgtcactagaacgaacacagccttagtacaaaaccccaaaatccacactgaacttctctgaacttttatcacagggccattagcctgaagcctcgagcaggaggtaggagagagagagaggctggggaccaatacgccagcaaaagccacagtcccacggatcatgtgatcagccaccgcccacgccccaccaccaccaccaaagccaccaaactcttctctgaagaaatttcagtactcagtgttgaagcctgaaccacccatccagaatcgcaggagcagcgagcgatctcggtttgatctcgtgcgagccgcgcttctcggtccatccgaaaaacgccaagcccaatccaattatccaaccctatcccagatcagaatatatcggatatggttgatttaatcccaactcattactgctatttcttcgcttgtttctcatgcgtgtttacaagaatcttccaacctaatccccccgtcttccaccacaatcacgcagtgacagcgaggaaattatagttgcctggtcaagtaaaactctgcttagtgagacattcctacttttccaagttataaaacaaacattctgaattttatccatggggttaatttcagctgttccaattgtaatctcactagctttattaatgaattttagctgttccaattatgaactcactaactttacatagaggttgatgaccaccggcgggaaggaatctgttcccgtttaatacgggttaacacgccgaaatttactcgaccctacgataaaagtacaaacgataagaggaatattcctttttatattttattttctctctctctctctcaacgtgctacagttcaacggtgtacggcaaatcgcaacacgtcccgtagaaggcaccccccgtctccgccggtttcgtcaccccagcttttgcgtggacgcggtccatggactgcaccgcgaccccggcttccgtcccggctcccgcccgcccgaggagggagccggtgcatggaccgggtccacgcaggggtgaacaggcggcgaaactgtaattgcaacgcgaactcgcaccaaaaaacgtggggcccacccgcccaaaatctttgcgtctcctcccctttctaatccactttttattttttgcgccattttttctttttctttttcgttttgttttttttttcgttaatttggcttaactaggggtgtccttgtctttcgccattttctctctcgctcggtttgctgctctcctcctcctcgtcgtcgtctccaactccgtcgcggcctcgcgctcaccgccgccggaatccggctgacctcctccgctcccgcatcgggcgctcgccccccgggtctaggtacttgcccttgcccccctgcccatgcccttcgtcccgattcgaacatgtcagatttggttggttgggtatcttggtggtgggttggttcgccaggcgccgaggcccaagttctttgtcctggaatggtggctagggagctttgtttcggggttctatctctgtgatttgggtgcggatgggaggaattcttcttggtttgggggaatttggggggttccggtgctgatttgagtgttttctggctggttcttggcgctccttcgggagaattttgtggagctctctgatgggagtggtctaggtcgggatctcagactggatggcctaatttgatcttatcaaggtgaattatgccttctcagtgaggatttaggtgactgtggttacaattgctggggtatttgacctaaaaacgaagatgggcgagcaaaaggggcctcctattgtcaaaattttagtcattgaaccagtagcacgagagcggtgttctcggtgtattctttgcgtgtagattggaggattggccgcaatggcgtagcaaaataccctttaatgtatcttttgagcttctgttgatgcttttaagctttttgattgttgtagtagtgattaacaattttgtaggaaatgatctactgcgagaaggtactgtagtaaggaaatttaattggcagtaaagcttcattttctgaactgtccttgtgcccattgataatgccattaacgtagaaaaaatagcatttcggatagcattttagttaaatcgtgagcacttatctagtcttgggccgtggccctttcatttctttgcttaaagttaacgaagaaagatgcttctcgggtaatatttaataatgcactattcagtggataaggtgcactttttagatggagaagaaagtgtttttgtcactgatttgagttgaaaatggtgaattttgaaccaatttgtggcataagaaaacccttttgccaacctccatccatgtgttagcaatcatggtaggaggatcaagattgaagtaaaacttaaagaagccctttgcttcaaatacctttcttgtgctggttacttagcatgttcttaaaggatggaatccttggcccaattgcagtatcaattgattctctctaattaaaaagttatgtgttgttccttgtttctctttaattctggtagatctgggaggggtcctgacatgctccatgtgggccactggttttccctttatctcttatctggctcttaggtgtgacttttttaatgggtattgtagatcacatctaatgtgcttcattgatttgattatttaaaagcctttggttgttgctattcgtttgtttatgttcctacccttctgtggttggatcccataaagtctacctgtgacttctgctgccttggttgcttgttagtcattgttgtggatcttaagtttgctgacttggtttaaggaggaaggctgctgcaagagtaaagctgcaattggttggtaatgttgctcatgagtttttcttgtataattgcaacaaccaaggaggatctttttgtttgttttccattttgacattgtacaatgccagtttgctacttcttgcttcttttttataagtttgcagccttagtttagtaagtttgcttggtttcatatgcttgatttgactcacaaaaatgataactgtgtggatgcctcttttccttgtttgattatgtgattatatcagggtctacattcactgcctctgtggcggggttcatccctatcatcatgttaaatattaaactttcctccttatgccaattcaatggagcagcaaatggtgattccaatgccaacagaaattgctgcctttggaagttggacagttgtgatttgtgttttttgtttcatgattttagttgcgcccttcaactatccatccataaagctgtgttcatttttacgttgccttgtgtgttctgtttgacaaatgatgaaaatgaccagataaggaatcaggaaatgttttgacttggccaaggaagatccatctgtgcagctcctactgacccccacccccaccccccaaaaaaaagtcctcaacacattcttgacaaagttgattaatctttttcccttttgttttgctaaattgtaatataaagaattaaccttgtacatattttctctctttaatgaaattacactactaggcaaagcccttgtagttttcccagtcaaaaaaaaattgtaatctaaagaaggttaatttctgtgtttatcttgtattttaatatccttgcagatccctggcctgtttttgtttataagaaaacaactgtatcaacaattcatgcaaatcacgttatggtttctttctggacaggtttccgaagaaatggcaagaagtgcaagggcaaggaggcatgtggctcgtcagcttagatccgcaccgtatcccatcccttcgtaccgctggaaagcaatgaaagaatcaaaccgaaagaaaactctgccagctgcacagaagatggactgggaagatgccaactgctctgtgtgcatggaatacccgcataatgctgttctcctcctttgttcttcgcatgataaaggttgtcgcccttacatgtgtggaactagccaccgccactcaaattgccttgatcaattcaagaaggcttacaccaagggtgcattgctagaggaacttcctgccaacactgttggcacgaacttggactcgacgccattgattgcaggtgaaaaaaatgagtctgttgatcttgcatgtccactgtgtcgtggcaaggtgaagggatggactatagtagaaccagctcgaagttatctcaatgggaaaaggaggacatgcatgcaggatggttgctcatttgtaggaacctacaaggaactccgcaagcatgtgaagtcagagcaccctcttgcaaagccaagggaagtcgatcccatccttgaacagaagtggagattgctagagattgaaagagagaggcaagatgcactcagtacgataacagcaactatggggagggcgattgttttcggtgattatgtgctagacttggaagatgaagatgatttagatgatgtagaaagtgatgaggatgacaatgccaacggacacgggacagataacactagacgaatgttaatgtttctaatgcgccaagttgctcggcatcatcaaaaccaaaggcttcagaatgcaattggtacaactggcggtgccgaggacaattatgcggtgagcagtggtgcaaatgcaaccacgccttaccattaccccttggaaggcgacgatgaggatgatttggttatggccggaggcggaagcaccggtatggttagaccagagaggcggcgtcggcgccgccgtagaaaccgcgagaggttgttcttaggtgctaattgagacaacaggggctttaccactggaggagtacattgcacaattggttctctggtgcatagcattcatcaatttcaacctcaatttacttgttcatgatcatgtaccaaagtagttgtcttaaccttttagctcattgtttcacttcaatgtatgccatctcacattcattgttgaaaaggaaaataccgcacccatcttgtgcggtttgtgtagcctttatttccagtttttcagaagctctgctaaatattaatccagtggggatcgattttagatctcaccagcttcagatattcagttgtgcttagtgctgactaaacatagatttgaacatttgctaaaccggaggtgttgactgacgatattacaacataagaagcagtaagatcttacaatgacctgagctcatgtttcaaccaaacatagaaactgtagaatacattatcattgagttcgacacttcatcgttgaagtgccctacactttatgacatcaacatacatgctctaaatgatttcccgtaacataacattacaattttgttcataactacattctacagagcatatattaatataatcatttacttgtatatacttgcaagaagaaagatttgtatctcttcacgacggtcgatgagcatttccacagcagatcttctagtaaaccgtcgatcgaaggcatctgccaattcacaccatcttgcctgatctacattcccagatggcgaatgaatatcacaaacatcacaagcacatgcgagctcgtgcaatgcggtgccaagaatgctcacttctgtcaaacgccatacaccatcatgtcatcgattgctcaatgcccagaaccaggaggcgcattggacacccaaaatctcccacttgagcacagggcagttactttttcctaatgatggtaggcacaccgtagcaaacgggagatccaccgatcataagaggaagcctgcaagcacgcctagcttcacttaaatatgaagctactcgcctgttgccacaagtgcaacgcttactacagttattcattcgttcggacttcttccctcgtgtgcctcttcgcctcggcctgccattaccctccacagcaatggtcatggattcaaattctcgtgttagctggcaacacttcgagcaatttttggccgctacaaaattctcttgcaaccatgaaccgagcaatgctttgctgaatcgatcaatatccttatctgacacatcccagagatttgcgataacagctggagaaccagcagataaatatgataaaggggctccttgaggagcataacaccctttgcaacgcaatgttccactactgcaacccataagaagagcagctgcgcaattatctaatttctcaatttcctttccagagacatactgagttcctgcaacatttcaagaccagttagaaaataactgtttagttctaataaatgaaaatggctgttctctgtattagtcaaaggctaccagaacagtgcccagtaagaacaaagatactcatgatcactaggttagttcttattcctaacagtccaatcaataggtaataaatacaattgaaaacttgaaagcatccattggcactgggccccctagaagcagttgttcttgttccaattgacacataacccactctgctatcacatgtggccggtttgtgtagttgactcaagggcaccatctaatgaattagcggttcaagctttagttatttttatataaaagctgggtttgagtattcatctaaagaaatttcacccaggtggccataatagaccaatcaacaatttaggtcatgttatcacccgttgaaaatagcaatccttaatgtatcgctgttgcagcaatcagtaaaaagaaaacaggttcagcaaataacttaactatggtactccctccatcccaaaatataacttctagtgttcaaaattttatcccgaaatgcaaaaacttctccacctactttcttatctcaatcaatcacaaccatctttcatttaatttctctacatattttctcatcttaatcgatgacaaccatccctcatttaatttcacctcttcttaattcccgtgaaaaactctagaagtgcttatattttgaaatggatggagtattaccctactagacttaattctgaggaccgaaggcatcagggtttaacatgaatgggagaaaacgttaatatgtagatccagcaaaatgatgactacaatctttatatctatagggcttaccacttccatgaccaaaataaaggaaaagatcatgattcctcaaggccaacaccagctcttcagctgttggagcatacccagcctttccctgcatacaatcgttgcaacattcacaaatcacaaccgtttgttggtgcactatataggcatccaaattcatgctttaacatgcaacataaatgctccagcaagcctgcaaaagccctaagggttcatgtcctgttatctctatgacatatgttagacgctgtagttgattgatgcaatttattaaatttagttgcaaccaacagtagcaataagcagacaagctgagctagaggtatctagtgctagcctacaggtagacaagattttgcagccatttatatttctaaagtgaaaggagcagtaaatataaccacttttggtatggcaagcacatgtttacaagcacattgagatgccagaatataaccatttctcatctcccaacaagagcatttccacagttggtggaagcaattatttttcacaaatttagcactgagaaatggttgttagaacaaggactgttgttttatcatttctaaattgttgtcaaatcaatgttaccttccattcgtagttcttaaacatctgatcaaattcttcttgtgtactgctcaggtctccactaggattcaacagataaaatgcgttgaaagggtcaatgacaggaaaaggaggagctataacacgggcatctttccaataattattacttctagtcaaagctagaaagacacttccaattgatggcatgcgataaatttcttgattccttagtgcaggcaagttttcccaaggaagcatctgcatttaatcattttaaacaaaagaggttaatgaagatatcataaatgataggaacatacatcacagcctcacagagtcacagggactgctgattgaaattgaaaaaaaaagcagaggcaattatttttttagagtaaatttcagagaatgccatgttttatagttaaagctgcagaaaaccacacgtattatgactcacataaccacagttttttgtctaaaggtttcataaatccccaacttcattcaaatctctattaattttagcatatctgaaaaaatattattcaaattagtgaagagttaaaccaatcaccttaatcaagaagtcaataattaaaaaaaagcatagacactccatattttttaaaaaataagtaaatatatgctctgcatgtataggggtgggattttgtgaaactttaggaccataatatccagggctatggagctatgctagtaatagttcctaaggttttgtacaactccaaccataaagcatggcgttttctgaaatttattctttttttaatcaacaaaggatgcagtaaattcaacaactgtaagtgccaagctgttgcgacagttttaagatatttgtggttatgtttaatattcatattcatattaaatacaaccacagacctggaccaacacaggcttgagacaaatgatatcgaatccacagtatctattcctaccattagaccgaacagtcaaggaaaacatccataacactatctcaaggactcgaagaaatatctacgcacatgtactaacccacacagtaaacatagttcacaatctggccatcttattgctcacctgcacattagtgtccagaacaaaaatgactggatctctatcaactggttcaatcagctcattcactgtactttttattaagcattcgactgtctccagagcttcagactcaatacagcaagaagataaggctctaagtctgtctttcccacaacaccctcctcggccaaaatatcctttatacgatataagttgggaaacacagtcctgcacttcatccactgacatagcaccaccaaggatgaccttgatgagcactggatttacttcaaatttgaattctgattccagaccagcaatcaggtttgtcagagcttcctcaatgtgttggtcagttaaatcataccccaagagaaggcatttccatggccccagccatgattcctccatgtctctgttcaaaaaagaacataacataccagaaccaaaaagttattaaaaatatgatccatctcaacaacagaaaattcaaacatttttttaggaatacatcttgtggaatcaattttcaagttttgccataacataagaaatcttacttcagcatcttatcaaggtggttgttgagcttcattctatgtgaccaccactttacatggtttgcttgtccatcattcagagtgagggttgcactagagagggaaataaagttctcctcaagtatctttctaaaagtaggagccacgtagtctattatagtgtagccccaagggcactgccaattcttatctgtggctctcattagattgtccagttctttggtacaggaatcttcatgttgggtttctgccaagcaacagccatgtgagaaaaaaaaaacacaaaagaaatactaagagtaagctatgcaattttaatatggaatcaacaaacctttagaaatagcatccactggcaaaagcattgtaataggtttgtttgttgaatcaaacctcgaaagcatcatccaagcaggaaaataagaagggagaagaagaatttccccaagaacattcacaaaatcaccttcaagcatgctaatgcacacaattggtacatcaggaagcttatggaagaattcttttatatgtatctcaagatgtcctatgtctgctgatgaaaacctgagagaaatttaaatatgaccatggaggacaaatccggtaaaaatgagctaagtgttaaactcttgaaaatcatacctaaaagttttgtaaattcatgaaaaattactagagataggtgtagatatgaaatacattctcaccaaatctcaagttcaaactcaactttatttgggagtaaaaaaagaacaaatttcgggtgaatagtaacaggacactattcaactgaaatttgttatttttgtttctctcgaatgaagttgagtttggacttgaatttggtgagtgt

SEQ ID NO: 5423 - DNA, 49506 bp, Oryza sativa
  unsure (1)..(49506): unsure at all n locations
cgcgccaccgggcccccaaccatagcccgccccccgccgccgccgcgccggcctcctccagcagccgcgagcgcgagcgcaagcgcagacagcgcggcgcgttcgcggaccccgccgcggtgaccgcgcccgccgccggggggcagcacgggggcgccgtccagaagctctggggcgacgccgacgaggtcgcgctcctcgccggcgccgccgccttccgcgcgcgcgccggccacgtcccgcgcctcccggacatgggcgcgctcttcgactccatcaggggctccctctccccgcacatcgaccaggccaaggtgtactacaagctgaagcggctcaagggcaagtacctgcacgcggcgcccggcgcgtccgcgggaccgcacgaacgccgcgtgcgcgacctctgcgcgagcgtctggggcgccgacctcgagccccttgctgagggcgacgacgaaagggccgccgccgccgccgccgccgccgccgccgaccagccgcgcactgtcccggacgccgccgccatgctgcctgtgctgactgagatgcttgatgagtactggaagacggatgggcgagcgctgtccagtgtgtccctggcgaaggggttgtcactgctagggacagaggaagcaagattcatcgagggcaagtggaggaggcagcttgattcagagatacaaacgcagatgcggcgacatgatctggccaaggaggtctacgccttgctcatggacgccatcaaggccctcgggccttagctcgggtatgactgtcatctacacgagtaatttatccaaactctgccatttccttccctagtccaacttctcgctggagaattcgttaacgcattgctcgttcgttcaattacagtagaacttatacaatctattactcggcaattgattgttcttgctgactgttggggtattttaccaaaaaggataacacgattgtgtggtctgtcgtctgttcacaaagtagcaaagaagctatttttctccatcagcacaccacagatcgaagtattaagcaattatgcttcccatagcatgatggaagtaacagtcttataatcaggaagcaagcaatatcagcttgattttggtttctgtggtcaaaaaagcctagagaatttcatgtttcatacttgctttacatattctttgcatcaaccttgagcaaagccagaaatcaaccatgccaatcctaaatggctgcaacaccccagtttttatgcactactagtatgtatattgtgtctctgactggatagtttggattttggagatggaatagtagcgtgaaaggagaatttggagatgacacacaataaattatgcataacttcatacacatctaataaccaaatacagcacatgctataagccatatgatgatgatgatctcaattaagttgtcaaaaccaacaaccaagccaacagagtatctttgctaatacttttttccttgaggtgtatcagaaaatgaatttgtgagaggtcacaaacccaggtttttaagctacttcaaataaaactgtttgaatttagaaaaaacttctccaataaagtatgtgattgccaaatcaagtccatggcatagagaattctgccatgtattttcttatgttggtctcttggctttggcaggagtaaacacataagccgtacagttgtccaaaaaaaaaagggtaaaaagagagaagaagaaatgaccccactaagatatggactagcaataattgaccccacagggccacaggatatattttctggctctgctacttggctatctcatgggcacctgaaagaccagatatagatatgtgcacctgaaattttgaattctgcttggttagggaaacaaaattatcagagagatacatctacgaaatattagacacgagctattacatatgagattgatgactaagagataacatatttgaagtaacctatagtgatcgagaattagatgaggaaggtcatatactaattagtggagtagtacataacagggtgttgaaaggaacatttaagtactgagcaccaaggtcctttaataggcatgctgcatgcagctgaatgcttcgtttgacacctatagcaaagttgattattatttcgtctcttcagagcgttagagcactacctcagttttctttttaatggaagaaccggctattgatttttgccagcctcattgccaaactttattaacgatctgatcagctttgtttaacatcatggagacgtgatgcattatatctatatgactatatctacatatatcttcattcataggatgtactgtgtttcccttttttgctgaatttttgttcttatttgatagaattatagaatgtttgatgtttaggcatatctgttgggtatcttttatatagcgaagtacctggtgcttgctgggtataagggtattactgcggtagtcaaatttgttgagctcagcagctcaatgcagcttttctatgtttggtgcactaccgttgaaaagaatcttatcaaacttcattgctctcaggatctcaatttaccttatttgcagtcagtcacattgttcacaaactgaactgacacttaccttgcagtcagtcacattgttcacaaactgaactgacacttaccaacgtccgttttgcaggtacaagatggtggtttagatagagctgggtctgggtacatatatctgcaatgccttttgtattggctggtcgaagcattgtactcggttgatgattgacgaggccagggtacatatatctgcaatgccttttgtattggctggtcgaagcattgtactcggttgatgattgacgaggccagggtacatatatctgcaatgccttttgtattggctggtcgaagcattgtactcggttgatgattgacgaggccaagaatcaagtggaactcattttcgactgtatcaaataatttaggttcataacggttgctttggccgttctcccgtcagatttagatgtgaaaatgatttagtggcttaacctgtttgtaaatcgtatgctaacttctgtatctgtcatattagtgcattttcaagtgtaaggggtcagcatttcgatatttactacatggtgtggtaaaaaacaattaggccatcttggttaatgattacaatgttgaaactatatttgcttatcattcaacttctaaactgattgttcactttgtaaagcttgttccaaacacaatcgctgctcaagaacacccaattcccttagaaaaactagctcagaaagccttattcactccacaagctgttcctgttgcacacaggtcaccaaagagttcgcaagaagcagcatgcttatagcttatgaaaacaacatgcttaggtaaatgaccaaaagaatctgatggcttctcatggacaagattaggctagtgagagctctccagcagggatattccttttcaccaatttctcccatgattcgttggtttcttctatgaccttcagagcatattcctaggagagagaattatacaatcagaatgcaaaaatatcctctatgtttaaatataactgaaggagtccaggcttaccttgcttgtgggtttgttgcccagaccaaatctgtttgcaggcttaccgtctggtatcttgtagtccctgaaccagtctctgatggcagtcaatgttccctgaataggtaatgtaaaatgtcggacaaagcaattgtaaaatatagagggggtgaaaactaactgcattagcaacatttttaaccctgcccatgtaacatattttaaatgcaaaactaatcaaaacttccaagcgaaaaaacctaataacctcagcaaaaaaaaagcttcagggtaatgcagtagtcatttagaaaaggatgtgcgcaactaggaatctaggataataattatggcaagagtaacacatctgtctttttctcatgttatgaataaaaggtaagtttgctaaaatatgttttgcttttaaaaaatgcttagccaaggtcagaattcaaaacagaaaacatttgtcataatctaagggaaaaaaagcctacattctatcaacgagataggcaatgccaatcagtggagaacaaggacaaacactaaaaataaaggcaggcatcagtcataccggaaaatgcttctcaacatcatccacatcattcacaagagatgctttaggatcatccaaagaaatagccacaattttccagtcaagctcaccctcatcaatcattgctaaagctgccaacggttttaccttaagaacatctccaatgttagcacgtctttcaccaatctcaacaacatcaactggaaagaaggccatcagcaagattggtcagagtggctgaagatgatatatgagccatatctaccaaatacaatgacaccgaaatgtttattaccaggatcattatccccaaatgctccttcgacatcggtgtttgcaagagttgggtcctcccatgtttggggaaataatccataattccaattaatgttgtacctgatataccagataattccatgatgggtcatgcacaaagttcataaacagggtcagcaaggacaagatgcacaatgttcatcaacaaggccagtaacagcataaaatcaattgcttgccaacaagcaagtttcacactgcaaggttgataccagctataaggcggaaaaggaacctgtccacaaaatatgtacactaatccttttcaaaaggactgaaatggaagtaacagaacagcctagcattgttttgattaagaaaaattatacagaaccatgactgcaaggttgaacttgaaagcagacgaaattcaaaccttcttgtagcacagttttgatgacaagagcaggtcagctaaatctattatatgataaagagaaggctaacaagagtcaccgcattcgctccaaggtcctagaaaattaccatattaactgaataaaaagagtaagatctacgcagttgtttatcatggtttgtccaaattataaagtgtagattgattgatatagttgtatacaaaataaaattgaatgtatagaaacagaaacaacagttatacataaaatccaactctgctttcgaataaactttagcctagctctgtgcaaaactgtgtggaaatccagctagttcaattaacatcacatctttgtaaagatctgctatatctaagatggccacattataccttgtgtgattccaccgccaaacatgggagaacaaaatgttcttttatggaatcccaaaagtgcacaaggtggtggcagctacagtctgatattgacaaaattcaagcagcccatctttttcacactgaagtaaggtcccacgaaagagcaccacataaaaaacacaatctcctacattatttccccagcccacaacaaatattgtaaagcatgaatttctggtatgaaaagagttgctattctatccttaaagaccaacctatcaacaattgatacaacaattgaaacagaccaattaaactctctaatacaacttcccccattcttaatgaaatttggtcgaccgaatctttcggccgacccggcaaaaaaaaaaaactcactaatacactaaaattattaataaaagaagatgcgacatcctaaacaaacaggataggattaaataaacaaaactcatgcaacaacattaaggatttctagaattctcaaacacgaacaagcatggacacaaaagaaaatgttacatttgcaaactaatcatggcatccacttgtggagtgaagatctcagaaggaattcccagttaaattaaacggccgttatatcctcgatttgcaagtcgctcgtccaattttaacacaaaagacgcaatattttcagcagaaacgaacataaacttagacattcagaatacgaatttcctcagtttctagtccttacgggtagtatcggaggttgcccttcttggtgtcctgcttgatgggggtgaatgactcgtcggtggcgacctccatcttggcgctgctctccttggggatctccacgacgaagtggaacaccccgtcgcctgcgcgcaggggcacgtcgtgccacggcgacaccttgcggcccccgccgtcgacgaggaacacgcggtagtcgagcgtctcgggcaggccctgctccttgggccggagctcggcggtcctgaggagcgcggtggtggcgagcacccggcgctggaaccgcacggccgtggggaggcgggccgtgcgccggagcccgacccccgccagccgcgtgaagcgggtggccgccgtagccgacgccgtcgccgccgtcgccatcgtcgagagctcgccgggggatcgtcggagttggtgcggagtgaacagcggcggcggcggcgggagactggaaagtgggagctagtctctccggatgacgaggcgatgggtacttgcggctcgcgtggtagctagcctgaccaggtgggcccacccccgtgatgtggtcgcagtcgcagacaagtgcggatagatcgcgagtggtgtttgggccgggccagatcacccggttctcttcgtgaaggataaggcccggaccatgtgtgaattactccggcccacctcttgacacgatcactaccaattctggcgatccaaatggggctcccggtggcgatgtacaccgttcgatcgaaaataaacgaccagatggagggtttccctcgggccattgtggagtttttgcagaaaagccctcgtatgatctcgtattaccgttgtgttggcggacggtacagatcggcttggaaggagaaaaagataactctttgcatattagtcctcgtactttgtagaatttaccgttccaactgggaatatgggagaaatttcagtatttatcatccaatacgatgacctttaaggagctgccactcaatacgttggcctttcaaaatttaccaccaggcacgcgaaattctttatttggagccactccgtccgcctgccccgccgtccatccgcgcgactgtctccgagctaggtggcgtcgtcgcccaggcacggtcatcgtcacctcgcatcccgcccccgccgccgtccccatccccaagctcgttcggcaccgtcgccaccgccgttcccaacctccatcgccaccattcccatccccaagctcgttcagcgctgttgctatgctcgcgccctatcgccgccgtccctgagctcgtctgccactgtcgtcgagctcgcattccgttccgccgttgccgccatgcctgagctcgcgtccggtcgccgccgtagtcacccccaagctcgcgttctgttgccgccgtcgtcgccccagagctcacgttccgctgtcgccgccgtcgcccccgagctttccgctgttgccgccatgcccaagctctcatccgatcattgtcgccgtcgcccctgagttcgtgttctgctgttgaaccgccatgtccgcaaactccgtccccgtctaccatctagacgtcgacaaaaccatgtgctctttcgtccctgtcgaaggtgcaatgtctctcgctggcaaccgcgacgggagtgagctcagggatgatggtcaagccttgagacgacggccgacgagctcggagacgaagacaaagacggacgacgcggacaagcagacggaatggcacgaaatgaagaatttcgcgtgtctggtggtagatcttgaaaggccaacgtattgggtggcaattctttaaaggttatcgtattggatggttaatactgaaatttctcgggaatatggggatcggagaagccgcaactcgcagccaaagccttgccggcgacggcgatgcaggagatgcaagcgccgccgccgccgccgattcttcttttggcgcctcaggtacccaaaaatataatcctgtttttttttctactgcttatccaaattgctcctctgttgcttaattacctacttgtattcgtgcaatcgtgcttgccttctctgggatctaaattattactagccctattctagttcttatgatgttttcgaggttggatttgaactgatttagaagaattattatagaatagaatgatgcctccatagaatgggtagatttccaaccatggtggaagatggaggaactaatgtacctcactcagatggcaaaacatcgtggatttgtggctacttgctaaagcagaagggcgttttggtgtcactgtcagtgtcaccagagccaattggaatggacccctagctggcaaggacgcatcgtgttcttcatgtgtccatcaatgtccggccaccgtaagatcggatcttgtgagttggtgattgcctttcgctgtttcgcaagcatgtagagagcttggatgtgcgccgcagagggaggcttgtctgaaacttgtgtagggcatggtcagcatgtaggtcttccctatgaagaagatggtaagcagctaggccagtctattccatgtcccaattactatgccaaacgacttccagatgatagaggggaagcacatgatgagaccttttctgtgtctgtttgacatggcatgattggtttcttgggaaatgcttgatatggttaccagcaatcatttatcatcctattttcagctgaacagttagcaacaaaaccaactttttaagcgcagtaggtggactggcaaaatcagtctttagtttgatatgtgcttgatcagaacatgtgaacgacttattaagtacttttcttaggctgcgttcgtttggagaataaagggagtgagtttgtttcatattccgcgcgcacacttcccgaactactaaaccttttgttttttgtaaaaattttctataggaaagttgctttaaaaaatcatattaatctattttttaagtttaaaatagttaataatcaattaatcacacgctaagggctcacctcgttttgcgtatcttcccaatcttctctatctcattctcctcaaacacagccttagagaggtttcagctggaacatgaatacatgatttgtgatttatttatttttattttttttggcagtttgattggtgtttccctaaagaagcttctgcattatactactgaatcgcttggaatatctttatgatttcaaataatgaggctccttgatctctccacctgaaattctgtagaactggatttccttgacgaaaaagggccccatctgctggcctcagtggcctggggacaaaacttgacgctgaaaatctttatgcctaaactgtaatattgattaatgaatattacagcccatagtcttttttttttcttttttgaagattgtcatagtctcaactaaaaatacaacaatgatattctgaacttattcacatgcaacttcgtaccatttttttgtaagtaatacagaactgatgcttaattatgatgatggcatcttatctagactgtactgtacaattacaatgatgaaacagacagataatagtagatgacatcatgggctaagtctcaatttatgattttttgagattctatactagtggatagcttcactcccataatattgttctagtactttgttcaaaaagatgaaatactataaatattaccttttttaatctttttgcagtatggtttccactatcaaccgactcttgaagaattttggcaaagtgcattagtctcggtgctggttgactctgaagtcaggaaattgtttttcggagcaatcagcgaagaaaatttggagtagtatttttcttaactctaatgcctaatcagtaagagaatataaattgcgacaacagagtatcaactataactaaataagccactaaattgaactattgcttttttttaaaaaaaaataaacagttgggatgtattagtaaatttcaaagtgtgcagccttctgaactgaaaatattagagagctgatttcaggtaaagaaccaaacctgatgtactttatcattcatttataaattacaataatgaattaagcagcgtatctgcttagataagctaattgtatgtccaacggataagatgcagcaaagaaggatgaatccttttctcctttccaacaaaaggggcattttcgtgaaggcaaagcaaacgcagatattctagaacgcatgatagaagtggccaagaactcgaaatgtgcaagaatgtacgcaatagcttaatctaatatagcatctcaaaagcctcaaatcattgctgcaaatgacatcaccttctgcatgtaagcattggatttcaattgaatatttgttggctctctgttaacctcatgtgacaaggttagcattaacccttttcttttgcaagaatgaaggttaacaacagcattacctccattaaacattctaatatacaatgccggccaacagaaaccatcccatgcatatttaacaattcatagtgtttctgttcttcagttgtggttgttaacttgttattgttgtttcagtggcgttcgcaaaaaaaaattgttgtttcagtgatgtccatgtattggaactgcagctgcataaagaagagagaagacactgtcgttctacagggagcatcacacaacgatggcaacttggctatatcagtagctgactaataaactactcagctctaatggcttcatcagcccactgctttggatgaaactagctgcatgcgcaccatggcactaacttggcttgggtatgtaattatttccctttcccttaatttctcctggatattgacctgaccttcagagagagagataaacatttcagtgcgtctgattcatggccgaatcagctcatcagaggtgcagcggaggtcgttgtggaatgtatgatgatgtgccacgcacggcaggaggatcggattgctgggaagatacgcccatgtccatattcatctccttttgcttttgtcaggcgccgcgtctcgccggctggccgccgcggccaaaaaaaggagagcatatgctcatcactggatcaaactatgtctaatgactccacaaagtggcagtgagtcagagctaggcagctccctagttcttgttgttcaagtgaagataatcttggttttgaatacctgtttggaagtcagttttgaggataaacttggaagattggagtcttttaccatcgactcacacaaattttaaattgcatcatccatttgtaccctttttcaattggaagatggtaacaaaaagatcaggggtcaagtttgtattatctatttgtacctttttttccaattcaagtttttacaatgtatttgggctgtctccctctatcagatcctcaagtgtggaaagtatatatattaacaagcagtccatcttatatagagtactggattatggaatttttttaaagcaattatctcattttcagacaatgaatatatgaatatatttctggggccaaactggtcttttacccaacagttattggaaccctgctcatcccaaccaggaacaaaagacattgtccagtgtatataccactggacatggcaactttcatgttgtaaatttttatagtagtgggtgtacaagttcatcttggcttgtgcctaccaggcagcagcaaccagtagcagctagcctaggttgcgatcgaattggatgacaggctgaaagacagagagaaccgaagccgcgagcgcaagagggattagatagaattctgacgcagagctcatcgatcgaccgatcagaaggttctttgtgcctagcttttcgtgcagatatgcagaaacacgtacgtagtggacgctggaggccactcactaatcgtgtgtcaacctaattaaacactcccgtccctttaaccacctcgtaatcttgtactgtaccacttacggattcctcattgagtcattggtttttattaccaaaccggatgctacgtaattaaccaggtgcttttgtgatgactagggtaagcaaccaaattactttccaggaaaggatacattcagttgcatgcagctgatgagagagagagagacaaagacgacaatattttataatatctattaagaaaattatgagtgaaattgtttacatactacctctgtttttaatagataacgatctttttgtcacacgtttaaccattcgttttattaaaaaaattatgtaattataatttattttgttatgagttgtttttatcactcagagtattttaatcatgatttatttattatatatttgtataaaattttttaataagataaatggttaaacatgtgttaaaaattaatggcgtcatctaattaaaaaacagagaaaatatattattctaacgacttaaaagccgatgtaaaaaataaactacgataaaaaaataaaattagctctatattttaatatttaatatttcaactttggttgcagtcgatatgctgctgtaaacacggtagagctcaaaacactagtaagaaaagtataactttcggactctacgagatcaacagatgaagttaaaggcttaaagcctagcggtactattttccgtgggtcgcgaggtgagaagagaggcgatggatgcatgcacgcacgcacgcacggatggatggatgcaaatcctgtttggagcgcaccatgccggcatggaagcacttggcacatcagcaagcactagctgctatgctagcttgcatgggccggccggagagacgccctgattgcttccattaggtttggtgcccctctcatgcgctgagatcatcacactcgcgatccaatgcaaatctcagagccctgattgcttgttgcttgatcgatcgtatctttgggttaaaatgagggagaagagaaagggggttagaggggagctgtgcatgaatgatgtatgcaccatggatagttactcgctcctatgtgtcggaactacatatcttcaaaaaaaaatacgtgcctttttatttatggttttgatagggttcacttgttgaaacagggtgcaggtctatcgtggtttcctaagtgatgtgtcttgcactcttttaattaaaaagaatgaccgagcgaggagtgaagatagctcgatcgattagggtctatatagtggaacctatccacgtgaattcaaatctcaaacttaaacttgcatacaatgctcgtattttttataattaatctaatctcgtaaagtatgcatggctacatacacacatgattatgttcagtggtaaagtggtgttcttgcgttatgagaggcaaggcctctaatcttgtttagatgtgggagagtgtggttggtgtccgtgagtatgttgtgcgcatatggttacgcttgagaaaaatgaccaagatataagtagtctaatggctaagatcattaatttgatgtaatatgacaagcaaaacatcatgctatatgctcacaaaatagaaaacataagtctttcatgtggcgagtctcctgcatctaacgactctcgaggatctcttcatgcaccatctctactatcccctttctcctttgcggcattctcaatggcgtcgagaggcaagcaaatatgttagaaaggtatatgtctcttgtccttatggagtaactatgattttagggttttttaaaacaaagtggatgaggtttaaatctattagacaatttaggtgtctttcgtctacggtttagatacgtttagagtatcttggtttttgttatctctctttgttgatgccttatttgtttgtgtgaaccttgatgaaaatctaggtgtctgctggtgatccaactagcgacacttgattcaaggttcgagttgtagactcctttggtgatactggtttattgacctgtcaaaagaatgaagatggcgaccaatgctcgttcatatgcttttgcacgtaccggggttggtcaacgttatggatgtgctcgtctacttacatgtcttttggcaatctaagatgctctatttgctaggttttatattttctgatgttgtaaaacacggttgtaatcttttctcttatttgatatatttggcatggtttctactactataaaacgtagtcgccctccttcctccccttacgttgcacacacgaccgccctacccttaaaactaggaaaaaaatggttggttaaaaagaaaatcagagaaaaatggttggttaaaacaaatggttggataccatgagcatgcgtaatccatccctgcatgagcccattgcaatgtacggatagtcgggcatagcatagaataaaaatccatgttgtatacccctcaagtcgttttgactttggttaaagtcaactacttcaagtttgatcaattttgtagaaaaaagtagtaacatttttaacccaagacaaatatattataaaaatatattcaattattgtagcgcccgttccgtcgtggcacatagcgggaaaactatctcttaaaaaccctatttgcgaaatctgtttctttgcttgctgtctagtgtccgtgccatctcagatctcaaatccccgatctatcgtcgagttcaatcccgaatccaaatccttcccaaatcaatccctccgcaaaagtctgtttcgcctccctcaggttcgatgggccgaatctctctcggcccatctccccctccctccccggctatctctctctctctctcgctctcgctatctctctctccctcttctccgctctgcccgcgcgccgcgcgcgcgtgcgcgtgagccgcgccgagccgagccctccctctccgctcccacgctgccacttcccgcgcgccgttgttcgcgtgcgcgcgcccgcgcggtcgccgcccgtgccgcgcctgcgccgtctgcgtcatccagccccgcgtgcccgagcagcgccgctcaaatcaccgcgccgcccgttgcttcccgcgcgcacgtgccgtggtggccgaccgcctggtcgccgccgccgtcagcctctgccgcgcctgtccgcgcctgccacccgtgtcgtcgccccgctccaaaccgccccgccgtcatcgccgtcatcatcgcccggcccccgccactccgcgcgcaagctgccaagggacggaggcagagcccctcctccctctgccgcgtcgcccccgctcccctcctccttttcccaaagaggcaagggggcaagccccctttctctccctccttttcccctttttcctcccgccggcgtcatcctccgcctctgtcgccgttttggccgcgagcgccgagcgccagctcgcgccttgaccgctcaaggtcggtttccaaaccgacatcgtcgtcctataaaccaaggcgccctcccatcgattcctcctcccgtttcgctcgccgccaccacgccattgccgcccctttgtctcgcctccgccgttcatcgccaagcaccgggagagccggtgcgttcgtggacgcggaaggggactccgggcgctcgtcttcttcctcttccccggcccgaggccggagagatcactcccgcgccgtcggcctctcgtcactgcgcccgcccgcacggtagtgcctccctccgttcttcctcctcgttccatctcctccccttagactcgggtagtagcacgagtagcctccccgtagttagccggcgccgccccgaccgttgccgtcgctcgccgtgtgctcgccgccgtcgccgcccgagctcggaagcgcctctcgtcgccggcctccctcgatgcgtttcctcctaatccggcgcaagggacggattcccgtagccgcgtggatgctctcgccgccgggaatcggcccctcgtgacctcatcgccgttttccccttttctctccgccggttgccgccgccgcaattcgccgccgacaagctccctccggcgaatccgagccgttggctcgtctcccctcgtcctgtgcagccacccggtgtgctcgctttcgccggtatcgccgtggttcgctccgccgctcaccgctgtcgtccgccgtccgttccggctggcatcgtcgtctacctcccgccggcccgcgtggcagccacgtaggcgccacgtcggcgctagctcggccaagaccgggtcgagccgaccccgatcaggcccttcccgtgcgcgcggtccaccgcgagccgtgaggctgcacgtgggcccgccacatccgcgtcctccgcgaaccgcgcgcgtgcaccgcgtccctcccccaaaccctagcacgcgccgcgtgcgtgttccgcacggtgaaccgtgtcaccgacaagcgggtcccactcgggaccacgcgaggtgagcccggtccaccggctccctctctcctcccctcccgcgcgcgcgctctgagccgccttcttgggccggccggcccattaagctcggccgagccgccctttctctcgggccgcgccctagccgcccgagagaagtctaatttccctccccctttcccttttcttttcttttctttttcaaaaaggatttaattaaatcctttttcctttagaccaaaaatccaaaaatcttagaaattcgatatcttcccaaccgtaaatccgtttgactccgttcaacttccaaaattcctcaaatctcgagatctatctaatggcacgcttagaggtcattaatagggctttattttcgccgtttgttgagtcgtcccgttttgcgtgtagtttcggagcccgaagacccgcagtgcgaggatttcgaggatcaagctcaagatctcgagcaaggcaagccacctttgaacatattgagcctatatttgaacttaattatattgctcgcaaaatattatgcattgataggattgcacttaatctgtttgcaccgtctgcaaggcagaccggtgggcctacccaacttgttgcatctgatccttccattgttaattgttatatcatgttcccttgtaaccatctagctgcgcctcgatattcgtgcactctgtgcgagtatcgacggtcgccttcaaacttaaaatctgagtaacttcttgggtaaaacttgggttttacagaagacttggaaaacccgacacctgggtcggtgcttgcgaactaaatgaatttctaaaaccgcggaccggggaacgtaccgggtgtacggtttcccgctcttgcacttaaggaccgtttccttggaatttcatccgaacataagacaagtacgaccacatgggtggaatgggacacccctgactgagtaactagcttatcaggggagccttgatgccgagagacatgtggattcgccggggtggtgtcggggaggacccctgggcttcctggcacagtatggtctgggacctaacctgttgttggtctgggacccctctcgtcggcatatggtaaacctgtgtcagctttcgaaatgccttgtcatgaaagcttggaggtctctcgacgtggctgatccccacgggctgggtgatccgggttagtaatgtcgtgtgggtaaagtgtaccccctctgcagaggttaacaaactgttcgaacagccgtgcccacggtcatgggcggatgtgaggtgattcctagcgtagttttgtttgactactgccttgtgaaattgctgttgtggaaatgggatcgatgtttggaaaatctgcagctgatgggatcagctaggcccgggtggccgtttgaaagttgttggcccgggtggccgtttgaaagttgttggccgggtgccaaccttgaatcaattcaaaagactgatactttgcacatactccgaccggacgagacgcactgtctcatccgtgtcgtttgagaagcactcacttagttgatttcagaaaagagttcaaataaaatcaattgcaaaaacaacagcctttccttgaagcctgcattaaacacttatttcccatggcttgctgagtactcctgtactcacccttgctctatataaatatctcccccccagttgctgaagaagatgaagcggatcccgctgacgaggagttcttccaggagcaagccggctacgatgagttttagagtttcggcctagttcccaagtcacgcctgtgatgtttggtccaagtcttggcttccacttcccttttgcaatgcagttgtgagctcgggatctgtccgcagcccaacatgactgtactcctactctataataaagagacctctgttgctgtgatattctgtcttcctgtgataccagcactgtttcctgggactggtatcgattaacaggttaatttggagcgtcacgggctagttccggtcgggactagttcggggcgtgacaattattgatttaatgagactaatttggtgttgtaaatattactatatttatctataaacttaatcaatcttaaagtagtttgaccttgaccaaattcaaaatgagtaattataatatgaaacagaggaagtagtaagtaagacctgatacataaaggccaagctgagcataagtgtatggttaaaccaaaatttgtggcttaaattatcatgaatatattgtccattctccttgtaatgttacacggttacacccatatataaatatatatgcctttatattacactgtcgcacatctcccagaagtgatagcatagtgtaactctttatataaacgaaatgaagataacaattatatatggtttttctgagaatcttcagttaattaattagcactccaagttaaactgaagataagagtagctagcagcaaccaactagctagtcagcattgatgccacatcttatcagtcgaataacccattgacagtattctccctactggtctctagtctctacacatccatgtacaatgcatgcatgcatgcacatcgattgttgtcggtacacaagcactagctctgctagacaggggttaacacaagtagtaaaagcctaggagctgcagatcagagaagttccagctgactcccacaaaccttgacttggacggctctgatcatgcatcctcttctcctcaggtagccaaaaagagacatgacaaagttgcaaaacccatcggcagtatgtgctcactgcattttcccggcaaagcagagagaaaattaaaaagacgacgcagacatatagccctttctttctctctctcctttagccggaagtggaatattaaacaagctggaaacatacaagccagcactgctcgcaacaacaacattcagaagagagagaagtatagagagagagaggggagcatgagtcagatccatgatccatcaatggcaccacacagtccacacttgggcatctgggcgagacgagacgactaatccaacttcgatagcaacggttgctgctagctgctgtgctgaacagtgcagcgtcgtgcagctatatgcctatatatatccctcaaaactcattgcctctcctcatcacagccacaacacctagctagctgcagcttgtgtgcgagctactcctgcagctagctactagctacagccaaagattaccagcaacagaaattaactgtgtgagacgtcgatcagatcgttcgagagaatgggtgtaggaagggttatgaacgatgcgaagccgtacctggcgatgatactgctgcaggtggggttcgccgggatgtacgtggtggccgtcgcctcgctcaagcgcggcatgagccacttcgtcctcgtcgtctaccgtaacctcttcgccaccgccgtcatggcgcccttcgccctctggttcgagaggtaattaattaactagtactagagcgctgttagctaattagttagctcatcaactaatataatctctttctctaagtcaagctagatttaattaattaaacttcctttcatcgttaattagaacgcatgcatgcaaaagcatagaccatgcattgtttgtggtttgtacaacacacgcatgagcttacatgtttgcctgaagtctgaactctgaacaagcatgaataatgaaaatagctagtcttgcgtgtttttctattttcacaagagatgggagtagtccatttctagctatagctagcactgctgttcgttcgttcgttcgttcataagccgggtgacgtagcgttttaattagtccctttcagagttgatggtgcatgatatgcatgctccacgataggcacttctccagatcctaatatgaaaaagcagcttgtcaattccattatgtatctgcaaatttaacatatgccgatcgaaattcgaaaagtatatatttatgcgcgcgtatgctttcttttcccagctagcttttaatcccttgaatgtcacgcgttaaatcagcttatgcacatatatattccaactagaatctatagatcccagacaagaacagcagcggtacagaaagcagaaaatgacaccttacatattaaccgtaccataatcaaccgaattttatcaccatcaatttagtgacggcctagctatatatgtgttcacttagctagttgaatcatgttcttagggccctcctagagttgcaactagcaactgctgcatgagcattttcttcagtaatctcagcttaataacctaattaactgagctaattaattaatcagtggttggctttaataactgattatttgctcctacttgatacaggcgagtaagaccaaggttgaccctcatcatcttcctgaagatcatggggctcgccatacttgagtaagttaattacaagtcaaataatactaatacgattataccgtacatgcaattcagctctagtcctgacacgtgtacgtacttgtcaggcctgtgcttgatcagaacctgtactacatgggggccaacctgacatccgccggcttcgcctccgctctcatcaacgtcctccccgccgtcaccttcgtcatggccctcgtcctcaggtaatcaataattagcatataattagcatgtggattaatcgtttaatcagcatggaatgcgagagattaatggtgaatcggttgattaattaattaattaggatggagaaggtgaagctgaagagcgtgcacagccaggcgaagatcgccgggacactgttcacggtggccggagcggtgctgatggtgctgtaccacggcccggtggtgcagttcccgtggaccaaggggcagcaccacgacggcggctccggcgccggcggcgcggcgggcggcgggttcctccagggcaccatcttcatcgtcgtcgcctgcgtgtgctggtcgggcttcttcgtcctccagtccaacaccctgcagagttacccggccgagctgtcgctcaccacgctcatctgcctcatgggctccgtcctcagcggcaccgtcgccctcgtcgccgagcgccacaacacccacgcctggctcatcggcttcgacacccgcctcttcacctgcgtctacgccgtaagctcgatctcttgctcgatcgatcagccatggcggtgttcgccgccggcgagctgtcgcgcgctgacacgatgaggtgaatggatatgcagggtatcgtgtgctccggcgtggcgtactacgtgcaggggatcgtgtcgaggcagaggggcccagtgttcgtgacagcattcaacccgctctgcatgatcatcaccgccatcatgggctccatcattctcaaggaagaaatcaaccttggaaggtactactctacctcgtacacgaccccattatactatatatagtaattaatcatgattagagtgaataattaattaacggtcgattggttaattaattaattgatttgtttgtttgtttgttaattaattattgcagcgtgatcggcgcggtgatcatcgtgatagggctgtacgcgctgatctggggcaagggcgccgacaaagtcgagcagacagacgccggcgcggcggcggcgggcagcaacaagggcggcggcgagctgccattgacggcggtgcccaacggccacggcagcaagcacggcaacggcggccatgtctacgacgtcgagacgccgccggcggcgaacgggcactactagcctaagcacatgcagcagcagtccgtcatcctcggcagtccattgtaagctagttgtggttcgatcgaccatcgatcgatcgagagcgtgacacgatttcttcttcttcgtcgtcttcttcttcttcttcttttccttcttgatttctcctaagaattcttgtgaggtattaaaattttcacataatgcaatgtaatggataaggccaggacgtgtccggaagtgcttgcttaagtaatgaatcacatattattctctctagctctgctgtcttacgtggccggagctgcaattaatttacttgtcaattaactatagtgcaaatgcctttgcttaatgcatgtgttgtcaacgagacagtactgctaatctgctatactgccatctccgttatttgctcttggcgtgtgtctccactaattacaggctttttgcgactaattaattgactcgaaatggaatccaaatgtacatgcaagctggtatagctttgatcgatgcaacggcatgcattgattgatctgtgcatgtcgtgatctctgcctgccgttttagctagctttaatatgtttggctttggtactgaatgacattttctaatcaaagtcattaggtgctgaatgacatcgattgatttaacaatagatcaacaggcctaaacattctcttctcatctctacttttgcacagtgagtgactgactattgctatctctggtatataggaacagaacatgtcctctgaaactggtgaaatcctagctagacatagttcaactggtttggattggcccctttaaacagtcaccttctgtactcaacttcttcatcaatcttatcttaattatctctatggaatcaaacacgtaaacctagctacctagctaggagcagatagtttagctatctcttgctaattgtctgaaaaaacagagaataactaatttggattttgattggacatcatatggatatgagctgcattggggccggatcgacatgacgacgtaagatgatcattttgtagatgagcgacaggccgtgttgggtgtacacgcatgctgacgtgcgtgcgtcgcatataccatatgatggaaatggcagatcgatcggtagtcactaacatcagcactaattaaaaaaatccccgggatcacgggagatatttgggatttctttacggtaaagagcaggggatatgaaccaaattctgccgtatcttttagtgctcgttcattgtcttattaatgacaatttgtttatctttattaactaaagttagtgtgtgtgtacaactgaatcaaagtgtgcgcgtagtacgtgttctattagtttgtgcgatgatataagttagttcacagtacagtgtgactgtggagtctagaacctataagtctgtgataattcgagagaaattatatagttttctgtaggaaaaaagtataattcctgtaaatttcaatatttttacaatgcctattgtaacgcaccaatatttactggtatgacgaggtgtgacgatagaattcccaggcttatttagagagccgatgcgaagctggtttataagaatttagaaaatataagtttgtcaattcctactctccagtttcgtaaaaaaaccatttaaaggtaggctatatctagatttgaacgcatgagtttctttttgtgggacaaagatagcttctactatctcattgtctagattctaagttaaatgcatgtttacttgcttgtcattttaccctaccaaattttaataggatagtaaactaaacacaaccttaccattatcactccaccaaaatttgataattctagatgtttcctctcataaaaacatcatcaatatttgacaaggcaccaaatatatctaacgctattctttttcgataatgctaaaatataccaaaatttaacattactctatccatttcatattataagactttctactattgcccacatttatatagatgttaacctataagtcttataacctgaaatggagggagtatcaaactttaataaggctaaaaatgacaaccaaagagaacaaccactgtgtgagaatctgcagccgctgaaactcaaccttactccatccatctaaaaaacaagctagtactggatatatctctattcgttgtattataatgtgtcatatttagtcctaaattcgtttttttacggagggagtatttcatttgtcttcaccatggaagaaccggtcccacttaccatagacccaccacagtagtacactacagtagtgagtagtactgtcagaccctgtttagatgggactaaaacttttaagtccctattacatcggatgtttggacactaattataaatgttaaacatagtctattaataaaacccatacataatcttaaactaattcgcgagacgaatctgttgagcctaattaatccatgattagcctatgtgatactacaataaacattctctaattatggattaattaggcttaaaaaatttgtcagataaattagctttcatttatgtacgtaagtagtctatatttaatactctaaattagtgtttaaatacagagactaagagcacccgcaatggtaaagtagggtgctctctataaaacatgtacatctcagcaatagactagattaatagtaaaccacctcaatagtatgtctacataggtatctatagctctctcatgcattgcttcgtttttctctatagactatctctaagctagtagatagctttgctctctctcttcatttaatatcttccaagtagaaaaatatgctgacatggatctcttgtagatagcttatagataaccattgtgggtgccctaaagtttaagtccctaaatccaaataccacccgacaaagcccacctcacgggcacccctaaacagaagtaaataatttcaaaatagtccctcaagccgtcgccttcctcacgctctctcccactccgccactgctccagctccccctccccgcaaggcggcggagatcccaaggtcgtcgggggatggcggcggtggcggctacatctccggcgctaaccctcgctgtcgcggccgcggtgatagcggccgcgtgcctcctcctctgcgcggaggcggtgtggctggacttgccgcagtcggggaccaagtgcgtgtccgaggagatccagtccaacgtggtggtgctcgccgactacgccctcatgtacgagtcccacccctcctcccaccccaccatcgccgtcaaggtaattccccacatttctagccgtctctcgcttcggattctatgatgcagtgaggcgcttccgttgttttggaatttttggatgggctccgatctaggttgcggtagttttggacgaattaggtcaactccatggtagaacgatagatggatgattattccgtgaaacggagcggtggcgtgaagtttttggttttgctgcgggtttagagatgcttagcgcacattatattgtgctggaataatcgttgaactggttgagtccttgagtgcgagggattatgtgttattggtgcagctgtgctcgcgaaagacagaaaaagtttgtgcctagtgttcaccggattgcgatgggagctgaaacttggaatcatatattctttgtgtaacctgctaggaatttgttgttctctaggatctagtgctctgtctagattccatttgcatcgcagggaatgatgatgatagtattctagaataactggctgatgcgtcaagtggattggtatgattcgcattgatgacgcagggtatgcttacatatgatccacaaaccgcgtcgattccttctgtctaaattgcggtggtttctgtccaggatgtcactcgtaacagaatacaaggtgattcatcttacagaatcacacacttgcttttctagcgacttctgtaagaaactccatgggttgtgggaagtaaaaggtgatcaataagaatcgcatcgatgcgaaataatgagaagacaacgatgcaatcatgttattatgtgatgtgaaattaatactgtaatgacttggtaccatatgtgtatctttttattcggaatcatttgcatgaatatgacagtgtgttgccatgctttttgcgttcgaacaaacaaggggacatactgaataaatagactaacgtgtagacatatggttgataaattgcgagtgccgtataagattgaataagtagatagacttaggtgagataatggtaatgtcatataaattattaattgtagaacccacttaagtgagcaggtgatatctcaactctttcttaatattattttccttgaaaatgcacaagaggaacttcatgggactaaaatttccaattccaaggcaaatggatggagtagattgtaagggttactagggttaaatggccatgcaactcgctatatactagtttctttagtctttactccaatttatgtccactgattgtaattttatttatgtgaagtataatattaattcattaggagatctattttcatccatgaattagtactggctagattagacactaagcatactatttgtgtttgctccattttgaacagtccttatgttttttcttttcgcagctttcgaatcaagaatatggttttttttttttactgtgcgagtatcaatctgcagttactgcagtccactaatggagtaaacgatgctactccaatcctctcaagcttagcatttcttcgagaagcttagcaatttgcttttacatgatttgttgaatgaattactatctacttgtgctgttatagttctgcaaatgcttatgcttggtgcaggttacatcaccatatgggaacaccttacatcacaatgaaaatgctacggttggtcagttcgcattcacaacttcagaagcaggaaactatcttgcatgcttctggatagatagcgcagagaaagggtcaggaatatctattaatcttgattggaagattggaattgcagcaaaggattgggatgttatcgctaagaaggaaaaaattgaggtaggagtaggcttagccaaactgctgacggtccatatgaccatatttcactgatgtccagtttaattcactgcttctctaattgctgcaatctaattccttttgtagggtgtagaactagagcttagaaaacttgaagtggcagtacaatccatccatcagaacatgatatatctcaaagcaaggtaagttttacttccacatgattgacttactgtggttgaggctttaaaacgaatattggtggtactaatagagggttcagtagattgccaatggaacttggaagtggtaatgaaacaatcatattgtcttcaattctcagcactagatacattcaaccacaaagagcgagcattgtttacaaaacttacgatctgcagtccagatctgctttctactttgagaaactttatatttcaagatctgttgcgattgaacccagtcattgcccttatatggttaagaaatcatagtgttatatgagattatgtgaacttgaagacatttattaccgccctacaggattttaaattagcggcaaatctaatgatttatttgatttgttcatacagggaagcagagatgcgaacagtgagcgagaaaacaaacgctagggtagcctggttcagtattttgtcactaagcgtctgcattgtggtttcaattttgcaattgtggcaccttcaagggtacttccagaagaagaagctcatctaggttagctcgcttgagctgtaccgtgactccaaaattgcaaatgttgttacattggggaaaacagttttgtcatgttagttcgaacttcacgctagcgaggagctgcttgtactttatgtaatttaaccatggttcagtttagatgtgttgtgcattatgattgcaaataggtgataacttaaatctccctggaatatttgatgccttcaggacatagattacaagaaattcatcgtcttataatgggatgcaaaaattgtggcttatgtggtagtgggcggtggtttttcttccatttgctttagctattacagatgtcatgtaagtgtcatagtatggtccgatccttgtaccagtaaaccggcttagatggaaacaccgatatgagaaggccaattatctagcatgtctttgtcctgaacctacagtttctgtatgggacaaatacacgttaacggatgaatcacgcacaatgatgcaaagtcaaaacaaccggagcaacatcgtcagaaatctgatcacagaaagaggctaaggccctctttatttagactttagactgattggcctagacttttaagtcagcttattggcttatatgatttataagccagtggatttaatgtcctaagtttaatggtagagttatacatctatctcatataagccaaaaaaaaagcttctccaacctagtttttggcttaatagtgttagagtggcttatggtttaaaaaagccaaatgaaaaagctgcttgtttgttttggcttagacttttcgacttataagttggcttataagcctaaacaaagagggcataagctggctaacttgctattaaaattttcatacgttcttaaactaaaccagaaaaccaatgacagccggcctaagctgttaacgacttaagcattcacatcccaaaattcccaagtcctaacacgtatccatccctattctagtattctgataactctcaagctcttgatgatatcaccatgtccgcgtcgccgttgcgacgacggcgagcaccatctccagctttccagctgctcctcgacgccacgcagccgcagatgccctcagctctgatgatttctacgctggcgagcctgagaaaaaccagtggcagatgcgctcaccatgggcaaggccggtgacgccgagcaagcggtgcacagcactgcgccggcggccggccacggctccgccgtccgccggtacgccgccacgattggcggggctgtcgatgccaagtgtgtccttgtgctgttcctctccatcggcgtcttcgtgctggtcctcttcatgcttcttcctctccatgaccatgcatcagaaaccatccctgatgatgaccctggggtacttcctggtaagaacactttccttctgcagcaactttcagcactgattaaccgtctgatcatataaattgacaagctacatgatttaattatgtttgtaaagtcagatgcattatccccaaaatccagacagtagaatcaaaagatttcgtaaccaaatgatctcaaatagtggtagattagaagataccagctactcatgctagctaagctttcagcaaatatgaagataaagtgtgtcaagcttacctttatcctcttatgcatctctcaaaagaaaacgcctatcattcctccaggtgaaattcaggctagcttcttcttgttaaagaaacgtcaacagctcattccacatgtcagaaggctacaaaaggacatatacagagaaatagggatccccaatactacggtatgccattattccactttgacaaaagaatttgtcttgcactcaagctatactgaaatgatcgctgaaaattttgcaggtttcggtttctatgcatacatccaaatataaggattccacttatgtaaaatttggtattctaccgaacccaagaaattcctccataagtgcacaatccattattgccctgagaaaaaacttgatacaacttacgcttgagcagtcgaatttatctttgacatcatctgtctttggagatccacattgcttggagatcttggggttcccaggagggatcacggtgcctccaccacctgatggcaatatatgcccaacagctcttttcaatgtcacactcaacatgactatacaacaactaagggtgcacctcaaggagctagagagtgagcttagaattatattgcagctgacaccatatgaggtccatacatcttatctcatctgatatagtcagttactccctccctttcacaatgtaagactttctaccattatccacatacatatagatgttaatgaatctaaacacatatgtatgtctagattcattaacatctaaatgaatgtgggcaatgctagaaagtcttacactgtgaaatggaggaagtatttgacagcaagtgacaacattttattttgtgcaggacttaattgtagagataacaaatgaaaatggttcgacgatcaacctgcccgttacagtccacattttaattgccccaaactatcctagcaattatctagaaacctacagactgaaacaactagcccaaatcatcattaaattaattccaaaaaaccttgacctaaacccaatatttggcatgattgagaatttgtggctgtcaccatgtctacaaagttatattccatcatgtgctcctaatccagctccagctccagcaccatcactatccccatccaatcctgaacatccacagccaactaccaccaagccttatggaagtttttcatgcccggctttggaaagaagaaaaactgtctctgtacatcgcaggttatcgacgatatctcccatgatggtaccaccagaaataccgacgaggtttgatagttggagtgtacacactgacaggaaaaatcgctctccacttgcaaaaccaatgtcccttgtgccagcatccccatcaaaataagtaagttgcttatagaattaccaagctagtccttaagtgttcttatattgtttagcaagattgatgcacgtttttgttacatcttagagttataactatgaaacatgcattaatgtaaattagagcaaacaaacaagagtaaattagtttacatgacagcaagacagggattcagatgttaggttttcattttatcatctgaatattattatttctatgataaatgtttatcttagttataaagagttgaacacaagtttcagtattcgaacctcaagttgatttattttatctgttatccatgcactctacaggccagtgccttcaggtcagataactgttgttactgtcttctgcagttgattctacacttgttccttcaatgtgattttgtcagttacatccaaggttgcatgaagtgcttctgagcgaaagtcctacactaatgcagagtaatgctcaagaaatcttaaccaagtgtatatatgaaatggttaagttctctttttgaccaaaaacactgtaggggaaatggttaagttctttagcagtaagatggaaaacctccagctacgggtggttaaccataagtttctttaatgcgttcagagatttttcatccaaacagcttgtgcatttgcatgagttatatagattgctcttgtcccaaagaaccattctgtgagtatatgggtaacatcttgtgctcagatgctcgcttatctgtatttttatagcgatacggatgattatcaattatataagcaagcacaacttattctgaaccgaatagagtatccagaaaaattagtgtataatttctcaaatccatagagattaataaagattacaacaagtaaagatcacatatgccatccattatccatcggcattctcatagctgctgactcaaaactggaagaaaaaaaacaccttctgaaagaaactgtgaaaatatcttactgatcaaaggcagaaaacactttcttctgcacgagctccacgcttagacgaggcgataatctgggaagcttttcctgcaaaacgatcattgatatgagctatgatgacacaaactctagactcaaaacacctaaactgaaggccaggagcgagcgcgattgggaggacgacaccacacctcgctgccgtcgggaagaaccttggcgagcaccgggatctcgtactggtacatctgctcccaatccggattcgtcgtgatgtccctctcctgatcgaaacacaaaccccaacttctcaggatgaaaccccccaagggagagagagcgcaagagccacgaacgtggtctagtctgcttgcctggagctcgagggaggcgagcgagtagggtgtgccggcgagcaggaaggcggcctggagcttctccttgaggccgtcgcagaggcagcacccgggcttcgtgtacagcaccagcctccccgcccgcggctgccggggacgcctcgccgtcgccggctgcggcgcagagtaggcgggaggcagacctcccatgctgcgagaggcgcagtacgcccgccgcgcgcggaagcacggttagcgccgccgccgccgccatcgatatcgtttgggttatcgctgagacgctccgcgccggcggcgagaggcgaccaggttagccgcgctgccacgggctgggccgcacacgtgccaggcccaacgcgcaaggctcgcgtgttcatgatgggccaggcccacctcacttttgttatgggcccaaaacgcgcaaggctcgcgtgttcccgatgggctaggcccacctcaccatggatatgggcccaaaacacgaacccacaacgccgcgacgtcgcgcatctcctcctcctcctcccccatccaaagcgagcgagccgagggctcgagggctcgaggccggccgccatggcggcatccgctatccgccaatcccaaatctcccccccaactctcccccttctacgccgcacgcgccatccacatgccggcggagctggcggcgcggaccggcggaacctcgtggcgttcggtttccggtaagttttcgctacttccgcgtagacatttgttactgcttgtctggtacactggtacagtccaccatggtggagcacatcagcggtagtgcttatctggaaatgcccttgccacatcgatggtgatgcagaaaaattgccaaacgggatactgcagagtgtcaattagttgatgcaagtagcgggtagaatacactgtggagtgaatatgaacgaattatcatctttgcaagttgaaagcttgataaggatgtgattttatcaccaattaaatgcatggtgttgtggcgtgcgatacaaaagatgcatattactgcgcctgtatttttctccagtgttgataaacagtacgagagagatggttgcaatgatttgtagattggattgcaattctgtagttaattgatggtttaggactttatgtttcaatagttcatttgtcagtctttagtttctcgaatgtatatatcataactatgcagctcaattctttcttgtaattttgcaaccgaagagtgggtattatacacctagttttctggtgaatatatagacaatgtatcaagatgttgttttcttgtcattttcagttcttttctgtgtagcaatgctcgatggtcatatttactgcttatcatcagtataatatgccttattgtcatgcctaccaattcagaaactctgttaatgaaaattgactgatgttggctgagaatgatttcacatggttttcaaatcaagggctctattttccgaatcgagaggattggagcttgtctacaacatttcgcattcgcaagaaaatggaacactgacaagagctacccattggccatattttagtattttgccaccctaatctgctctttacagttttaggatttattaagcatatgagttggggccttgggggatctatgggcctgcttataatgaaatggtgattcttcacaaactgaataggataagtgcatctactataacaatataatgatacaaataatattgcttatgattaagacatgcataaggtgaatttctagcaacattagtattatggtagaactataaactatagtatggatcgactacagtaagcacaacccctgggttctgtatgcatatcatcttaaaggacatacatgctagtgagctctttctctaaaaaaaaagataagggggacatgccattatagcagatggtctaatagtatagctatttgttcttttcacctcagtacattttgaatttggtgctcgtgccagttgttttattctggttctatcattcagttagggtacaatacaaatgcaatcttactttcactatctttttggagattgcagaatagatgccagtaccaatctatcagctgttaagcactatcaagtatcaaattttaatgggtaattgttttcttggtgcagagtggctctagtgcacaaacaaatatactgctgctgtaccttttattgaagtggccacaggagagccatacaggtaccataacatcttgctactactactcatgatttctgaggctgcttttctttctttcttttttctgaaatccttggttacattgacaagcacttttacaccagggtgtttcctaaaccatttgatttgtgatagttctctcaaattttaaacaaattcctgagcaagtaacattgagtcacagtatgaagttggttagtgagagtgtgagcctaggcacttaggcagtacaggccaccatcggttggcttttttttttctaataagccaaaacggcttattagggaataaaaataaatttgtaggtaaaacttttatatatgtgttctttgtaacttaaaagccaatgctgaaaaaaaactacgttgaaaatatttcaaaatcaatttcaaaattaagtttaaaaattcaaattttggcttattctttggcttattggaccatccgatgggagccacagccttcagtgactgatcattctagaactcctccaaacaaagccatcctccttttctcttacttttgtactgggaaagtgaaatcaatcaggtgattgatgcagtctcatttttaaaaagggacaaagggtagctgttgaaatttcgttttctaaaaaattgtctgcgatatagctgtccctaattcccaaaaacttttcaggttactgattcttgattcccagcactttgaatcgtagccatctctaatccctagaccttgtagtagtgactgaataccactgtcaatacaagtgacgatcctagttttgaaagttagatattgaaattctcacgttcctagtagactggaaaggtaaatggatattttaaagaccaagtgagcctcaactctcaactcctgcaaaatacatgtccctcttttgctgaaactttccccgaccagtggtcatgatggcacaacgtagaaagtaagtatttgtgtagtacaattaagtggtcctttgaacaagatattgcctagaactcccatatttttctaatgagcaaacacttaaaagttggaaaccatttctacagtggaagaccaaaatcccctagtaacaaatggcagtagaaaataatctccatctaatctgtcataagttctgaaccttaatactagtagaattctgtttctactgataacagaactcgtaaatcaaccgttggtatcacttcaattcatgataatattggcaacaaaatactaacagtaatgactaccgtaaagttactcaaaattcttatctgctacgaaatcctaatgtcttcaggatcacactacagttattaggctttatttaacgcttcacctaattgaataatgttttttcagatgtactaaaattaagtgggacttaacatgtgtttttttaaaaaaaacacttaggctgagtttgaacctgtaggttcggaacctctatttggcacgaaaaacagagtacctcattaacaaatgattaattaaatactacaataaaaaagtaaaaatagattaatatattttttgaagcaaatttcatatataatttttttcagaaacgtactctttagcagttcgggaagcatgcgtgtgaaaaagagagagtagaagattagaaccatcagtttcgaacgcgcccttagaccataaaggttgtggttatacgacacaagtcataatacaataatacattgatttttttacgaactttgactatgtttaaacatagtgtaaatttgttcggagttgaaaacccatttcaacaccctagaacccgtagttacacattgcagtagaaaatgatccccacctaatttgtggatcctctaatctgctacaaaatcggaatgtcttcagaatcacactacagttattaggcaagcaaagtttatttcccagcagaggcataaactctgccttttccaaagccaggttaacatcaccttcaccccctccctcacatgcaaaacagaaaaaccacagcactcaaaagcgatcgaagttgagccgagagcggctgagcccccgcccccatcacgctaataatcacgcacgcaagaggaagcttccctccccatccactgtcccctgctcctaatgcattccagctctttgccgcgaggatgaaagatcttcccctctttctctctctctctctctgggagataatttattcgagctgtccttctcgctttgacgatccgacgaaccagaaggaaaagaggggaaggagatgacaaaaaacgatcatccctgcccctgtgtgtagcgatcggattgcatcatggggttttttttttttcttgtgcgagctaggctgttaaaccgcgtcgccgtgggggcggcaagacggcagctagtttgttgtcttgctcactcgctgtcttgctgacctctgagagaccggttcttctctcgtttgtctgatgaggtagacgcctgcctgcctgcctgctactgctggtgcattcatgtacatgctgtgagagggacaagagttccaaaatgcgacgataaccgctcggttctcgggtttattggtgttgatgtgttgtgaagttgatccatatttcaaaattatccaaacaaatgttcaattttttgataaaatttgtctaagttccatcgtgtttttatcggtttatcgtggttgtcaatgaaaccggtagggggtagtattggactacctgtcgtatttgtaaattatagggagagatattcctagcaaagtgtgagatttgaaggcgtctttttaatgaaacgtctctctgcacatcgcaatcgactaatcgagcgatgtctaaacgaggtgacgttagtctgcttgaaaaatgaggctggtcatttttggtcgctatctcctctttgatcttggccttttgaccctcctggatttcaggcttgtctacgtagagggttacagaagaccagctgtcactacctcttttgtattgttggtatacgtggcaaattgctagggtgtgttttacttacctgtgtgattatactagggattggtcgtgatcaggttgtgtcatgagaacaatatgttcataccaattctttttctttctttctgatttttttgtcttgcactggcattggtatggaggctatacctactcgtcggcaggttggcttttttacagaccaagttatttaggagatactcccaccgtttcaggttactagatgtttttactttcattatagttaaactatttcaagtttaactaaatttataataaatatagtaatatttatcatgctaaattagttttatcaaatcaataattgaatatattttcataataaatttatcttgtgttgaaaatgttattatttttttctacaaacttggtcaaacttaaagcagtttgactttgaccaaagtcaaaacatcttataacctgaaacggatgaagtacaatagtggacatctgttggtgatgcttttagatactctttgtgtatttttcttttcacattatatttagatagagattatctagttatcaatcacctgaaaacaacagaaatttcactcaattttttttgggtggataggattgcaaataaaccctcaactctaacctcgtcaccgtcgctgtgcatttattgaagaagagtttgtcgtcgctattgccgtcgcagttgatttaccccttctccctcccaaaatccagtgctcgattgaaggtgagtgaaattcatagtaatttcagtcactttaaatctcgcaaatcccatttaaataatatgcaaataacttgtataatttttggccaaaagataactcgtaatcccatttacataatatgcaaaaaacaaaaagttgtacagttttttaccaaaagataactcgtacaatttatttttaacaatgcagaaaatgtaatattgtctataaaaacgggtacatcgttttattgttcatgcatttaacagtttattgtatgctacgtgttctttcaactttttttcatgcgccaaaatgtgagatcggtgatatgaccatgtgtagttgtgtactcatgtatctgtgacatagagagaaggggtttggcaatatctgttacagattgctcggaaattcaccgagattccggcatttccaaacatgcctgactgaactgcataccaatcatgtgagggtaacacagtcaaggcaaaagaaaaaatagaagtcctatgttgatatgtgttcctactttgaccagtgatatcctgcgtaagcagataacgctatactctccttgaacacacacatcctagccaatagccaccatacagaagaaccccagctagcagtgatccatatgctctgcttacctgcctcccggaccagcagagccccttgtccaaatcaacaattccacacccccaaacacacaagaatcaccgtgactgataaaacaagtacagagccgagctgcgaggtatcttctctgaccgagcagatccatctcaccgttctgtcataaaactaatccctttctctaatccctttcacactactaaattttatgcattcccttatatatccctgaattttaatttggatttcttccatacccctttttgtttagttatcgtgagttgactgttgtattcctatcaaaaagtccatttttttcctttggtacgaagaaacatataagattatgaaatacttcatccgtttcatattataagactttctagcattgcccacatttacccacatttatatatatgttaatgaatatagacatatatgtgttcctagatacattaacatctatatgaatgtggacaatgctaaaaaatcttataacctgaaatggaggtagtatattgttggaggatagaaatttgttatttgagactattatatctataagtttattatgcaagatattatttatcacaaaatttacttgtagatatggcaaaactaatatttatttattatagttattaaaaattatttatgtagcatataaatagatttgtttatatagcaaacatgttgtactactatccacaaaataaactacatatacatttttaataattaaaaaataaataatatttttatgtcatatctaagaataaattgtcataaataatatcttgtattataaactcataactataaaagtctcaaataataaattcttatattttacaaatttagagtatttgtttttcataccatagggtaaattagacttcttcataagagtttaactgtcactgacgtaaaaggtatggaaggaatccaaactaaaattcagagatatataagaagatgagcaaaattcaggaacatataaatgggcaaattttcaaagacacgctagaaattttctaaaaaactaatcaacacacctcaacctttaaaaaacaatccaagcacccatcccagaacaagttactgttctttagtcttcatgaccaatcatgtgacatgcgcacacgtactctgtaccacgcatgcacgctgctggcacgatgatatcgtgtgccgcctgcacctgtttggtcagtactgtacgcggtccgagcatgaacaatgtatagtggcctcgaggtttagcttcgaagagagtgtgcaacatagattagagcaaggctaatacagccgacctgttggctataaggttctttgtagccttctcttagcctacccatataatagttagcactttattgttaatacagggcccacttgtctctctcacagagtttcttggtccttgtgtccaagccggctataagtttacagcccgcttcttctctcttctctcctccacccttagcatttagccagcttatagtttaccattatacttgctcttaaagataaaatcacaactgaggatacctcattcccaatgcccggtgatttgaatgggtctagaaaaggatttgcttctcagccttacttttttttaagcaagaactagctctatctattactatattatctataaacaacttaatagtcttcacatataatagttagatacatatttattgcattattgataattggtcacaccttattcttacaaaatttcttagtgtccctgctggaactgattacaaatctatcgcttgtttttttttctcttctcttttctctcctccaactcagtacgaatttgaggtggcaacttctatagctcatctatatcaatttattgtacatgctcttacagtctataaaataatttaactttgatacaaatatgcacattaatcccttatatcataaatcattttataacaatgcactggccctcgtgtcaggtgaacaaatactcctctgtccttcccctagctccattcctttcttttttgttcttcgatatatgcatgttgccgaccttctcaactctttgttgctgttgtcctttttggctctcgatggcaccgtagctctgtgctctagatttggtcactgcccttctgtgctttgggatctgtcctccaccgtcgtcaccagtggtggagctacatgttacctatggggtcagggtttttacaaaatagccaaaagctattgatatttgggttgcaacaacagaaaacttgccatccatccctcgtgacttcaaccagccaccatagtgtctttgtgctccaaacgtggccgccccgccactatgctcaccgagtatcgattcaccttccaggcatagttattaggaccggaccggacatcgaaccggtcgtagcctcggttcgcggtttgattggtttgattggttgaaccactggcccaacacggtttaaataaattgaggtatatagcctaactgcacaagtatgcatagctcagtggtggggttgcttgagtctaaaggggagattgagtgtttgaacccctcaacccacctttttctcctattttcttccctctcccccacgtttcagcctgcgctgggccctttctcacccaatttccccacatgcacccggttctttagcggtttacttgcccggttctttccaaaaactggtggttcaatcgatttttcctgggttgattgcacgttcgatctttaaattggacctgacctgctaagcccctggttctggtttttttgggtcagaccgtcgatccggtcctaatagctatgcttccaggttgctaaagtcaaccgcaagggtaccctgatctaggagaagcgcggcggttgtggttgcgagagtggtgtatcaccgccctcttgctcgactccatgagagatactcgatcagatgaccttagcgtccacctccttcccctttcaagcaacagttgaatgttctctcaccataaatcacatcatttttgtcaacccaaccacgctctctaaaagccactcactttttctcatctctcctccacggcaacttgccattgaggcggagccgtaaagtcataagctacggtgggacgttgtccatgccctcaggcgaatttagatatactttaaaacacattaattttatttgaattttataaagaaaacttaacatgaatcagtctaacagtaggataaattttctgtattttaaaggaagcctcaaccttgaagcggcatggcgatcactcgaagtgagtgcagagctagggtacatgtggttgtacggctggggatacacccaaagtcaagatcgtgcaggtggtgggttccggcgtggggtggggggccgagcagcacgtacagctagctggcctggaaaccggctggccgccggcggcggctgccggccgggaccggacggacgcggaccacggtacttgttcgatctggactataatggccgccagtttgtccccgtggtacggaggcgctgtggctatagcgctggtttaagagcaaggtcaataatgcagctaacaacaggcggtaaaacggcccatgtcagatagtgcagctaatattaaaagctagtatgtacagcagtaggctgcactccattttccggtgttagtttttcattttctaatcgtactttactagatcagtccatcacgtgattaggtggtgttaggttggccccacaaaatgtgtgaaaagctgcgctgtagccgggcggtaaaataagcgtcggcttatttctctctcctgagttctctctcctctacataggaattaaatgatgtggcatattttggagcctgtctagtcagcttattgtacctgctctaagggagaaattacatgatgtacatctctcgagtgtgagtttgcgatcactaaattaatagtttgatgcagtaattaactcggactcaatttaattaccagtgaagctagtacttaatgaatatgttgctcgttgttaggcctggtttagtttccaactttttctttaaatttccaactttaccatcacatcaaaactttcatacacacatgaacttccaactttttcgtcacatcgttccaatttcaatcaaacttaaacttttaattttggtgtggactaaccacactcttagtttgcctaagattatggctatcgttggcgcacaaagacagcacacatcagacaaacctatatgcctggtacaacgacagactctaaccaggcaagaggcaaccatatacagttacgcacgccctcatgttgaacacaaatgtctgccacttttgactgaaagcacatgtgacagattaagattggtgtgaatgtgtaaatgtaatgatgattttctatatggacaaagcatgtgagcatgtatgctatcttcagataccctccgatacccttaatgccttgctccggagctgttcttctttttccgtgaaggaaaatgagtcttctcctgaaacatatagcgatttcgtatcaaaagtcgtagttttcaaccttttcagttgctgacagcacgagcgaatgtgatgtagttttcaatcacccaggtagaagcacgtatgtactttccagccatccgttcgcaccagtattgtacgctggctactataataaatacatacgatccaccaaccattacaatcttcctcgactttggccttgtacttttctagatttttttattagattaccgaaacggagtatttaattcatgctttagaaaaatacgttttactcaagaaaaattcttctaccttaagtaattagatcacgcattttaagttaattggtaagcttatttcagtaaatatttagcttatccttatgatcaagctgataattcacaacaatcatatgcagtaatctactacaaattaaataagacctttggcgatgaaggtcatgtacaccattgcatttttttagataatgaaaaaacctactattacacccgggacatggcatatgcatgtatacacgcatgccgtcatagtatagggcatgtttggtttgaaactctaccaaaacattggtagtaccaaaccttgggcaaattttggcactaccaaatttttgatagtatagatttggctccactctattgatttggcaaaaattggttccaatccaaaatgctaacatgcactattcaaaactactaaagaattgttagggcaagaattggtaccaaaccaaaatggcccatattgccatagcgttattaacgggcagtagtaccagtgtacaagtaatcactatggacaaatagatgtggctacagtcctacgcaaggcaacgtcagcgtgaggcagccatcgctatccgggaatctgcttgcagctgctaaggtcatcggctagctaggatagatggatcggagtgcgacattgacgtgctcaatctgatcctcttcctctcgatcgccatcgatcggtatcaactccacgcggtttgcggtcggtcgcaaccctgcctgcctgccagtgcagctccagctagctctcgctatagcatcttctcatcttctctcctctcccctcccccctccctgccgccgcgacatcgacgactgcatgccacgcgcgcgcaccgaattcaaagcgccggttggttgttgtcttttgtctcccctcccctcgcgcccgcgcagcggtgtgtctcgtctcacttttaaaaaatgagttaaatttgataagtgcaattgtaaatttgtcgttacaattcctctctttataaccatgccacttaaattctataaaattagaaccatgctacgaattctggtcaaacttttccttaaaaaaaataactgacacggttacgagtaggcgaattgtaatagcatttatttgaattggtgcatttgcaatgacacatactccctccgtaacaaaatataagtgattttaggtggacatgacacatcctaatactacatatctagacatgagttatgtacaaatttgtagtagtagtatatgtcacatccacccaaaatcctttatattttgggatggatggagtatcaagttaacccttaaaaaaatatagggttcgttcgcacagtttcagctctagttacatcttttttttagccgaagaccaaccagatttagcttcacccaaaaaaggagtggagttgactaaactgctctcacaaattaaactagggaggtgaagctagacttaggcagctccacaatttcaatacagacccaactcctgaagttaaatttagaaattgaaacactaccaaacagactcatagtaccccatttttttaaataatgaactccttcacatgatgaatgttgagtttttggaaatacaccatgttacttattagagaacaagcgcaaaaccatcccggggaaaatgaagttatttgaactaagggagtttttgaggtaaaaccataaatcggtaatagacagggtcggtcaacgaggagcaacggcattgtcgcaatgatttcatccacatgcctctactagcatgcatattgtttgaaaaaatggcgatcctttcagttgccttcgtaaaccgcacaaattgaggtttatagttgactcatagttttttctctcaccggactcactcaaatgttgccatggttttcgctgtcaaaattgagaagcactagcaacaaacttgtcgtccagtgttttcataggcaattgacacccaacctgaattgcacatggttacaactataattaaagtactgagaacccgcctccgatcctcctccccatcttaatccaatatacatggttcgtgcaaggttttggatggtaaccgtgaaatatgtttcaactggaaatcaacaaactgcaacagaaggcaaaaataacatcaaaggagtcggcatgaccactctcttttctacaagaagtcggcgatggccttcacagagatagcaatattgaagtcgtcttacattgtccacaacttgatgtcggagcacttcaccacctggtattgccccatatggtttaaagaccggtgtcactttgtctgcttcctttcaactggatatgatggtttcaagcatacccctccctaccccttgaatctactgattgtttgccggaaccagcaaccacatggaacttcgccacccgggctgcctctaggcgacaagatccagcaactgcaagctacgcatccacttcaattgcctacttcaagttttctttgagttttgccttctgttgacacaaaatatgtcgtgacacacgaaggccttggagatctgcttaactccagtgcaaatcctaattttagggttcaagacgtattagttagtttgatcctacaactaacaaggatgatataaagaattgaaccaatgaaccaatcgaccaatactgatataatgtggtagatgcaggtccgatggttaatgctagcgtacatcggctggagatcttatgcaagtagattcgcatgtatatcggctagctagctgatacgtatgatagttgaagcccaaaattatgataacacatcagctagaactctaatggccattgcataaaaacctatcgccttacaagaatcaaacttattaacaacaataatctaatagatcagacctaaccgagacagtataagatcgaagatgataagaaaaacctatttagccaatagatctacacaaacatgatggatatcgaatcaatcaaaaacaacaatgtgattagagaaataccagcttagtcggaatatcggacctaatcgaggaagtactaagccgatacgactctaaacaacgatacagtcaaaaatagaaccaatatattagatagacatccttttgcatcaacttggttagaatattgtacctatcagagaaagttctaggcacactgatatagacgaagatgatggaaattacttcctcgctgaagatccaaacgatgtagcccaactcgaaactaagaacttgccggaataaaaggtggcaatgcaccgaaagtaattgtattgatgtgtggagatgtctcgtaaagccctagggtgtaaaaatttataccctcagattgatacaagtcttgatcaaacacgatacaagatttcttaataacaagaaaaggaaaataaataacctgtctattcaagatatatgtactaaaaatacaaaaattgcctcgttgtggtcttcacaattccttcttgaactcggtttgatctagataaacatccatctaccaattagttaatttctttaaccaaatccactaaagaaccgtaccaaatttcattaaccaccatggttaatgctgtggtgtttttgggcacaccatagcatagcctcaacgtttcttccactatcctcgagatgaggagaccggatgctagcaaacttgatcacaaaatgagaacaacctgattatgggagatatccgaccagcctacgctcactactaatagtggagatgagcctaatctggcctctccttcccttcacccacgtgaatcgccgagcccgagaggaaaatgggtcataaatgggagttttttttttctacattactttttgcggaagtcagggagggatcgagcaagagaacaaatgtccctcactatctcagaagcaacattatactactcctcttatctaaaaatataagagattttgacggaatataacacatcctaacacttattcagattcacagtactaatgtgtcatatccggttaaaattacttagactttgggatagagagagtacgttatttaaggactggcaagtgcttaaaatgcgatggtaatagttggtacaaacacagaaattgttttataagaattcgggctatttcttagtttttttaaagaaaagcttattccgggtttcaccggtttttaccggtaatatatcgagcggtaatcacagtggaaacgccgttcaggaactgtattcggtaaccgaacggttttaaacaagtggccgtggcgccgcgtccccagttccccacggcacacacatctctctgggtcgctgcaaccgccgccccgccccgcgcgcgaagctgcctacgaagccgcgggtggcccctggcccttctccgtgcgtgcgtgcgtgcgtacggccgcgggggaatcaacagatctgcacaagggttcaatacacaccagcacacacgcatatatgcacgtactcctacgtttcgccgccccgtactaggtactactgttccggcaacgacgacgagccggtgtgcatggtttcccactactgtgcatgcaagctgtctgtcttgcagacgcgccacgccacgccacacgcgacagtggtccatgatcgcgcgtacgtgtgtgcctgcgttttctcggcttaatttgcaactactaatcatgcttacttactgtctcgctaattaagcatgtggctgtgctgacatgtcgagctaggatggagcgggcggtgcactgcggcactgcacacagctgtgcgtatatgctactgtgggtagtcaacacggcggctgtttgatgatcacggttcagtgtaattagcacgagggttaaatttaactaacaacccgaggtcgtcgtcgccgcaggcacgtgtgtcttgtagactttttttcacggcctttttcgctggcctgctggctggctggctgcaggccatgtacacagccgtcgacgatgtgtcggaacaccaccagtactacgtacatgaaatatgcaataatggtttctcccaaaccatttgcttgttgtactaggtacgaacaggttgtgattcgaaacgtgtctaattaatcagaccgtgcagattctgcagaagtacacgggtcgagttattaattacttcctccatttcatattatataagactgtttagcattgtctatatttatatatatatactaataaatctagatatatatatatatatatgtccctagattcattaacatatatatgaatatatattggtaatgttagaaagtcttataacctgaaacggaaacggagctaatacaaattaatcaattactccacaataattaggacgctactactgtcaacacaccctgtcacgactctggatagacgtcggtcgtcagttccaggtcgatgtactggcccaaacccagccatgtacaagcacgacgaccggaccggttttgttggacacctgtacagctcaaaatgatggtagattccacaggagcgatcgatcgaaccaccatttcacgccaatgctcctcatactactaatcatatacgcatgcatgcacactgtgcttataactcatccacactcgaggagtaaactttaaggaaaaaacgtgttgctgttcggatcatgcatatgcttgctggttaattagctagctgttctgtggctgacatgctgcgtacgtgcacgtatgaagcagttgtactactactggccaatcgatcgaatcagtagaatccttccttcttattccctttgtctcctaattaatccgatcggttttcttagtatttcctctccattattgctaatgtagctgcacggtactgtgtacaaattgcccaaaaacaaatgacattatcagcatgacgctatcaaaaatggttacaatactcacaaccagttcagtctagacaagaataagcaaataaataagataagtcatggagttaattatacacagtctgatgctgctcagctgctgtgccctataaataagccatgagatgcagcacatcacaccagccggtagccacacacacgcattacacctacacctacctactactctcagttgttgcagccgtcttctttgcagtttggtccgaaccatcgccatctccatctccatcgaacgatcacacgtcggagtatcagaggtgagcggcggcggcgtcggaggaggaggaggagcaatggtgaagagtgggcaggaggcggcgccggggagcggcggcaatgcggtttnttttgggtttagttgttcttaggaaggtgtaacgcgacgctagcc

SEQ ID NO: 5424 - DNA, 70595 bp, Oryza sativa
agacgttttgctcgacgagcagcggggcggggaggcagacgatgtgtataggaggaggaggcggagagcggggtagcgctgtgcccgatgtggcagtggcgcgcgcgcgggagaattggagcgattggcgcgcccacgccgccgtccttggcgcgtgattttggcgagggtatggctgtgcgtgttgttgtgtgggggtatgttctgttctcgtgcggctcgttgctccccggacgaagagagacatcgcgtggcgtctgcgagccgaggcgctagcccggcccggtttctctacggtccaacaaagacgacgtagaggcgcgggtggaccgcagatcagtttcgggggattggcccagagtctaatcccatacaattgcatcaaaatactctcctctcaaccaccacactaaaagggatcaggttcctctacacttctacagttgaagtcgtgtgactttgttactgacgtatgagcagtattctaaatctccggcagctatagccggagatagcggattgagaggaaaacagctaggatacttcaattttaacgctatgatttatcaaccactaatagctgcacttagtcagagatagccgctaaattacccgtatatagcggcacttagctgtggctaaacaaatttagaaagcaaaaactgaaaacgggctttcgacttgcatggcccataaagttcaacccaacaacaaaccctaaatagtcgactcctatcctctcccactcatgcgttgtgagacacgatcgaaacggtggcatcttgcggcgacagcagcggctcctaaggtggcggcagcggggtgcctcccccaagtagcggcggtggcggcggctgctgctgcttctcccggtgacggcggctcctcccccaagcatcggcggtggctgctgcttctctcgacggcaacggctcctcccccaagcagtggtggcaggtgcttcgtctcccggcggcgacggatcctccctcaagcagcggcggtggctgcttcgtctcccgatggcggcggcttctccctcaagcagcggtgacgactgctacttctcccagcgatggcgactgctcctcccggcggtggctgctacttctctcggcgacggcggctgcctcttccccacaacgaacggccaccattcctccccatccccttcaccaatcctcctctatgtgcaatcaagtaagtgatatgtcagtttttagttcaaattctatgaaaaaattgaatttttttctaatattttcaaaaactgctaaatgtcttagctgcagttatagccagctatagctgctcttagatactggagagctcaaccgctaagaagcttagcaggagatttagaacattgcatatgagtctgatgatccctaggtcagcatgtcaatgacaaagacaccatacatttgactgcagatgatttcaatcccactaaaagttgtgttcggtcttgttggttgggaacgttttcgctttgcatggaaaataaagtagctcattagcatatgattaattaagtattaaaaaaaattaaaaaatgaaataatacgatttttaagtaaattttatataagtttttcgtttttagaaaaaaaaatcatcgttcaatagttccggaagtgtacacgtgggaaaacgagttagtggaggatgggaacctacgcatgcacgttcataggatgagttaggaatttctccatcctgcaaaaaaaaatgaggtaacgcataattcattaattattagtttaaaaaataaaaataattaatcgtttttaaataaatttgtctatataattttttttgcaaaaaaaatatattgtcatgcagttcggaaattgtgcgcgtgaaaaattattaaaaaaagaaaaatggtgtaccgaatgtagcctaatacttagaaaaaaaaacgaggtaatggtttccgcatcaaagacaaggaggaaatgtaaacacagcactaagaaaatctcgtgtttttcttccacgccaaatccattctatatgtataatactagcacgtcaccgtacgtcgacttggaatttcttgataggcctgccatggttggtggagtttttttaaaaaaagaaaaatctcagaaacctatttgttgaagctattagttcgttgcaagtttagctcgttgttttaactttactagtaaaatgtccgtgcgttgcactggataatgtcgcggcaattgaagtttaactgaacgattttttaagcaatatagtatgtcaataataatcgcagagttttttttgacaattattccacgtgtatgtgtataatatgaacgatgtacctgatgagttaatagtgtgaatgccatggtcattttcatgcaagaggcaatggacaaaaaaattgtgattaacaaaaaaatgtatttaaaatagaaaattttcataataccaataataatcaagatggataaaaaatacttttggatatttactaatagccttgtagaggttacgcctgctttctcgcttatgtcaactctcacgttgtaagcatgcgtcttgtttcactatcatatatggacccgcgttgagaccggtatgtgacatgtgaatgatagcacacatttttttacaattgatattttttatctcaaataaatattaaagtgaaacttccggtgattttgatgtcaacaataaaaaataataaacaaaaaaaatcactcattgtatctagcatcagaacagagccgtagttgtcgccaaacaaattgagcactgactccaagccattgttgatgcgcacactgatccaccaccagcgcctgaatcctatcgcctctctgcctctatctcacgcggatccgccgtcagcggttacgggaggggcagattcggcgaactcttctcatcccacactgatcccgtcatctctccgcctccctatcgcacggattcgctatcggtgtgcgacgtgaggagtggattcgacgacctcttcccctcccgcatggatcacgtcgactctctgcatcgagaggaaggataaaggcaaaaaaacgatggatggaaaaaaaaaggaaaaggcaaaaaaataagacggacgaaaaaaggcgatgaataaaaagcggatgagaaaaagggtgaaaaaaagattgacgaaaaaacccggaagccttatgtaaatccccgtgcgtcgcactgtgtaatgcagagtgattgaagtaggattttaacgatttattaaagcacccaaccataatcataagaatcagagatatgttcgatgactaagaagtcgtgtttgtttctagacaattaattttccctacatgtgcgggattgttagcaaccgaatttggtagtatcagcgtcggaggtgaagatgggatcgaagcggagtcggaaataaggattgttgcgggaacagagtaagaatcggctggagtccagatcggctacgactaaaatcgactaaatctgaatcagactgggttaggtgatacagccgattccggcaatacgacttggtgtacaacatatatgcttcaagatgattgccgcacatggatagagtcctgagaaggcaattgtatctattaattaggatgttttacgtaatttccttagagatatgcttagggcaaaagtctgccgcaaagacttatgatatcttagagtttgttagagataatagtcgtgtccggtatggacatatcttataattctcgggtataaatagaccccgagccctatgtaactaaaagaacacacgttcaatacaatcttggcgcatcgccaccctttttgctttagttttatttcgacgagttattgctttcgagttgagctgcatcggtttcgatcttcaacaagaggtaaaacttgttatgacggcttgcgttctcgggattagtgattccatctttatgacactctaatcttgtttatgtaattcgccgagttatcatatatcctacataatccctggcaatattgatatctaacctacaatcggctaacatccgtcaatagaaggcagccgattaagttaaataccgatgctgacttagattatataggatatctaccactctatgacacatccgacggcttgattgtctagatattgtccttcttttcatacttatagctgcatcagttaagtttgatcttatgagtcgtgattagaatctcaatctctactacttctcggttgctgattagggtagcatcggagtttcagccgatcttacttgatttaactactttttatcctatatgcttgattgacatgttaaatctgccctttacgttaagatcttgctgcatttaagtatgttaggctgttgtttagtatattctacttgctttgatatcttaatataaggtggtatcagagtattagccgatacatgctagatctatctgatcggttatactatgaacgtatatagtctcattattaatatatatttcgatctaagtgatttatactgtctcggcatagcgaccgatctatcccaatcacttaatttaagtatatatcgatataaagattatatattgttaatatctgcagttgatcgagtagatttagtcccttcttatttattaatgactgccgatcgatgcatatatgacatcggctcaaagataattgatatgtcatcggcacctagccgattgactatcatttatagatttaactgcggtttctttgcttctatttcttgttgattacaggatcaaatcaactggcacgctagcacacccgaatgcgagctttggacctgtactggagttaagcagatctcccaggcctcgtgttttctgtcaacagggatgtggatgatgcctctgacatgtggttcggatggttgtagcgatggaagaacgtttggaagaacattacaattgtgtttgcgcagaaggcgacggatggaaatttatgtgatgaacataaatattgatattttttaagtaggtaagtttaataaaaaataaatggaattttctggtaatctatgtgctttaactatgagaatatatagtacgtgttgagacatgaaaaaaatgtgtggagttaaaccgacgacacattagaattgtgaatatcgatgctacttttttgcattttattttcttttctgaaacctttatatcattttttataatttatgatttttgtcttagtaaatattgaagttaagaattgatgttttttatgttaatattagaaaagtaaaatagtgaggaggtgatgagctgttgcacaccaccaacctgaccagctgccagctctcactttctagatagctcgaggaggtcagagaaaatgagagctgttacacttacacaccactctctctctctctcgttctctctatttctccctgttttcctgtgtctttctccacctcctcatatatcgccagcagccactcctgctcaaagccgtcgttgccaaccagatccaccatgccaccacctgctattgcatttagcttcttcgatagtgcatttccgtattgagacggattcacccctcctcgcctggatcccatagtttctctgcctccttctcgcgcagatccgccatcgtcggcgacgggaggggcggatccggcgaccccttcccctcctgcacggatcccgtgggcggcttcactcctcctcgcttggatcctgtcgtctctcctccccactgtcgcgcggatccttcgtgggtggtgatgggaggtgcggatccggcgatctcttcccctctcacacgattctcgtcgtctctccgcccccctctcgcacggatctgccgccagcgacgacgggagggcggacccggcggcctcccctagggtgacgacggcaattggtttcaagaggtgccgatgtccatgatgagaccgtatgcgtctcatggtctccatcaccaaagccgccgatagcgccaagaagatgtacattgctcttgagctcccccgatccccactcgttccatcaccatcactcaacggactccccgctagctgtccggccggccggagaggagggttcaagcttgcagacgaaggtggaccgaggagagcgcagccgagtggtggcactgaagatagtgggcgtttcttcatgatttcaggtgcgttctcggttgattaacattttcctagctttttgattacacggttagacatgattttgtctgtgtatgtgcatgtgggggtccgagggatatggatgggtgttttttttttttgcttgttgggggtattggtgtaaacttatcagatatctaaacatagtaaatttttttctcctgtaaagcatatctgattcagtttatctaagtgcttaagtcctatggctgccatagattggggttagttttgtccttaatataggattataggactacaaactctttgatgatcctgtttgtgtgtacctgtgtatgattacttagactttgtaggagctgttctgctattttcacatgcaaactttttatccatttttcgcatctagaattattggtcaaccattattgaactcatttaaactatatggatctgaagtttttatactgaatatacctcattagttgccacacaaggtcatatcttgttacaaagtcagtgattctaaaaattaatttgagcatatcatgtctgtggagtagttcatgttcacttttcttctttcggaatttgtgttctttgtttgtgagaccaacatcttcaggattgattaagctgttatacagatattttaatcttttagacatatattgcttgaagaattgaatttgggaaaaatgtgtagtatttcagcatccttgattaggtcacacatgttttgacaaaataatatgttttgtaatcattatactcaagcgtatgtgaaaatagtaaattctggaacatgttgatcagtccgaggttgggaacatgttagttaggtaacacactgtccatctgctctatgttgtaggggaggagcggattgttgagtggattcgaggcagagatggtggttaggatggagtggtgatgtcatcggaggttgtctcgaatgctgcagtcgaggtgtctgaaccggtgagtttttttaagctgatatgagctttgctatgtttttctttgtcagaataattagattggacaaatagtttatttgatttgtttggtttgagtggatcaaccaagagcatatgtctaggtggagaagtgtattcattaaaaacttgtcctgttactctatattggtcgaatcttgatgcgttcttctcggtggggctcgtggacgatagcaatgttccagaatttactactaaaattttagtagtatttcttaagtaggagggcaaattgtgtttttatgattatgttatcatgtagcttcctagtgcaagaatctagtcgataaatactatagtgaacaaaagaatggaattatttccattctgaaattctaaacatacatatacatatgctagtctgtaagtgagaaaatttgtcaggcagcttaattcctggactgaactgcttgttttccttttttttttgcccccttaaaatgcaatgatacatcttgtgactacaaatgccattattaattaccagttgatcatcttgataaatgagaccattgctgctagcttgatctccaaaatcttaggacgcccaacaaaaccggtttggtgctcaacaattcagaaaaatccaattaattcagattatattcgtatgataattgtatggtgtcgattatattagttataatgagcactaaggcaagtgttcaaattgactaagaattctactatgattttgctgtcagggttatacaatagatcatgcattcgattcccgtgttgagggatgttctcatgatactgggcagctattgttatggatttgtgtttgattatttattgaattggttacttttcatattctctgaatttagccttgaaggttaatcagctaaaaattatcatgtctggctctatggattaccagaagtatctaaactactcatttttctatgtcaattcctgtagaaatctattttccaacttcgggagtggaggagaaactgggttcatgttttcaccgccgctggtcggaaattggtaaggtttttgtcatgaaattaccaatcttaattgaattggttagttttcagtagtttgaatttagtcttgaagcttaacagctaaagtaggaaactcaacctctaaatgataaatgatactgttcatattgatatttgcaaacattcaagtactgtgaattttattacctcaaggtgttactgtgaattttccaatcaatatgacacggtggttcaaaaattgcagattaaatcaaatcattaatttcatgctactatgatatgatctcatattaattttgttacctcaatgtgttaccgtaatggagtagaactgcattagaaattcttgagttatatataaacctaatggaattgtaactgcattagaatttcttgagttatatataaacctaatggaattgtaactgcattcagggttcagtttaatgataacgtggaagtggcttgacccccgaggaagagcctcgtgatttgtatttttgtattttcttgtgtgtttctattatttctatatgtatgtcttgcctgtgattgtattcgtgtatgtgtatttttcccctgcgagagaaatctgtaaaatcgtgttagtgtgagcgctaaaaaatagcggtagaaataacagaagaaaaggaaaacggaggacttgcggtttgtggccttgtgggcttgtggtgcacctggacttgtgggttaggctttatgggcttgtcgcttggacccgggcttgcttgtgggcctgtggacagatgtggcctactgggcaatgatcacacacaaaagcgcgtacggacgaaaaatcggatctgtgtaaactgcgcgtacggacgaaaaagcgtacggacgacaaattggtgacgaaaggaaaaatccgaatcttttagttaagatttgtctaacaaatttgactccacatatatatccctcatgttattttttttgaagtcagacctatatatcattcacatagtagatagagttatatttctttgataaaaaccatttgttgttttggttttgtaaaataccacgtcgaagttatagcaaagtgatagttcaatcgaataattgtaattttccaaattattatttttataatatcgcaaagagttcaatacaaaggatggtccgctaaagatggtttatagtttatagtttaatcaacgagaggcgcggttttccacgggagaaaaatgcgagtgcaaactgaaggtttgggatgcaacattcagcaaagtcacaaataaattatccaaagtcaattccaaatacaaaaaaaaaatctaagtaagaattacacgagattgcaatgaacgagcacgtcaaaaatcactaagcataacactcgcaaagacctgacaatctacaagacgatatcaattcgatcgggcatgcacgcaggtgcatgcagctacggtgaccatcagacaccgtacacgaagaccggcagcagcatggccgcgacggcgagtccgccggcgcctagcgcggaggcggcgccgctggggtgaggcggtgtagggggagcgttcgacggcggcggcggcgggctggccggcggaggcgcgtcgtggccgatgaccttgatgaccatcctctgcccacgctcgcagtggccggcgacgccgctgatgaagtagaagaggccctgccggtccagccccacctccgtgtcgccgttgttggagaagaagatcgggtgctccgccttgcacttgttgtagtcgtcttccgtcactaccatcaccgagtccttcgcgtacttgaaatctgcatcaaatgcaaatcaatgtcgcgtacttgttatttttattacaaccggtagaagttgaatttaaacttaaatgtttatgatgtaatatatttcatattaatatattttgtcaaaattttttaaatttttcgatgactatttaggtggcatgcacgaaacgatgaatatcccctctagagatgaaatcactttccctgttcattgccgacagaattattcgaaatggagattgatcgatcgatcgagtgatcttacggacgctgtcgccgacgaggaagcggttcttggacgcccagtcgttgtacacgccggcgtctttggccggcggcacggcccagccgtgttccccaccgacctcgaaggtggtggcgccggcacgccggaccgatgcgccgaggagggcgagaagcagcagcagcgcgggggagacgaggtggttcgtcgtcgtcattaccgatcgcgagatggtgcaatgcagagggcggagagcgaattaatagcaggtaaagagcgcggatggtcgagcggcaagccaggagcccaggtcccaggaggaggaggcggcggcggttttggagtcttcagccagggagggaatagtggagattgcgactacgtgggccgcattggcgtagctgcaatcttgcattcttgcatgtctagtatgactcggcgattggttgcctcgtttgaccgacgtgccaatcaactgccaactgctaacttggttctcacttctcaggctctgagctgatgggcgtatcctgggcctaattgttgtagtggaagttgcggccctactagccaacggcccagtgcagaacgcagagcaaagcgaacaagaactagttttcttttttataacaggctaaatattgattacccggcttctggagaaagctaaaacaaacacattctgaagaactactactccctccatcctaaaatataagaatataaaatcagatgagataattcttagtaccataaatatggacgagctataggactaggaaatgtctcatctaatcttatattgttgtattttgagatggagcccgtacacagccgttgtatgtagacgatgcactggccagtggcagcctggcaggcagtacgatcgtatcggatccaacggtgtgagatgcaccgagccctcctcgctggcaccggatgcgtgtaaaaagatactgtagccctagtacgttcgagaatccgagcaagcacgcgactcccgtattgtagtactcctaccctatctcgcaccaaggagggacagtgtggtgacaccaaggacaaagcatggcgtccccatcgggagtagcggaagtgtatcggcaagcgccgtgctctgtcggggccgggcgggctaccgcgacagcagcggccgacctgaccttcacctgaccctgccccggcgcgaccttcttccgcttgccgcgacggcaaacctgtgtgccccgcgccgcatgtgcgtgcccgcgagatcgcttgcgtgacggctccgaccaccgcacacatgggcgatgtgtgcgcgactactgtactgtgcgtgcgcgcgcgtgggcgtgggcgggtggtgcttgacctcgatcgcctgcgcggttgagtgcgccacggcgtcctcgtcgtcatcgtcgtcgccaaggccagcgcctccttgcgcctctcggcaagccaacctcgcggctcgcgcccacgccgtggtggcccatgcgggccgcgccgctgacattttcgccgtacgtgcggccgcggttcgatcgccgttggtgccaggttgctcgttctctcacgctggttgtttgtacggctcggctaagctactccctagctatgattcccccattcatcgtaaccacatcttctaaagtattaaatgatgcgatttatacaaaatactttttatataaaagttttttttagaaaaataaatgaatctaaaatttcaagtttgtactccctccatcctataatataagagattttgagttttttttacatcttttgaccacttgtcttattcaaaaaatttgtgcaaatataaaaaacaaaaagttgtgcttaaaatactttagataataaagtaagtgacaaaaaataattctaaatttttttaaataagacgagaagtcaaacagtgcaagctaaaccttaaaatctcttatattatgggacggaaggagtaatacattaacacatccggctctatacaagggtttgtctacctagataatcaaatgttattatattttacaacaaagataatacttaattattcgtgcattaatgttttgtttcatttcgctcgccaaaaaaaaaaaatctgagccataataagctgattgtttcattaatgtgtctgtttcaactggtgaagtcggtaagagagattttcttcacaaagttcctcatggtatacatacagtatgtatgaagccgcaaaattacataggtaggtgaacagttgccacggttttcccaagtttttactggattccacatctgcaaaagggtgcgaattgcactgtgttctcatatgtggcaaccttgacacacagatagtagtaacagctggtagaaaaagcaccaaaccactgcatttggctgagacaccaccccatgttgccctgtacctgtagaactgtactacttccagaattatacttgtatttatacagtgacataccagtatggctacggacgacacacggtggaaacggctatttacacggcgtcttttcggcgggtcccaccatgatgctcccgagctccgcgttgcggaggcacagcgccgcccggaacacgccgttgacggcgtcggacagccggtccaacggcgccgtcagctcctccgtccgcctctccacctcctgcaccgccgcccgcagcgccgcctcgtcgaggtcgccgtcgccgttgtcgagcacggatttgagcttgccgacggcctcgtcgacggcgtccacctcgctgggtttggtggcgagggcggcgagctggatggacacggcgttgaaggcctcggtccacgggaattcgccggagaccagggggaaggcgatctggtggagggcgtcgccgcagaggacggcggacgcggccgccgctgcgagcgaggagacggcgtcgacggcgaggaggacggtcgcggcgccggagacgcggtcgcggggctggtcgaacgggagagaagggagcggcgggggaggcgacgccggggcccgctcgtcacggtcggcgagcgcggcgcgcgcgcggcggaccgaggaaggcagcggtggtgacgacgacgagaggaggtggagcgcgaaccgggacagcaggcggcggcggcggagccggtcgaggcgcgcggtgatcccgttgcaggcgtcgagcagcgcgaccccggcgtcgaggtgcgcggcgacggcggccgcgtccccctcaccagccaacgcgggaacagcgtcagcgagggcaagcgcgaggagatccgcgagccgcgccaacgcagccaacggcgacgccggcagcggcagcaaactcccgagcctcgcggacagcgcggcgccgaaccgggcggacccgggaccaccacccgccgccccgggcaccgccttgcccggcctccgccggtgatccttcacgccgccgccgctggcgtggaaagggagaagcgcgtggtacttgtcggtgaggaacatctgggttgctaagggtgatcggatcggattcaggtgaagctcgcggcggagacgaggagcgaggatgtggcggggagaaggatataaaggtggcggtggcgtcgcggggggtgtgaacggtggcgaaggtgaaggtgacgggacgtgaggcttttgtccccggcaagaatgcgtttccgggaagggggagatggcctctctctctctctcggctgtgaagatgatgggagggcggcagcgtgggcccgccgcgtaagacgcgtatcggaaacacttctgaataagaattcgccttttcactcctccacgcctctctcgtctcaattgagataacgcagtactgcagacgacatgtgtccctctcgtctctccttttggtatcgatcgagaggggaaaaagaaaattcagaatctaattagggttagctctctacttgtccattttaatactggacttaatcgagattatcggtaatccaccacatatatatacttttacttcaagtatgcgcaatccaccacatatatatacttttacttcgagtatgcgcgtggcgtcatctactttttaccttggcatgacgttttctttctgaacattgggatcgattcttttttttcccttcttgttttagcgatcttgtaattgcacaacagcacaccgtaggtacttggcagactggaatgaacacatacacgtaataatttcttctcctaccttgcgggctaaagatatacgagcagaacatactggaacgtttggctaaaccttaaagatattttttttccttatcgtaccattaagggcattaataactagactgggatcactggcttattacccccactaatagagctttcatctttatgacatttgatcttacaatctccaggcactcaagctccgtgcagggccgcgcgtttccactggtgacatcgcatcctacatcatcgtacaactacaagtgcaaggcttgcactcttctgcagttcacactggactagtaagttactgtcagatggcatatgtgccgactcgatcagctaggcttataaacaagaaaatgtacgggctaataggtaaggatggggccataatattttctctgggtacatattgatcaaagaaaaaaaaaatctcctccgatatgcaagttctactagaatgtgcttctgcgattaaagtcgtaacgaaaatttcataggaaacagttacaaaaatcatctttatgacatttgatcaaatcgattccaatgccaggcaaatgtggtttagttcctaactttttcttcaaactttcaacttttctatcacatcataacttgtctacacgtacaaactttcaacttttccgtcacatcgttacaatttcaatcaaacctttagttttgtcgtgaactaaacacacacccaaaagctgatcgaatcacaaagtagcctagcctaggttatgacgagtccagcgtgaacagcacgcccattttatcgtgatttttctttggggtgtgtgtctgtgcccataccacgtcattttctgatttttgccgagccattttactttacttaccgtggatgccacacaacaaaccgtacatcacttgcagggaagatacagatattttacccgtgcaacgaaccaccccgtctttgagggtgtcgcgcacacgtgtaatgggtatgttcccatgttctgttacgcccccattctgcatgacgcaacgctacaaacagcacacttcacttctgtatcatatgcaatgcaataccgacatcatcagattagcagaagtagcaaaggccatacctcctgatacctctcctgtgtcctgatagactcgttgggggtggcaacagcaacagcaacaggtgatggcgaagaaaaatttaccatgagacggggtccagtgctacagttgccaccaccctagcttcgctttggctccacgcatccgaaacggtaggagagaaacgtgggcgcccgttttattcttcgcccattggctgttttttgaaaaccaggttcgggccatcgactttgacctgctgaaaacttgatctgcacacaacatatggataatgagcgataatggtaatttgaaaaactttataaacctgaaattaaggagccgttgacgcagacccttttgaattgacgtgtattgtaggttcagatggccgacttggccccgttgatcttgaaaagaatgatgtacaagtgggataggtacatctaaagtttggcatacataaagtataaactatagcgatctagcaagctagtgaaaattccaaagtttggcttgtataaagtataaactatagcaatctggcaagctagggaaattcctaaagtttggcatacataaagtataaactatagcaatctggcaaactagggaaactctaaagattggcatacataaagtataaactagcaaactggcaagctaggaaaattgtgaattcaacgtttctggacctaaatatgaaaataaataaatgcctatttaacaccggagtatatagcaaatagaaaaaaaagaggcattttgcatgtaacatatgccttgatacttgaggagaaaaaacaatgtattactcagagtgaaagaagaagataaaatcaaaattagaactttagaagtatgaaaaaagaacctgcagatcagcacacacatttggttctcgttccactttgatgctttgatgtgcttaaaatgatctcatgagccatgactatgtggcaactcataagtcctgtctacaactgtaacatatgactgaaaaacacgggggatttagtgtgataaatgatatgagcattttcagaaaaccttgcattagtgcgtcataggcaatagaatgtctaggacaggatatggtatttatttatttgccagatcaatgttggcacacaatgaaggagtaccagatcaacaaagctatccatataaactaaaagagttctccttccacacactgtatcacacaggaagcaaatcagctaaacatcacaatcaacacagctaatatttcctgttttttcaatttttttaattaggtagagtatgctaggaatgttcttatcatcttgcatgtgctcaaaccaatccaggtggtggccccacaatatcaaactttaagagtaatctgttgtggcacgaaagaaagcatcttccctatcgctaatctggtgtggaatttcagcaaggtggaaagctgttgccggattggcccggtcagctctgaagaccggaattgcaaattcagacttcagcgttgtgggtcatatgtgaacccactcaggcgacaaaaatacctgaacttcccgcaaaataggggagcaaacgatctgttttgattaggtagggcacacatggagtccatggtggttgaaactcagacataagataagaacaaacttatcttccttgacaaaaaaaagggagaaaacaccatggtttaccaaaaaaaaaagaaagataaaaggaagtagcatgccaaatgtaatgtatctaacataaattaagtcttggaaaataaaaacagtgatgactgttattgggaaatgcttggctactaaatctaataaatgtgttagttcataagtgatggcccaatcatacattattttagtcattttacttgttgcctctttccattgtgtatgttcagaattcagagaaatgtctgattaactggcacacatttctcaacttacaaaccaaccattgttctgtcaatatcaaaataatagcaaacagaaggtaggaaaatgtgagctgtcggtcaatacctgagcttaaaaacgacaaggacaataaaaagaaaatacttactgtaggtggaaaacagcaaagctactcaatgaggaaatagcagtaagtttgtgcttccacaaaaccagtcaacacaaaaaaagtgaatgcctcttccagctcaatcagatgctaccaaactcgagttccataggatgagcttgcaactgctagcaaatatacagtaaataagctgaggaaactaagttctgaaccatggtctgaatatcatgatatgttttctttagttcaacggacaaggcacccattaaaatttttgtaacactcaaaagcaccttctttgattattggagtgcacacttgagattaaaaaaagctgccgctatacaaaataactaccaaaggctaaaaccatattcaagtcccactttacaggtacacaagcaacatatgtaagagagagaagtacacaacacaagaaaggagtctatttaataaagcacaatcaaacacatgctaaaatattactacctatgttcttttttacttgtcgttttggacattgacacaatctccaatgtatatgtctcatactctcatcattactttttctagttatatatgtataaaacttattaaaaatataaccatgtgaatgtgtttttcatgacaaatctatcaatgtcattttcacatcttaacctttttttttaatttttaatgattatcatatcgagatttgaatgtgttctctaggatgtcatccttttgataacagaggtagtacctctccaatgggcacctctttcactctttgtcactaacttcagaagaagaatgtacgcagaccgtaaaatgtaaatggatttcaaaagatattgaaaaagggtacataaaccacagattgagttatttctcttagcatatcagtactgattgagaggaaagttgtgattaatgatatcgacaatttaagcatttgtgaggttaatgcatgaaacgtatgcttaccttgcatggcatctgtttgttaggaacccaaagggatgaaatgatgaacatgtcagcaaggtagttaattacatccaataacagaaggaaatgttttgatttttgacatgtagaagtgtggagcattgccatccactgaaatttctactcaagccatcaagccctgtcattttcccattagttgttagctttcaaacgagttcatctagaactctggaatacacagacgaaaagaaagaggtagatatgtaatatgttcaacaacttttccaaaaaaaaaaaaaatcctccatagaatatttagctaactaaattacctcattgttgaaattgtgatatgcagttagcatcttcaaaagaaataagatggtaggatctccctgaatcctgatacaaatatccgcttcactcaggctcagtttcaactgacaaacgttacggtgaaacagaaccatcaatccataaagtctttggttgactgcagcaaccgtcattctgtgacctatcatgcaaatgaattggtcatgatagtgtaaagtaacagaaacgttgaacactggggcgaaagttccccacataggctcgtgtcgctccagccccaggggcgatgcgagcgcccccacacgcgccggccgccgccgcgccttccccctccccttcgcctcgccgccgcccgagtggcccaccggaaagccggccgggcgcaaggacggcggcggcggggcatcccggcgcccgtggcggcggaggcggccagatccggggctggggaggcgacggcggcggggcagagaaggtggcggcgacggggcggacgaggcggcggcggcgacggggcggacgaggcggcgctggcggcggccgacggggcggaggaggcgctggcgacggtggcgacaggacgggggtggagctggcagcagggacagggcgggtccggcggcgcgcgacgtcaccgaatctggcaacctcctcgctggatccggcgccccccagtccggatctgtcctctccggcgtgggaggccggatcccctccgtcgaggcggcgaccggccagcataccgacgacagtgtgcagccgggtgtggaggcggggaagaaagagaccggcggctgtgtgggcgcagcgttggcagcgggacccgcgtgagagacgcggcttgaggccggcacggcgcgaagacagcggcattggtccctgtgcggcgacggcgcggtgctcggcggcgatgacggcggtgcctccccagatccgcgcctctcgaccggatctagagggtggtcggctgtggtggtcggcgacggcggtcgacttgcgacagctggtgacggcagttggcaacggcggcgacgggtggttgcggcagttggcggcggcgacgtcggccgacgacgccggcggaggacttggcggcggcgtggcggagggcaacagtgaagtggccgctagcagtggcggtggctcgcggagacggtggctggtggtcgcgacagcggtcaccagaggcatggcggccttggacggctagccgagggcgtgggagacggctgcatttggccggcgcagcatcgtctggtggaaaggtcggagaccggcttggcgcaaagaggcgcagccgatggcagtggaggccggctagtgcgagaggcgcgggcggcggagttagaggccggcttggcgcgagaggcgcggccggcggtgaaggaggcgacttaggtgtgaggaggagctgctggtgggtgtagcgcggtcttcggcgcacgaaggctggccggcgagggacgccggtgcaggggtcccacatgtcggtagagcttgtgtggtggtggagcatcggtgtgtcagctgtggatcttacccctcaagggtgattgccggacgaaagctcagtcttggctcctttgagtttcgacggacggcggtggcagtttttctgtcgcttctcttcttgaagacgtcgttttggcatcccctagggggcaatctcggttgtccctttgttggtctagtggcagccggtcacgcttagcggcggccggtccgatgctagccttctcctgggcttgtgtgttggcgatgtcggtgtgtgggtggtggtattttttcctttttcctgtttacgaccctctagggttgtaatcttgtaattttttcctgctctatcaatagaacttcgcactgtctcgtgcgagtcgttcaaaaaaaaaaagtaaagtaacagaaacttgaccctatccgtcttggttgatgggtttgctccaatcattataaaataaaccttgaacaggaaatcagtctacaatatatacagaatgcagtccttcgggtgaaactcaaatgtaactggcaggatatgataatatgcaagtttctgattcattcgggaactggtgaaacatcatatcatcccttttttgagatatcaccctctgggaattattaagcagtttattcaattatgaataaaatctaagagagtatgtgtaagcttaaaagctgtggttaagtgtataatttgtccatgaacaaaaaaaaaggaagaagataacattgaatagtataaataataatcagaagaagaatgagtgagttttcatcaatgttctccattagatatttcatacctttcgcattaaggggattcaagctgtatagctcaccaaaatgatgatttcctgttcatatttaagggaggtacaaagaaaataacaatattttcgggaagctaatgggtttacaaggaaaattgaaatggtgcatgcattagtgaataaaatagtcaagaacaaaatcatgatggaatcctggaagagctctgagagagcctaacaggaacaaccgcccatatgctggtagagtacatcatcattcgtatggaagaatattttactgcgctaagagtatcaggggtgtttgatatctatttctgaaatgaaactccgtatagaacaccataaagaaaatcaaacattagcagtctcaggtagatttaaaataacatacgggattcgaaagaaatgtttgaggactacagaaatctctattctggtgaatcctcctgatataactagacactgctacgtgctcaactcctgtaaaatccttgaaaaggatacataaacgctgaactatatatcatgtggttttcgaaacgatgaattcatcaaccaatacatacaaaacagtaaacagatgcacgccaaaccacacagatgaacttgaggcgtacaagaccagcaacactgagcttgagagttgaggcgcgctacaaaccaatggaatcagagccttaacaaatgggacacgaaatgccatcttccaatctccatgtcaatgtaccaaacccaaaagtctgagcggttaccgaaagctcacgagttgtcgaattcgttaccctagaaaaaaccgcacgcgcatccgtacgcaagctaagcacgagcatacacgcatagatagagaaaactcggggtgaaaggggagggggggaatccgtacattacgcgctgctgcccgatcgagagcctccttctccggctccggctccgccccggagatgtccccaaactccagtagagctcacccgcacctcgcggctggagagactcgcggcgagaagcggcagcctccggcggggagctgctccccaaatcgcgcggcggccggcggcgagagatggagggagtgtgttttgcgtgtgaaaagcttctggcggaagctatacgatggttgggccttagtgcggggccgaattagtaggccggaacgggactccggcccacgtgcagcgtgcggcccgttctagtttgcctcacgcgcaccgttggaaattggacgacgtcttcaacgaaaaatcaatgacatatgatagcgaaaaagagacaatacaatatatactggtgagaagtgttatacgtacgagtaactcatacatacgactagcgactagcgtacgtcttacctcatcatcagactaatcacgtagcttggattaccttcatgtgagtccagatttttcagagctagttatgaacttgtggttgtacacttgtacgggagtcgtatgcatagttattatgtatgacagtttgagggtctatttgggaaagtttttagcagccgtagcttctcgcataatctccagctcttcaaataatgtagactgtcactcagattataagaatatgaagttataaaatcaataaaatgatctagaaaccagaagatgaaaactcggattttcggaagctggttatcaaccaacagattctcagaatcttaaactctccacacaggacctaatacacactgtacactgctaagaatgattaaggacttttctttaaagatgatggaagagcattttcccggcctccatatagaatgagtaaaactaactagacaggaatatttccattgtttcactaaactattcactattcagaattttcccatccgcccgtcagatatacatttcttgccgtgtgaaacttcctcctatttggatggactatgatgatgatgaaacatcagcattggcaaccttctcccgtagcttttgtacacgagcctgaaacagggggggttgagtgtgtcaaaatggagagttcacagtgttacaattgccgtgcgtgtgatacagacacagaaaacactaaccctgaacgacttggtccggcgaatggatggatcaaggtccagggcatcagcataagcatcctctgcagctcggtactcttccattgcaaacagagcatcgcctcgtgacaagtgagcctgcatagagcagcacagccatgacaaataggcccatggaaaaaaaaaaacagatagtgaatttaaagactggctctctaagaaactccattttatcagtgcatagaatagaacgttatggtgtttcagactttctgttaggcagggggaggctccatctacattatacaagtgaatttcattgaacaccatgtgcgaacgtaagctatatgtcagagacatataaatcaatagaactatacttgctatcgcccgtcatcttttttttgagaatgcgcaaaagagctgcgcatcttttttattaagattggggagaaattgtgacatctttacaaagcaactgaaatagaaaccgaaaaagaaaggtaagaaaaggaggctaagctataatctcgtgacatcaattttgcgaccacgacagccatgatctactatgggagaagacctgctagtctccagagggcggcctcctctgctgctgccctagcaacctcctcccacgatcgctgcttctggttgaagaccctattgttcctttctttccatatggaccaagcgcctaggaccaccactgtatcgaaaccacggcggagttgctttgccactcccttcctggatgccgaccaccaagagatgaaggaattctgagaggcggggaagaggtccggacgcccaatggtattcattacaatccaccagaattgcgcggattccgggcaggaaatcaggatgtggtctattgtttcttcttgttggtcacaaagcacacacctcgccgggtggggcaatcctcggggcctccgtcgatctgcagtccagcaacgacgatgagccacgagccacatgaagtaacggcagcggggaggcgctttgtgccccattggtccatatgaaggctgagggcacttgtgccccgttgaattgaaaattaagcatttcactgtcatgccatccaatgatctaaattctgcaatcactgttcactactatttagtttggcaatcatgcccagccatactgtttggttttattgatcattgtagcaacctttcctctctgcataaactactaggtagccaggtaggtaatctgtatgcatttgcaaatgtttgtggcatacacaacagtccgcagcaaacaagttaagaaacaccaatgtgataaggaaaaaaaatatttgtattgtagcaatcaacagtatggcttggctgtggacgagtagtaacaagaagatgataaattcaatttacagggcaggtgtttacctgaggaaatttcggagcaatctttgttgcttcctcggcatcagcaagcgcaccagtgatattccccattgacaatctagccctagacctgcacttagcatcaagcattcatttcagttaacgcaaactctcattctcacttcccaatagtgcaacgaaggcagcatttcctaagagaaaaacataaattgtgaaaaattaagctatcacacatactcccaatcccaaacactcgttctcataatcaaagctacagaaaggacctgcttctgtacgccaagtggagaccgccaccagcattcatctcgatagcctgcagtgcatacaagcaagcaacaagttagaaattggaacaggaacactacatgatagtacctgtagcacgggagatgcagcttccttgacgccattttcaagagaaaagaaaaaacaaattggcaagcacactttgcttggtaagaatggggtgaatcctctgcagagacctcagtcaggagggcttccgcttcggcggcgccacccttctcgagggcggcctccgccttctcacgcgccgcgagcgcggcgagccccgccgccgcgtcgaatccggagtcgccgagcaggtgctccaggagctgcgcggcgcgcgcggcggtgcccacgtggccgaacaccgcggcgccgccgccggagacggaggcgccgaagtttgggcccgccccgcagcggccgaggcaaccgcaggaggccacgtcgacgcgcggcggcgcgagcccctcgagcgccgccaggacctcgcgcccgccctggcgcgcgcacgtgcggttggtgcagacccgaatctccaccgccgcccccgaagctctcgccgtcgtgggactccggcggtggcgcggggaggcgaaggagcaggagaaggcggttgcagccgctgccgccatcgccgccgacgaactctgatgaggcggggggacacggaggtggagtaaagtaataatacgttttttaaagggtttctttgcaaatttccgcggacattttccgggtccacgagccaaaccggatattctgatctcaataccgacccatgtttttggtgggccttacgaaagcctgtctctagcgagcccaactttagtgggcctaaatacggttagggaggatgtgcggcccatgaaggctcggcccattatactgcaactaggcccaatacctagccattcagagtttcggacctgtggctatcgcggaagggagcggcggcgaacccagctcggtgagtcgtcgtcggcggcggcggcgacggcgacggctaggaccacgtgacgcggatcagctcggaggcagcgacgacccatctctgatctccctcacgttcagaggcgcgaccaagcgtcgagggggagcgctcgacggcgaggtacgcgtgtgcagatccccttcaactctaggtcgcaacgaagcctcgacagtgttcccaaattttcttgatttttctgtcacctgctagtttgttgatctgcttgatttgtttgtcgcctgctagtatgttgcaactatcggtgctaatcgatttaggcgattcttgcacatctttctgtgttgactcgctggtgttagcctgttaggagtgatgctctctagctgttcgatgaaatgcctgataaaagcatctttccacgccaatatatctatacatttattcgcacgatttgttcccctttgctaatgtacctatcaccatcgatttgcatgcgataggatcattggatcattagattactggtgaatgtcgtataatgatttttaccatacaaagtattgaacaagaatgcaagtggcttaatggttcattgttctttctgatttctttttggtttgtagagtcatgcagggggcgcgtgttaatctgaaggggtggcaacaggctgctgttgcattcggttctgcatttggggccttgcttgaccctagaagagctgatctgatagctgctcttggggagactactgggaagccagcatttcagcgtgtgcttcagcggatgaggaacagtgctgaaggcagggtaaactcatgctaccctatatcccctaaaagtgcaggacgttatgtcgatgcatccatttgttgtgcttgaccatctctttatatatagcctttattactagcatattctgtaaatagtatacatatatactcagcttctgaaacagtaacaatttctctgccaacaaatgctaaggagcatatgatgattatacaccaatactacgaagtagatttttttgtgtgaagtagcattatcctttttacttggttgtttcagggagcaatgttatactgaaaaatggaatagtgtaggtcttttcataagctgtccattttttttgttgttcatttgttatttatgcatttaactctccaaaatatcttccttgtttggctgcagtctagacttacccattcaataaatttaaacctgcaattgctatactttgatgattttttccttcttgttacatcactgccatgcaatagcaacacatgccagctgaaaatgtgtactcaacactgtggacttctttcccaattgacttaactaagatactattcctacaggatgttctcctggagcgtcctcgagttatatccacacaagtttctcatgcctgggacatgcctcagaacacatttggtgcagcatatgctcagttcatgggatcaaggaacttctcaccggatgaccgcccacctgtccgtttcatggatacagatgagcttgcgtatgttgcgacccgcgcccgtgaagtccatgacttttggcatgtgctgttcggccttcctacgaacctgattggagagactgcccttaaggtcattgagtttgaacagatgttccttccaatgtgcatgctttcagtcgttgggggctctgcgaggttcaatgagaaacaaaggacactgttttttcagcattatttcccatgggcttcaaaagcaggtcttaagtgcacagatcttatgtctgtgtactatgagaagcattttcatgaagatttggatgaagtgaggaggaactggggaattataccatgccctgatcccaaaaggagcagtgtttagacttttagatcggtacattttgcatgaaagatgtctgaacttggttttcactttgtctacgttagtattagctcttccctttcaagaataatagcaagagttatgctattgatacctaaaaaaactagtaattctctttaacttagcatagcaactaagcttgcaatgttgatgttccctttaacaatagtgtagatgagttaattacatttttatgtgtaatactagctgaatgccggtacttcgctatggacagaagaaaacatatcataatattgtctgaaataaataaaattatattttccgtgagatgtgttgcccatcctctttttgcagcacaaggtacaactatccttgcatagttgcatgtgcaaaagcaaaattagaacctcatactggatcagaatcaaaattatttggcaggccccttgttgccagtggctgaggcaaaggtacctgaaacctccttgctgagttgctggtacacggctacaccacctctgaagagagagaactgcagattggtgcgtatcccaaaacgaacggcagaagtaaaaaaaactgagaccaaatggtactagtagtaggtagtacgtccaaaagctgcactgtaattatggaccaaatcaccttaaagttacagcaaaagaacagaagaaagaaagcatgcagcaaagggacaatggtgaaaaaagaaatttacatcccctgtcaatcttgctcatcttcatctatcttactcacaccgccaacgcaagacacaaaacgaaaaaacaaaagggagagcccaatcaatgcagtagatcatcaacttaatttacaggtgaaaaattaaggcgagctatgtagttaaatgcccctatgtgatgtggtggcaaatcttgaccaacaaaaagaagaattcaaagaagaagaagacgtattactgcttgatccatcattagcacagcctaggcaagcctctaccgccggtttgatggcaggcggcggcgccgaacgacgacgacggcctgccgcccttggccatcttggacatctgccctcgcatctccttgcacgctctctccagctccaccacccgattctgcatcttctgcaggttcagcttgagcagctccttctcgtccatggcgtccaggtccacgctccgggcgcggctgccgctgacgatgatcttcctcggcgtctgcgacgggtcaggcctgcagccgccggtgcccttcgccgcggcggcggcgggtctgatctggagcttggactgctgcgaggctagcgcctgcacggcgatccccggcgggatcctccggttcttggccaggtccttgcacgcctccagcgtcagcttctcgtagttgaggcaccggcatagcgtcgtccgctcctcgatggtcagcgtcgggtgagactgcatgcagacatagaataaacttcagtcaaatttgcacaaagttcagctaagtttcatcagcattcagcaacactctcttgcagcctagttatttaatttgcagaaaattcagcaaagtttcatcagcaaactaatgccttgatcaatggtactcgctgttaattgtagcacaattaattaggcccaatcatgcatgcagctaatcacattagatagtgtcaaggagcagcacgaaaagaagagaatgacttacattgtgaaacaaagtaagtacatcgcagagagaattaaagaattgtttagttcctttttgcgcgcgctttaccacgcttgagagaaaggcagtggatgcgatgggaaacaggaagcacaaacatgtaggagaggattaaagaaaggccatttgcacatagaaagcaccgaagccaggataaaggcaaaatctgggcagaccgggcacttgttaaagcctccctaggtttcattgctgataaacaaattggcgagatctcagttgcaaaaatgatcggttggccaagacgaaatggtcaccaatgtgatgggctaacgacagtgtcatggatcaaaagtgaaacgcagacagggaaaaaggttaaagtttacgtctgcatgcatgcaaataaagcttgaacgactatgtcagaaaaaagcagttgtatctatccaagggttgccaactctgcaactgtgaagaaacaaaggaccacagtccacagaaaaaaaaatgtgatgcagaagtgcagaaatgctgcatggattcctgaggtaagtatgtgatcaagacatagcgagtttcagtaagttgaaattatcaacttatgattttgaaacaacttaaagttagcatttttgttgaaatgggatcagacttcagtggataggactggtaggacagaggaatgtatggtggccaagtgacaaggtttcagatctgacgaacgaaaagctcacactgcacagtgcaaaagggttaaaggcaatggaattatggaaattggacaaatgaattgttctacccataacacaaagtactaggcgatctctctgtccatcattagcgtcccatgatagtactatcaaactttattcagtcctttgtaaaagaccaggcaagaacaggccaacacacaggaattatgcagtggctaagaaaaaaacagttcgaaacaaagttgttgcaaagaaagattggaaagatatgcagagtcctggaggaatggtatatccatgacagaagttccaatcaaagaagctgtattgaagacagaactgacaaaaatgtaaatgttgaaatcatagccattacgaaggtgaccttcaggtacagcaaaagcgtactaccagactactacctaatatctctccaactattaaccttcctatcacagttcttgccagtgtttatcaacattctaactgcctattgccacctccaggaactcatcatggctccaatcatagcgtgagagaatgctcctattcactgtcagtgtcaggtgaaattcccggtgccctaaactacctacaagtctgtttctacccagtcatgatcaatcattcacgaagtcagaagctcagagcagaacaagtaaacctcaaaatccagctaagggggtacagagaaatacaggattcacgtcgaattttccaaaatgtaaaatctggatgcttactagacgaccaaaatgccgtcttgtcccatgcacaacggtaaactttaccttggcaggcaaagaattttaccactgctcctactaatccaagactagactggtacttttttttttgccgggacggccaaaggatggccggccaatttcattaagataggagaaaagactagactggtactgcccctataattagccactcaatagcatcaagctttttgaacagcctatcaatcatgttcccaatcatgaattgaaacagaggtagtactatcctattattcataaacaggtattactattaggacgaaattaacatatattttgttcactgagccaaacactaccaccgaaaataacatttttttttgctgaaaaatatgaaatatagatttcatagaaggtgatctctttaattacctcaaggtagatatccaatgccctgtacacgccgtcgtagcattcccgagccgagtccggcaggctctcggcgacggcgaggaacttggacaccctcaggccatggtccggcgagatctcaccgaggtacttgtcgaccagccttccaaccttcctcatcctctgcgacggcaagtcggcctcctcctcggagccgacgaacaccctgaccagccgcatgaccaggttcacgtcgtacacgccaccgtcgtcgccggagacgaggaggtcgtcgagcgtggcctggtccagcatcagccccatgagcctctccagtttgtgcctgcactccttgctcagccccacggccgacacgatccggagcacccagaagaggccccggcacgagaacgcggtgccgccgacgagcgccacgccgtgcacggccgtgtcggcgagtccggcgagtccgccgccgccctccctgcacagcgccggcctgcgcgtggcggcgcggaggtagtgcagcaggaaccgcgtcaggatcaggttcttgttctcgatgccgtagcagccgagcaccctcatcgccttctcgatggtctgcgggcacagcgacgtcatgtcgtcgaaccaccactccctggcgaagcacggcttcatcgactcgggcgtcttggtggacgacgaccggccgaacccgagcgtgtccggcgacgacgagcacgacgacgacgagcggttcggcgtcccgactgcccccgcggcgacgggcgtctccggattggcggtgatcttggagaacagcgcggagatgagcctctcgaggaggccggaggcgtcggccgccgcggcgaatggctcgcagctcttgacggcggcgaggacgtcggcccatgtccagtagtagaggccgtccacgaatgcctctgcttgggtcaggaggttgcaggtgcacacctcctcggtcatctccaagaacacggcggcgcagtgcaggagcgggaggttggacgggcagagcgggacgcggccattgttgtagcagaacctggccacgagctcgaacccctcgccgccgccggggaagtcggcgagcttgacggacaggctctccgcccggctcgtcttcctcttcttcttctcctgcgtcaccattgtcctcaacctccccgagaacgcacacatgacgctctgcacatgaaacaacaccaatcacttgtaagaatagatgattcttgattacgtgaaccgatttcaaagatttacgcaggtcgcacgtacctgatgaagaagaagcgtgtgatggccattgatgtgcaccttgaggtcgcagagctcattcatggctcgagagagaaagagaaagggagggagagagagagaaatggaggcaatggcactgcagagaatggagtttaatagtatctaggagcaagtgagaattgggaagatttggttgcttggttgctgcctcagttcagttacttgggacctcaaggcagatacagtcacagctcacaagctcacagtgtagtagactagtagtaccacattgcttgagtgcatgtgtcctgtggagagatatggaggaacacctcatgatccctgagaagaaaacaaaagcaagttttggtctgggtaggcaacaggttctctgaactcttcactcttcaatgctgggctgatgggctctgcatgcagttcaaagaatgaaagggaaaaaaaagcacccctgccttccaaaggcacgagagcaaacaaacaaaaacgtccccttgttctattctaaaacagagagatctcatatgaaaataaagaaaaaaagagaggaaaaaaacagaggaacagagagatcttgttcatggccactatggattgagtgtttgcactgctcaaggagatgattcagcatctggatgctaagattgctagtgcgcctggctggaattgattggcaacatgtcaccaacttgacatcagagcacgcaacaaactgtagctatgcacccttatcctgtagtattactccagttcatgctgtgcatatttgtcaaagtgcagtaaaaattctgtggctaggcaacgaccaacttttgcaggatgaaagatgaacttgtagctgttacaagcactgttaaaagttttccccttctttttgctccctagtccctatactatccagacattctatggctatagtactgttgaaaatcctgtgctgaaaaacaagcttagagagttgagaggacatcaggacacatggcccttacaatgtattcaattaactaatcagagagagagagagagagagagaggtcgtgacatttgttcaggcatgtgtgctctgtcaggagctggtgcaattgcagtggctccatcgctccaaaaacctattatgccagggctgtcatattggcaatttgatatggcttaggccactcaaggctttggtattgtcttctccctaagaaatgggctttggagttttactggtgctcacagtcacaggcttatcatattccatgtgggagttggagaggagccctctttcatgcttaaattatctgtaacataaagtgttcatatgaaaagatgaggaggatggagtatggaccattgctactacctttttggtgacatattaatggatgtagctcaagaaccttcaaacaagaagaagaacaaacacgcaaaacaacaacttcttctagttcaggctgagctgtccgccggccatactaatagaggtaagcgtgggaagatttgccaagcgtttagtttttcatgttcagatgtttaggatgtctaatatcaggttagctgatatactgatataaacacatgagttaactaagggacaaatcaattgaaaggtaggtacagcatagtccactattataatcttatggacagaaattcagagggtcaagacgaataccgtgataagatattgctgcatatgcatccaatctagcacggcgagaacagcagggagcagcagtacgactagctaaggaatcccgctcacaagtgccagaagaaatgccactcgtgttagtttatcatcaggctcgcagcaactccaacatgtgcagtgttaataccaccatcaagtacatccaatgtggtactgtagaaattaaccacctagggagtagaagagtatggtcagttcgtgtttgatcagacaaacctggctctgaattggttttgactgtttcggaccaaaaaaactacatatttgaacatcgcattcgaggaatgcgaattcgacacattgtacttacaaaactttaaaccacaggattaacacgtcaaagaaatgctactacaatgtatgctactctcaaaatttcggttggcctatctttcagctgaactgattaaaaaaacatatgctactgcggcacctgttttttcggtatcttgacaggttaatctacaaccaatagcaatcaaaatcaagaacagtagcagccagcaacctgtgtcaagaaacatatgtctaacagatatccacatatcgcggcaattattcccgcggatggatcacgggagagggtttcgggagacaaccataggttggcgatggctaaaatacgggtgttgggaagtggagatgaatgttctcttggcgcccactcaccaactgaaaacggataagcgattgattctcctctccctggacgccacggcatcacctgccggtgttgctcacgagtgcaagagagaccaaagatgataaagaaatgccgtactcacttaacggccaccgttcttcctctcatcgccatcaattcagttagtgaagagaacctaattgcagaggttaattgctactacctacttctaatttttttggatgcttgactagagggagaaagacttacgttgttcagagttgacgatctagtagaagtatctgaactttgtacacaatctgtggttgtttctgaaccgaagcgcggagcgccacatttttatcagcttttctctccctgcatgttgaagaatgttcagtccaaaaatccaatggcgtgagcatttgaaaaagatgaatgatcaagtaaatgtacgggagaaagccaaaagccgccatgaatgggaaggtgaaacgagcaaaggagttcacctcacgaggtaaacgagatccgcctgcagaggaatggcgatgggcactactggggtctgcaggtcgccgcgcgtgcccgcgtaaaccaagtcacggatccgccgccccccaccccaccccagccgatcagtccaacgccacgccgccggcgtgatgtgggcggcacgcacgcacgcacgccctcgcgtcgccatcctctcgccgccgccgccggcgacggcctctcacatgctctgcagctgcaactcacacgcggcagcgaagcccatcccgtcgtcaggcctgtccatgggccgagacaacatcgaagcccgcgtctctttctgtattgggccagcgaagcggaggacgcgcggcccatctcgagtcccctcgcggcggcatcgtctcgtctcgcctccgcgtcgccgccgccggcgagaattggaaaggcgacacgtgattagtttaatcaggaagcttcgggagacgcacgaaaccgcgagcatttctgatttctcctcctctaattaccgcctcctcctccttcctctacgtacgaaaagccaaaacccaaattcgcttccccccccccccccccccaaaaaaaaattgctcttgcggcgccgcggattcttcgtctccaccaccgccctcgacgtcagatcaggtataaaatccgtacgcggggttcaatcttctggctggttgtttcgatctggttcctgcctttgatcgagttttgagggtgagggtttgttttggttttcgcttgcgcggttgcaggtggtgcggtcgatttgaatccatggcggcgacggtggcggaggcgctcgcggtgacggacgaactggccttgccgcttcgcgcggtgggggatctggcggccgccgcgggggtctcgcgggaggaggtggtggtcatcacgcagtgcgcctcgcttggtgagcttctcctcgtctccttgcttccctttttcctgctatcatatgagactccgatatcgattaggatttttcgtgtttagattcaataatatggaactgtgcctaaccctgttacgagcgtttgttctttgctggttaggatcagttccaactcaacaaatcgcaacagttcaatcgatttcaatcgattcatggtagagttcttcgaaaaacagtttggagctcaccattcctttagtttccgacgactccccttatgatgcttcatatgctaattcctatatagattcatttcaccatatatgggaccaaataggttatgagacagtgctattggttgacgaaggaaagaaaagagtttcatattctcacatcaatcatgaggagaaaattttggagatcatctccctatatgttttgtattgattatctagattcattagtggcaatattcaattctcacccatgactactactccaaaattggagtatgttccaaaatttggaccctacaaccgacacactgttttgctctgctatatgttcagtttcgatttctgttatgctttagtataccttatccttgtagtatacattttggtttgtcataagctcgttttgaacattccatgttggcatggttcaggtgggaagttaccttttgatgatgcatcagttggttctgttcttgctgtcattaagaaagtggaaaacttgggcgatctgttcataactgaaataagcagggttcttaaagctggaggcatggtgcttatacagagttccccctctgatcaggatgtatgtactgttttgccaatatactttattttgtaatgcttaatttgcactccctgatcttctgatcttctcttcatcagcccaataactctattcagcgcaagctactgttaggaggatttgttgacgtgcaagcttctgctgcaagttcccaggatagcgagcattctgttactgtgagtgatctagtgccacaatatgtgttaatgcttctgtgccgtcatactttctagtgctaactgaatcacatgcagattaaggcaaagaaggtctcttggagcttgggctcttccttccccctcaagaaagccacaaagggtcttccaaagattcagattgatgatgattctgaactgattgatgaagacagcctcttgactgaagacgacttgaagaaaccagaacttccagttggtactgttttatagaacccttcagctttgttcaacgtctataaatttaatatgtagatcctgaaggtttgcttatgttttaccagttggggattgtgaggtgggagccacaaggaaggcatgcaagaactgtacttgtggccgggctgaggctgaggagaaggtggagaagctaaatctcacatcagaacagatcaataaccctcagtccgcttgtggcaatgtgagcatgactgctttttaattaagtgttttattttttgcctttggtcctctccctgtgaaaatccatagtttcatcctgtgaaatgataattgcagtgtgggttgggcgatgcatttcgatgtggtacttgcccatacagaggtctaccagcattcaagccaggcgagaaggtaattatctctcctgaccctaaattcttgattcatgagaacacccaagatgccagttgaacttgtttttaagaaacaactcactgttctctgattggcagattgccctacctggcaacttccttgcggctgacatgtgatgatagaagggaacatcggcaacagcagcagataggaattggcttctttaatttgttcgttcgttagaatgttgaagttgctgaccaagtatgggtgtgatagtagatggaaagaagaggaccattgctgtagtccctgctagggattgggatccagtgcagttgctagggtaactgcaacttaagcagttgcactagcaccacatgataacaaattaatggttctagcacctgtatactgtagcagaaattactgtttcacgtgttttgtagcaacaaatctggaccattggatgaaaatacaaatggatctcaatccccctgctagttatcaccactttctggttcccaggtttcaggtgtgagtgtgactcgcctatgcgttctgttttgatgatatatgtaactgagaaaatactgcactgttgtttcattgtgaaactgtcaaatctcaaatcgcacgtcgctgctctctgctgatcttgcaagacagtgaccccttaacaaatggcatgttagtttcaatgcagtgggatgttgtgttcttatctgctgcgtgcggcgtggtggtggtggtgttactttttcctgattatagccttttattgctgttgttttgtttgtttttctgttatatataaataatataagacctagtactatcttgtgcagttcgttaataaaaaaaaacgtatgttcgcagtattttgtgtggtttgttttttaaaaaaagacaaacaaatggcatgttcgtgatccctgaaagtgcaaactgcaaatataaacttatctctgcggcatgtaacccacttgtatcaactgtatgtacacaataacaacgtagtagtaataacacagtactaagcatcctatgcttgaaacctgaatacgacttgttagcaggagcatagggtccaaaacaggaacagttctctgtactttagaagtgcacacagactagcgacaaaaaggagataatttatcattcgcgacgttttgggccggttcattttgatgtcatttttaaccttaccaaattttagtaaagttgacaaaaaaatggctacatttagtttgctaccaaattttgtaactatataagaaatcctaccggtatagttgccaaaattttgtcattaccaaaatttggtaaggttttttttagcatcaaagtgaacaggtcccttgtccgagatacaggatatcaccaaagtaggccttctttgaaattgaactaatttatatgaaaaaaatcatgtaaaatacctttgttctaaaaaaaccagagttgtattttgcgattacatggtagagatgtacacacactattaccaatgcaacgctacactaacgtcacgagtgcgtcccctagcacgtcatgtttgacattactctgtaactaagggttgttcggtagtgctgaactgcggttgtacaaccgcagcgctgacgcttccctagcatctttcttgtggtgggactatacctgctgctgcaaggccgtcaactagtagcactaccaaatacaccctaagttttttttacaaattatttggacctgaagttgtgacaaaattgataatattttaatgagtcattttgtttctacaaatataaaatctaaattactataatttaacttgaaactttaaacgtggaggtgcactaaacataaccttaagtgttttccttgtaccagtgtcgcacttgacccggtctagaacttaacggggggttagatcatgcgtatttttgtatatacatcatacatgtgctcaaggaaacagtaccatatattttttttcaactagaatagtcaagctgcttattattatataggaataagaatgacactaatgcttgattaaatagcaatttttgagcttcatgaacctctctgtttacctacaactttttttttttgaagttaagcacctacaatgaataatcctacatgatatgacatggtaagcactacatgaagtactcttttataaaagagaaaagggattaagagcctccaccatgaagcaattctttttgtttggtcttttgtaccgtttaaaactaactaacctcaagtcatcttcccttaaacctgttcttatcgaaacatattctctcctcttctccgtctccgcctctattccgaagtgtagagaaccctgcgaatttcccaaccaccgcctccgctctctcaagccggcctccgctcctccgatccgcgggctcccggtctcctctggtggatccgcgatggaggagcagcagcagcagcagccgctgctcgaggtttgcccgtctccccctttttcttttgccgcgtgctttggcggcatcgccttgtaggggttccgtgctgttctagtgctcttgcgtcgaattgggtccatgattgggagcatcattgcgcctgatttgcaaccgtcggctctcggtcttgcctaagtttcgcacccatctttttggtctccgttgccaacacgcgagggaatttctagcctataggataattaataatgggtcggggcatcgccctctacttgttatgtagattgtagaggtgttttttttgttttgttttgttttgtttcttgggtaatctgcgcatccagttggatcatgagcttggggtttatccttttgtgagcttgggttgtctattatcactcattcaattattgggttattttgttaaaggagacgtctgatgcttgatatctggattatttggagtgccaaatgctctgggaagtaactgatatccgacgagtaaccctgctgtagccttataattgatacgctttggtctggatggtgatttggctttagccttataattttgttggtcggcccagacaacgagtctatgaccatgatcttaagttgtaatgcaattcagaaacacggatattatctgtggtaactgacatgatattttacaactatgtgctccgagaatcactaatgtacccttttttgttggtaaaacttctgaaacaggtactagcaacttaaaataaatttaatttgtgttcagaaagaacccagagataggcagttagcacagcataatcagtaaattgtgttgacattgaacatcatttataatacatgattgcagttttgttgatttagatatgactgctaaaagctgtgcttactgtgctacaatctcacgggagaaaatctgttataaagaattgctcttgaataaaattatgtgctcttggctcagtagcaagaatgatattccctaagtttcttgactgaaatgataaacaagtcaaggttgtgagttacagtttgctgattggaaaatgatatgatgagttgttttaagttggactaatattctctacagtaatgcgctaattgcaattgtccttccatttaggtagagcaatgtgtaacatctataccagaagatcatgaggccacttgttggggatgtggactccgtctcatttttgcaagttatgctcctgtttttaagtgtggctggtgtggagcaatcacataaagtaaccaaacttcacgaaaacctgacagtgtatgcttttctcattggaggaatttccgggacaggttctttgtgactgtgctcatcctcttcatgctcttcgtcatatgtaggttccgagtctattgtcatctgctttagataaaactttccatcttgatctctccatgtttatttgtttattcatgcaatttgtgctgctgttccacatgactaaacttgttgtctcacaggtggtggggtctgggcggtatatccagttgttttctcgatcagcacattttgtggcatctttcactgcatattaacaggtgtactagctgtatttaccatcacaagttattgcttggcctcttttaaatctgctggtgcaccggcagacatgcggtggggcagctatcccatggttgggaaaaatgacctggaaaactataccttctgtacatactgtagtaaaccaaagcccccaagggcacatcactgccgatcttgcaaaatgtgtgtgttagacatggatcatcattgcccatttgtaagtcagacaactctaaaactaacttccaataccgttattcctctctacttatttgacttgacttggtttgtttcctttttctgtgtccaactgcagattgggaactgtgtgggagcttcaaatcaccgtgcttttgtattttttcttatttctgtggtcatcagttgtagttatgctgctggtatgaccatttattcaagttatcatatatggcccccactagattttgaaaatctagcatcaactcaccgttcaatgggttatataaagatgctaattgagattattggtaccttggcaagctctgcattcttcttgtcagcaaggggtcttgttacagtatatattgcatttgctagtctatcagttaacgccggtataggtgtgctgttgttccagcaacttagttatatatatgaaggaaatacataccttaaccgtttaagttcgctgaatgtcatgcacggcgagagaggcctgcaaaaccttattcgattttttgggtgcccctactcagtttctagagtattatcgggctactcaaacactggcaagttacaggacaattcgagttcaaaacttctttagaggtacataatcacaagtcttcaagcactgctttcatttcatatgttggttcatgcatttcataagccattttttatgaactccttcccgatagattatgtattgttggagtaaaaaaaatgtggtccttaactaaaccttccttgcctcttaaatcctttggcttggtcataatgattcatcttgctggtttcaactacttatatttctgcaaagttttatttttactttttcaacttaaggaaatgaataagcatgcaatcatgcataatgttagtatctaggtattactaatttctcgtcgtgattttctttaaaataattttagcctactcacttgaatgaaaaaggactggagccaactaacagattgtaagatggttgtagatgatgttattagttattccacctgcttggttactgcacgcaattcattcatgatgttttgtaatcattgtaatcatggactaaagcagaggtttcatttacatgttttcagtggtagaatgtgtatattatcatttgaagaaacatttatggaccttcttgcagacataatggttctgctgctgacactaaaacagtggattgacagtcaatagccagttagtttgcataactgaagctagttgtgaacataacattacacaaaatagtccacgcaatctggtagaggacttcattttgaagggaagttatactgtcggcattagtcttgagctggaactgttctcacattgatttactggatgcaatttcagcagatgctgaaatacaatgtggtccaatatattcattgcctacagagtacggatgatcttgaggtgctgatggttgaggccataaattgctctatccgtaattgtgagcatcatcagtacttgttctgtgtgaaagatcccagtctaatgcttcggtgttgcaggagaaatcaacgtgaagattaaatctggcagtgatttcggtgttgtaaaatgcttggaccacacctgtttgttgtcgatacattaacacggtatataggaaaaggaaccccacggctgcttttgtactatttacacactaaactagccttaaattggtcggtaatcttataaacgtgtcatatactgttccatgtgttcttgccatttttgtccagattttatgtaattcattcaactgagctttttggcctgacaattgtaacgggacacagctcacgtaattaatattgctgctgcccttgtaaccatttgacctcatttttgttccttacggagtatggcctttcatgaaatcatcaaagtttggaattatgggagctgcctgcgtcagtttgttgaatggttcgtctgaacatatatgcaaatggacatggttactctggccatacatgcaactaaccaagctgcattgatttcatcatttcatagcaacagtacattatattaatattattatatactgatgattgcgttgtccgcctttgaatggaggctggctaggcagacttgtcttcagtttcagcttcaacagtttctttcttctccttttcttttgtgagggaaggaatttggagtatgcaagattgccttggagtaagaacctttttcttttccttttttgtgattagaaggataagcttcagtattacttgttggcttgttgcattttttctaaccttcaagctcgtatgatttgatgttgttgtaatggtctgatcatgggctttcctgaactgcagatctgaagaaattgcttcagcttccactgcatgtacggatgccacttgacaaggatctaccgtgcaatttcacgttggatcggggagagatattgatcatattgttaactacaaaatcactctaaattcagagagagagagagagaatgcggctaagttaactgcaggtatgtatgtctctcagatcttaattccttcacatgctttccttcgatcgcaagcaattttatcaattaattgcctgtccttgcattgcatttgcatgccccgttgtcccagcagcaagcaggctacctctctcatctcatctttcccatgaattaatcatccatctctctttcttccttcctttctttttttttctttctctgcagccacatgtcatgtacagatgtactgctatgccatatacatatgctctcttctgcaacagcacaatacgcaagctgcccattgctacgtggcactacgattccgtacacacttacgaggttaaacaatggcgcattatttgattacttctgatggaattttgtgctctgagctgcacatgcaggggcaagctagcatgatttgtgcatacgatgcattgtatattcatcaccgaagagtacacagaccaatcagcagctgcaaagtcaacatgtaaaatggcaaaagaaaaagccggccattgctatgtccggccggtgggaggagagacagtgcagtgcaaggctaaggccaaagccaaggcaaggctggctggccggtcgtcgaatcaatcgatcgatcgccatgttgccatgtgcttttccaccgttgctgtgccgcggcactcaccggcagccgcaaatatactacagagactctgcttgcttaattggagtgggtgcaagcaaacgacaagcttattacgagctttgctcgcacatagattactccatcccgcttacagcatgacgggtttcggtgccttcctccatctttaaataactgataactttagctttactatttgaatattgactagtaattactctgaaatggttagagtaattgaataaaagtttcatgttttatgtttagaatataatacaattcaataacatattattccttttagtccttgtaaatatttagtaaaacgacgagtggctaaattcaaaagggaatagtgtccactatcagtcatttaaaaacatagggagtattttgtcttttgttttacatcattggcaagtatgaggaagctatcactgaattgaattgtcaaccagtagtaacaattctcaacttatgaaggggaaaaggatgtttgtttttttatccttcggagttccaacaatcagggcccagctaaagaggggggagcagcgagcggaaatggagggaaagcaatctctcgtttcgtttcgtttcatttcatatcaacctgacgtgcgtgttgctgcacaggggaattgcagaggaggaggcccgcttgtctttacagcgcaaagattcactcaccaattgccacatgctcctcctgcctgtctgcctcgcctcatgctcatcccatcttcctccatgatccatccatctatccggttcgctggcgagaattccattaaattttagtattgataagtaaattgatgataaaattttataacaaatacttcttccgtcatataatataaaggattttgagtggatgcgacacatcctactgtaatgaatgtactcgtctgtacagattcatggtattaggatgcgtcgcatccacataaaatcccttatattatagaacgaaatgagtactaatgatattgaagtttgtctggactaaaaaaaatctttctagctccgtcactgcatccatccacaggagagaaaagggcaagaataagaaattaatctcaatcggaagaaaggaataaacaataattctccatggatcgatctcacagctgccgattcaggcctcagatccaacagaaatccgcttttgtaccgtgaattcgccgctctttcttcctcctatcgggagtacgaaccgggctggggccccgatccgtccgttcatcctccccgccttttccttcctgtttcccgcgtccttttctgagtcttgtttgcctctctgctgctgccgttcgccgctgcttttattgatcggtcttttttgctactgcccaagctgttgccgccgtgctcttgccgtgctcaattaacctgcagctaatccgtcatcaagaaggtaattaactggtatctgaattggattgtcttttaatctgctctgcataatcatctaccacatggcctggcattcagaaagattcatcagagatcagggattaattcattcagtacgtgctgattgatgttgtagacttgtagtagcttttactcgtgtggctgcacattcttttctccttttgttgcaacagtggtggccatgcatcatccacatctttctgcaaccccaatgatatccccctacatgcttggttaatcatatgccaaaagctgtgtacactgtacactgcaagttttcatacgctcatgatagcgactgcatccgacaacaatctgagtagctaattaagctaagccaaattagccgtgaaagaaaaaaaaagttcataaatcataggacgcagagtagtacttgccatgtcactgcaagaattcgtgagctgcagtgtccatcagattaacctcatactgagatgagagaaagatcaggtttaaacagtgacctgaccaagtgaattttcattttttttttggggccctcacaaacagggcttgtccatttctctgacagtacatgtggtccagatcctccttaatgtgttagtgcgtacaaaagcccttgcatcaactcgatcagggacaggattagcctggcaattgcctctaattggcccaattagtttatttatcaggggcatatgcatgcagccggatgtacagtggattatatatgcagaagaacacatggccatgacgtgatggcgatagcataagcaatggaagatggattagaaaaaaaaaaacaaaaaaaacgcctcatcactagctgcagctgctgctagcacatggaagggacaatgaatcatatcgctacactaatctgcacgacaagccatggttaaagaaattccttgcacaactggaggcgaaagttttctcgacttctgttttggaagaatgtgtgtatgatattcggttgctgcgtctctctggctatctgctcgttcgttcgatcgatcgctagctcgtggttggtagctggtgaatatactgtattatagctagataggagtagctgatttgtttcagtcccaaactagctgctactcaccgattggtaaactgtagctgatcattgagctcttgcgacggccagttggtactgcatccacagactgatcgatgatctgatgagatcgatgcatctgcttgtcccggccggagacatcttctgactgatcgattgatcgagcatggaaaggaaggaagaaagtgagggaagaaataaaagaattcatcgatcgatcgatcacggagatgaggggggaaatgtgcgtcaggcatgggatgcctcgcagttgcagataacaagatttggccgatttcattcacgaaggccacaatatcaatctttgcgtcgtgtggaagataagtagcatgtgtgaagtgtcctggacgactccggctgcagctagcagcagcgacagcagcagcagcagcaagcaagcaaaatgcaacgtatatccgtgatctcattcatccatcgatcgaaccacctgtcaccggaaaaaaaattcatggcgattgatcgattgatctatcggatccatagctgagatcgagctctagctagctagcccgtgcacgcagatgcagatgcaggggctgtctctgtccgatcgaatcgagtgagaccaaccatccaagcgtgcatgcatcggtggccggcaactaggcctcctagcttagccctgccttgtcgatcgatcgatcgatggccaacgtcataataaccttggccggtgagtgaggtgagagttcgtgcgtctctgcatactgcgtcatcacctatgcttcactcctccgtcctctgacccctctcgcggtttggagtagcttttgtccaccgtaatttaccttcttaatatactgacctgcaatctttttgtgtgttcgccgggatcgtgcaattctcaccggaaaagcaggagctaacaaccaaagccggcgtgtgtgttgtttttttttttaactagtaggtgtggtgagagctgagattgggtggtggtggcagagcatggaattccgggagtcccggtgcgatgccggcaggtgcacggaaaaggaggggatgcgtttgcgtggggcagcgtcgccatgaggccgagccgagccgagcagcctggctggctggctggctgctgctgctgcgtgcagagcagagcaggacaccgtactatataccggcccgtgccacaccatcctcccggttggttatctcctcccgctatttatatccccccgcctcagtgggccgttgcccctctcactccatccatctctctctctctctatctcttcctccttgcaaccacctctgcatcttctacttcctctctctctttctagatagttttcttgctgttcttgggtggtggtggtggtggtgatgatgtgatgaggtgagaattgtgatgtggggggaaagatgtgcgggcatgctttccacaggctttcttgaactgtgaactcgtgggggtgtatgtgctcatgttgggattgtggtcggtggcctccaattctctgaaaagaaagctgaattgtcgagctccccgttctgtctttggtcgtctctacctgttgatggttcaagaaagcccatggaaaccatgccgcgtctttgtgtgcttcccgttccgccatccggagaattccggccacacagatccctgggggggttgaattctgtggttttggttctgaatttggatggtttttggctctctggggcgtaattctctgagaattctctgtgtgggtgttcttggaccatccagtacttgttgctcacttgaattccgccgttgcggcggagaattttgttgaattcttggtgtttgttgacttctgtggcttgagaaagcccatggcattatgctgcatatttactttggttaaattcagcaacaggatggttcttctcttctgaatttcgcccttcttaaatgtgtgtggtcaggcgcaattcggcaaaggtttccttgcttggaagtctgccttctctggatcttggttttcctcgttttgtttcttctgctcgatcctacaattactcttgctgctgatgtactgaattccctactctaggagaatttgggttcaacagtttgtctaacattgacttgttctttaacacactgtttatgaaaattcaattcagcacaggttcttatgaaacaattgcctgacgaaacactagagagctagcatctggattcagcgaaaaagatcttcagatcatacacgcccatggaagtttgatgaagcaaatgctgcggggaattgctgaacggtgcgacagccggtggagagaattcagatcagaagtacgctcagaaggtttggctgaagcaaattccagattttatttcactgaagcaatcttcagaatttgataattcagaacgaaaaacgtactggcgttttcagagtccatctagaattcatcatgtatcccaaaaactacttttgcatccgtatccctaatttcaaaatgaaaccactacaaccaacgcgtttaaatttcaaaattcaccactcacaattctcattggatctctctgttatttgccagaatccgagccccgacagctcgtacttggccacacgaccggaagctactgacacttgggtttccaattctaaaaccggcacgaaattagcataccatgcaagctctctcctaattactgcagcatttacgacaaaagcccttttccaaagtagcccccaacccagcctcacatccctgacaaagaaacaaacagaaaggcgagctaccttagcctttgctgcttgtcctcattagtacttcaccactgtaattagagctaggtcagttcactgcacaacatttatctttccccctactttggcaaaaaaaaaagttaattagaacactacaaaattcatgtaaaattttaaacttatcgtattccaaactgccatttctgagtaaaaaaaattaagagagagagaaatgaagtgaagtgaaggaggcagaggcagagccgccagggcggtggtgggggttctgtcctgagcaggtggaaatcacgcttgtgcagaaagagatctgaaggaggcgaaaagaaaagagagagagagagagcaaaagcaaaacaccgtctctacggtccttgagtagatactatgaggtactaaaaatttagtgtaaaaattagtatctcatggtaccttatagtatttagataccaagaggtatcaaatttataatagaaaaaatggtatctcatggtaccaaatgctaccatccaaaagctaacataacccccacataaaagtcatgtgattctcccagcaaaaaagaaaaaaaaaccataaaatctcactcgatggatccatgatccgtctcgcgattaattactgcatcctcctgctgctgctggtgtgcctgtgcctgcctcacctcacctgcagtgcaacaacccaatccgggcctgcactggcagcaatcagggggaggatggaatttttcgcgcttctcgaggggcaaagcgaactgaattttgcagctgcctgtgatgcccattccatccaaattccccctgatccacgcgatgttactgttactgtatcccctctaatttcttaattagtacacggaattgcatgcagtgtgtccatcagaattacatgttaatctatgcaattctgcagctgttactacaggctgatctccacttgtaacccttctcctactacctgatctctgaatgcagattactgcagtatattttcaagtgaattcatgcaatgttatgtcggagtgattagctagctaggaggtagtagcatggtggatagtagagttatatgggaaactattctaatccctcgaagggatgttccctcgtttacctaaaaaccatctaaacggttatgaaaaattctggaaaaatttaacaacattcatacaacacatatatacaactccacaaaatcttaattccaaactcaactcacacgtcgagatataaaaaagacaaattcaacatatgaatagtagcgtactgtttatatctaaatttgtcttttttgtttctcgatgtgtagatcgaatttgaacttgaattttggtggattagtaggtatcattatactctacattgtcaattttttttcagatttttttataactatttgtatcgaatttgaaaaaaaaagatatatgaggggatattatccccctcgaatcccctcgagggattagaatccattcccagttatatggatcacatgactctcaatgatggagaggccggcctgggctggctggctggccctgcctgacccacgctgggctgtgcagatccagacccttcctgccctccgaggggaccaaccagatctcccacagatattcgcctcgctgtattctcctacctacacacatcaacctgacctagctagctcgctactgctacctccgtcccaaaatacgacacagttatatttagataaaatcaattattttttcagtttcatatcataagtcgtttgattttttttcttagttattttttaaaaagtttgactaagtttgtagcaaaataaagtaacattttcaatacaaaacaaacattgtattaaaatatattcaacattaagtttaatggaactaattttgtgtcgtaaataatttttttataaacttggtcaacctaaaaattttcgaccgaaaaaagtcaaaagactcataatatgaaacagtgggagtacttcatcattctcgccctcacctagcaaaaagtaaaggcgaggagagggagaaactacgtactggttcatgcgtgcaacccaaaaggtaaaatgatcatgttatcctactataagtcgtagtgctagaaaggtacgcacttgaaaagttgagagcccaggtagatcagatttggttgctgctgtgttggttgtggtaatattgacagtccaaataatgtagtacttgcattgctgctcggttcctagtagctatttatatgtgtcacatgcatgcatgcgggctactagcaaaggcatctgattctaaaaggaagcaagacacaaggaggctacgacattaatgtatgtgctactgctagctatatatgaagttgtcatggttgagtgagtggtcatgagctagctagatagatggctagctcgtcgatcagctgcatggtagctaggaggaggggagcttggcgatgaacgcgtcgaccttgatgttggtggtccgggagaggaatttcatgcagatgggaggcttgacaccggcgagggcgagcaccgactgcggcagcgtccagatgccgtcgccgcagatgaggcccgacgcgacggggggagcgaacgccttggccctggcgccgtcgaggcggtcccagacgaagcggatgaggctgccgatgcacatgtcgatgccgaagtaggggccgaggtagaaggggatcgccatggccatcggcagcgggaggaacctcgccaccttgggcgccgcgaggtccctggcgaggttgacggcgatggcggcgacgaagaagccgatgcagaggtcgaggcagtgcttgggcagcgagccgaggccctgcaccccgaggatggccatgttccggtacaccagcgcgttcggcgacgggtactccgaccccggcatcccgatgtcgtggaacgccttgtagaagagccagaacaccgacggcgcgatcacgcaccccatggcggtgccgatcacctggctcacgaacatggaccgcggcgacgccagcgtcatgtacccggtcttgaagtcctgcgtcaggtccgacgccgtcgacacgatcccgatcatcacgccgcacgccgccagccccgcgatgatgccgccgtccgacgcgtccgcccacgcccccaccgtgaagatggccagcttgccgtacgtcgtcgccagcgaccagtccgtcagcccgcacccgtacgcgttgcagaacgccagcaccggcgccaccacgtacgacaccgcgacgtggtaccacctcagctggtggaagatgcggggcaccgtcgcgatcgacaccaccgcgatcaccacgtacgcgctcagcgccagccagttcgggatctggtccttgaggaacagctccgtccgccgcttgtcgtcgaacgtctcctccggcgtctgcccgccgccgccggagaccggcagcgtcggctcagacatcatcgcgcgcacctgcatcaccagcgccgttgtggttcttgtcatcaccttcagaaagttgtacagcccgtcgccgaggatgagtgaaatggagatgaacacctgcatcgatcgaatcacaattactccattgatcatgcaacagatgatcatttgcaagaagctcgttctacccggtagccgacgatgccgcggaggctgctgggtttgaggtcagcaggataccagtcacccttcttgtgctcgatgagaggccacatgattccccacgacatgacgcctccgaggagcacggagatgttgacgaggtaagggcagatcatcccgacgccgacgtacgtcgcagagaaatcgaagaagaacctgcagcaagaaaccaactgaagaattcagttaactgttgttgactgtccagtgtggcgagcatctgtatgtttcaagctagcatgacatttgtctatttcttttattcaaaatacttgtattattattgtttattttattattacttgttttatcatcaaagaaatgtaactttaacttatatttttaaataatgtattatacgaaatattaacgacgtcgtgtataaaaaaacaaagacaatacttgtttctgtaggcctcgagacccagcgtcgggaacgacatgaacccgcaaccgtcgccgccggtgtagaaccactggaagaagccccaggagaagctcatcacgaagaatttgcccagcattttgacctgcatcctgcaggaaaatgattcagaattcagacaagagtcttatttgttctctgtattcaccacatgtacatatctttagcaaactttcttatctgaaaaaaaaaccgtacttggcaagctttgcaccctggggagtgtggaagctgttgatgagatgtgcggttgcagtgccactcgggtatatgagcttgtaatcgatgatcattatctgacagagaaaaattaacatcatggttcaattaatttaactatgtccttcaaagaaatcatatatctctgaattttaggagaaactgtaacagctgagctgatgaaatgtactaagtaccttcctgagtggcacaactgagaagaggcccaggaagctgacaatgaagaggaatccaatcatccagcccaagctggggttcttgatgttgtgctcgtccctggcctcgcctgactggtcgctgatcctgtcgctcatcgcgaatatgtagctgccaaaaccccctgtaccaccagtgcatagatcagcatctgaaaccatcaccaccctgacaccaagcagagaacgtagtgcacagtgctctctgtggatgtactactgataacagggagagcagtgataaaagtctaggacgtgaagaacggaacatgtatgcttatagtaacaaggtgcttaaagaaagataagtttttttttgttagtaaggatgcaaattaccaagtgctaggggaaacaacacgaggaatgagtctccaatcaaatcatttctttgtaggtgctttcccatgggccatggctagttggctacattatcctctgtatttaaatgcagcaatcatttttttttgctaagcaccgtatttgtcctacgtggcaattagaagtacacctatgttgtgtactcccttcgtcccaccaaaaaacaacctaatattagataagacatttcgtaatataatgaatctggacattagtctttttttagacggaggaagtatgctcaataggccagtttccaatggtgtgctaaaaacatcattttggttggaaattcaaacacctgaactttaagaaaggcaagcacagaacaagaaaaagaatccagaaaaaacctaagatcaaaattcatgctacacaccgaaatggaattgtggcctgtgggccttgatatacatccaaaaaggaggccatcgaggcctaatttacggcccaaacaagtgatccgtcgccattcgattcgacgcaaaatttgcatcgcgcaatcactgaatcgtgcagcgagcgagcgatccgatccgcggcgagtgcgaagaatggcagcggggaaaccgtaccgctgaaggcgatgccggagcaggcgacgacgcaggtctggacgacggtgttctcctggcgggtgaaggggcggacgctggcgacgccggccttgtcgaggagcttggtccacgacgtgaggaggaagaagccgaggagccccgcggagacgttgagcgaggggatgatccccgtcgtcaggttcagcttcatcacgatcacgctgaacatggcgcccagcagcgcgctcaccgccagcgcccgcagcgtcacctgctccttccaccccggcaccaccctcccctcgaacacccgctccaccgacaccaccgccgcctcctcctcctgatctctacgctccctcccgctcctcgccatggcccgcgaattgagctctcgctctcgctctctctctcgatcgatcgcggttgcgaggtgtggaggcgaaggcgaaggcgcgcgtgtttccggggagttaagagttgtcgtctgggccccacatgtcagtagtactggttgtccgctacgaggggatgacatgtggggtcactgatgagtttcacttgggttcagtttgctagtgccacgtggcagggataggggcttttccgtcgggatccgcttctatcggcgagtgtcacccccgtctcttgatcgtcttcccgtcaacgtagcactagctcgcggttaaatttggcaaatcaaccgcttgatgatagatacgagcccggaatttgacgaccaaatgcccaaaatttcacgaaacatcgtcacacggacacgtacgtagtgcaaaatcacatggcaaccaaaaaattaccctggcaaaaatgggtgaaaatttttagcgtgtcacatcagatatactgacacatatttaaagtattaaacgtagtctaataacaaaataaattacataatccacatgtaaactgcgagatgaatttattaagcctaattaatatatcattagcaaatatttactgtaacaccacattgttaaatcatggaacaatttggtttaaaagattcgtctcgcaatttatacacaaactgtgtaattagtttttttcgtctaatatttaatacttcgtacatgccttaaaaaaaatttatcggtggatctaaacacccccccccccccttcccccaatcaaacaggccatggctggtggtgctgatatatcgacagaaacatgccatgccatgacaatgcggaatgcatcagcctctgcctgcaccagacatttctgctctgtgactctgtccgagtgaagaagacgacgacgacgctaaaaagcaagtgccacatctgctggctagatgccgctacattttactgttgcgtttggtgttggtgcccgtggtgggccccatctccttggcgatattccggagcacgtacttctggatcttcccggtggacgtcttcggtaactcgtcgcggaagatcaccgtctttgggaccatgtaccgcggcatgcgctcccggctccacgcgaccacgtccgccgccgtcaccgcgccgccgccctgcttgaggctgacgaacgcgcacggcgtctccccccagaactcgtccggccgcgccaccaccgccgcctcgttcaccgccgggtggccgtacagcacggactccacctccacgctgctgatgttctccccgccgctgatgatcacgtccttggaccggtcccggatctccacgtacccgtccgggtgcatcaccccgacgtcgccggtgtagaaccacccgttgtcccggatcgccgccttcgtcgccgcctcgtcgttgaggtagcccagcgtgatgcagccgccgcggagcacgatctcgcccatggtcgacccgtcgcggggcacgctgcggccggtctcgccgtccacgacgtccacctcggccatccccggcgtgcgcacgccctgcctcgccttgagccgcgcgcgctcggaggccgggagcttgtcccactcgcccttccacgcgcacgagagcaccagacccgcggtctccgtcagcccgtacccgtggctgacctcgaagccgatcgcctccgtgcggtacagcacggcggccggcggcggcgcgccggccgtgaggatccgcaccttccccgggagcggcttccgcacgccctcgggcgcgttcgccagcatgttgagcacgacgggcgcgccgcacaggtggttgacgccgcggcgcgcgattgtgtcgaacacctcggcggcgtcgacgcggcggaggcagacgttggtgccgcccaccacggccatcccccatgggaagctccagccattggcgtggaacatggggagcgtccacaggtacgtcggccgcggcggcaccgcccagtcgaccagcgagtcgacggtgatgaggaagatcccccggtggcagtgcaccacccccttgggcgccgacgtggtgccggaggtgtagttgaggatcatcgggtcccactcgctcgccggccgcacccacgcgaactccgggtcccccttctcgacgagcctctcgtacgtcagcgcggcggcgggggcgggagggaactccttctcatggggatcctcgacgaggacgacgcgcggggccgtgtgccccgccgggaggaggcggagcgcgtcgcggaggacggggagcagcgccgggtcgacgaagatgagcttggagccggagtggcggagcaggacggacaccgtgcgcgcgtcgagccgcgtgttgatgctgttcagcacggcgccgctcatcggcacggcgaagtgcatctcgtacatcgccggcacgttcggcaggagcacggacacctgactcaatccagcttagcttagcaacacgaggaaggtgttcgacgaaatgaccgtggaaggaaaaaggatcgatggatgctcacgacgtcgccgcgggagatgccgagggaggagacgagcgcggaggcgaggcggaggcagcggcggtgggtctgcgaccacgtgaagacggtgtcgtggtagacgacggacgggcagtcgccgaacacggtggcggcgcgctccaggaagcccagcggcgtgagcgcgcacgagttggccgggttggcgccgagcttgtccatggccgccgcgtcgatcgccggagcacgagctgtcgcctgtgtgaacgccggtgactccagctatcgcggggtggttggagtggaggcgaggaaagagcgagtgaggaggctgcggtgatataaaaccagtttgctattgaccagatgacttattctccgaatctcagtcaccttgattcctgcccgttggatcgagatcaacggctaaggatagggcaacagcgagtgaaatttacgctggtcaactatgtcaaataaggaggaatggatttagtagtaatatatggagtacagtatatagtactaatttccaattgcatttataaagaaatcagtggtcttccatttaaataaaaagaaatttatccatataaattggcagcagcttcgtttgatggggacggccacgatcagttgcaggcgcaatctggatacacggaatgtatccttccttagtcccagaagtagatagaaaaaacaaacgtatcgattataacacattaataatgtgaatctaaacttactactacctccgtctcaaaataagtgcagccgtagaaatccgtatccaacgtttaaccgtccgttttatttgaaaaatttatgattttttttaaaaaatttagccacacttaaaagtactatttatgttttatcatctaataacaataaaaatagtaattataaaaaaattttaaataaaatgaacggttaaacgttggagatgaatagtataaaactgcacttattttaatatggagggagtactgtgttaaactcgatactaaattagtgttttataaggcgaaggagatacctcatcatatgctagttcatgccgcagtaaaaagaaagattgaagataattcattttcttcgatccagcatcccagccaaacctcggagaacccagagatgagacaagagaacgaatcaaaatacttttcatcatatatgaacagatggcagtagttggcagtagcatgtttttttttactactcccccttcaaccccatagatttgcatcaaatgtgcatcacatgatctaggacctctgtctttctggcactgtagattaacaaacgatacagaagatggtacctccaaactactgatgtgcagtattaaacttttttaaaactggtaaaaacaagactcccgtttccatatacccggaacgtacaaaagcttgaaacttttcatttaatttgttcttgacttatggatatatgatacagatcagcagcatgacaaattaataccttaccatgatctggcgatgtgtatgtacggtccaaaagatgagtcacgaacccacgatatctatacgagccttattggttgacctaattaatcaaagcaaaagctaaaaattaaaattttaaacttgattttgaaattaaatttaagatatttttaacatagttttgttttttattattagcttttaaatcgctaaaaaaatatataaaaattttatataaaaattaattttattatttaataaatcagtgttttattaggaaatatgagcaaccgacgagactctacctatctcccatgctactccactatgacaactcgtatgcatgtgtcgctttcagagttccgtgcaggagatgaacataccagtgtattatcttcagagaaaagaaatacaccggagtatgtagcactgttcttcaccaatccttggctccttgcagctatctaatctgctagttgctactgcatgtgtctaatttggtcagtcaattgcaatgtgcaaacaggctagtcaagaatgtctatctcgtgcccggcgaagaaaagattgtctagctcgtcgatcgttttcattggtagttctagtctagcaattggtttttttcctgataaaaaaatagtgccttttctatgtaggagtatatgtctgactcatcttattttatttcagattattggctggacagtcatcttcatcagttatactagtaaaacattcgtccatactccatagaaatttcagaccatcgtaggtgtaaaatttcttctggtctatttgaacacatgcaccagccgcctttcaattcttacaattctgcgtactcgcgaacgtgaaattcagacgacatcaatggaatttccctcttggccttccgttttttctctctctagaaactgtaaagctaccgtggagcgaaaagatggctggtgtgggcataatctagtcataatccacccaaagcaacgctgatatatttgactgaccactgcaaattgcagattggctagaccaactgcagctggtcattcctgctctgtctccggggctttggaatcatcaccatgatgtagttttcagaggagaatctccttcagttacaacagcatgttataagccaactataaatatattttaagaaaataaataaaaagagagaaggccagcgggccatatatttatagtcagctgtagcacggattccaaaacacagtgtgtatatgacaggtgggaccaagtattaataatacaatatataactattgtatgaatgagctattagattagttataaatgaattggagctagtagttggctatactattgaacctgctctaagagcaagtttaatagtatagtccactaccagctccaattcatctatagtcaaatttaatagccaattcatataacagttacttactatactattaatatatggtcccacctatcatacatacatttcatctaggagttcgtgctgtagctggctacagatctgtagcccgccgcttttctctcttatcttttatctcactaaaatatgtttatagctgactaatagtctgctattatacatgctctaaatcgtttagcatccaagtgtatagaggatgttgctctctgggcataaagattgaactgtgccgacaggatcgtagcagaatcctagaaacaaattctatcttctcctcttcgttcaaatgtatattctctcaatctcaaaaaaagacaaactataagagacaaatctggacaaggagaggcatcctctcctctgttatttttttttgagacggagggagtatgacttaatatattatatctctctttaaatgaaaatttaggtggggtagctctccctctggtgaccagtcaaaaaaaaactgaaactgttcatctccttaaatatcttctagaagcgaaagaaattgcaaagaaaaacactgtcgttggcagctgaattccatcttgaaccagttaaacacaaaactgaaaaaaaaaacattatatcgaaaagacaaccagtgtggaataatctgtcatattccacccaaagcaatgcagagagtcattggcaaactgcagattttctttttgatgaaaagacaaggtacagatttgtttgactaattacaacaatttattctctattcttgtagaagataaagagctttgcaagaaaataagaattagaaaaggaagtcgttggcagttgaatttcatctcaaactagcaccctgtttagatgggactaaaacttaaaacttaatctctatcacatcgaatgtttggacactaattatatatattaaacgtagactattaataaaacccatccataattctgaactaatttgcgagacgaatctattgagcctaattaatccataattaggatgctacagtaaacattctctaattatagattaattatgcttaaaaaatttatctcgtaaattagctttcatttatgtaattagttttggaagtagtatatatttaatactctaaattagtatctaaatataagtactaaagttaagtcactggatccaaacaccacctaagcacaatagcaaaaacatcatgtcacagttttctgcttaatttgaacatataaaacacacaggcgtgcacagcggaaagaatggagaaatcacgaaagctaaaagaaaagctgagagatctcctatgccattccaagtacagaagaaacagtgcatgtccacatctcaaagcagtcgtggtcagaggtgacatcacagactcgttgcttcgagattgcacaccacctgtttgctgaaaagcagcagccaaccacacaccaaaactaaaatggaaaaaaggaaaggcagaaatcagtcgtcgtcgtcgtgccattctcaggccgtcttgtactcgacgacggcgatcttggcggcggggccgccctggatgtagacgatggtgagctgcgcgccggcgtcgagccgtgtcatccacgacgggaactcgtacatgtccttggcgttcgtgcgggagacgccgtagatctccccggagagctccttgatctgcagcttcaggtaggtgatggcgtggccgcacgtgttcttcgccgtcaccacgtgccggtagtagtccacgccgtttgccttccacgtgttcgtcaccgtgtgcacgaactccaacggcgacccacctgacaaagaaacgcacgatcacttggaggagatctcaatggtacaagttcgattgcattgttgatttggttaattaattaccatttgatggcgagggggcatttggcgccggcgtgtactccggcgtgttatcggcgggcgaggcggcgaggcgggcgaagacgccggacatgggggcgttgccggcgagggtgggctcggcgtgctggtagttgcagcggtcgtcgtcgtaggcgtcgttggcgtcggggccgccgacgagggcgccgtggaggacgttggggtcggcgttcttgctgttgtagtacttgtcgaagctttccatgcacccgacggtggcgttcatggcgtagatggacgggatggacgcgccgcggtggtggacgtgcgtcgggtagtagctgccgtatccgaccatgtagctcatccccttggggttcttgccgaggacgtagtcgacctgcgacctcgcgaaccggaggatctccgccggcttcacctcgccgtccgggcacctgagcgttccccgcgactcggcgaggtagtcggcgtagacggtgaggaggaacgccgacgagctcacgtactgcatgttgctccagtcgctcacgtacatgagaccacctggataaccaatccaatccacacaattcagaacaatcacattgcaaaatctattaccaattcttcgaggaagtggatttttgtccctcgggaggacatcccctcgttttatacatctcactcaaaattttatcaatttttttttaaaaaaaaattgtcaagatagattaatatatgacatctttcgtaaacatgcgagttaaaattcaacttatacaattcaaaacaaaaataacaaatttaaccttaaattacacgttctattcattgtcaaatttattatttttgtttttatttgtattaattgaatttgaatttgtatatttattaagagtgatctatcctactaattttttttatgatcatgcaaaaatgaggagatgttttcttaaggatgatttgagttttccatccttggaagaagaagaagctagcaaggatgggatggattaccaggggtcatcttgacgttgtggccgttgttcttctggaggcaggcgcagaggaagaactcggccttggcctgatactgcttcagcgtgtcggcgtagccggcggcgctgccgccctgctcgaagaggaccttggagaggaggacctggaggccggcgtacttgttgtcccaggagaactcggtgacggcccagccggtgccgccgaacgcctccgcgttctgggacacgtagcggaggtactgctcgtcgccggtcgcctcgtacagccacgccgccgcccacagcagctcgtcctggtagccggacgccgacgggtagaacttcttggcgctctgcagcgagtcgtcgtacttgcccctgaacgtgtccgcgaacgtgaacagctgcccccccaaaaaaaagagaaaataactcatcagaatgttgctgctgcatttgctgattgctctcatacgctggctgcgttcgacagcccctcctcccgtcccgcaaaacaaagcttatattattataaaattaattaactattaattatttttttaaaaaaaatggattaatatgattttttaaaataactttaatatatatttttttaagattaaattgcactttggtccctcttttatttcccaagtttcaatttggaccacccttaaagctatctttttaatttagactgggtaaatttaccactgttacggtttgtactatcataaacaacttttctcatcatgtataacttccctttcggcaaacatatgaaccatatatagaggagttcggccgcatactagagttgatgtgtttaagctcgttggttgtactgaaaaaaaatcgttcgtggtaatccaaattacaacaatagtaaatttattcggtccaaagtaaaaatatatgtttaaaggtggtctaaagtgaaacttaggtaataagatgtggcccaaaacgtaattcactttttttttataaatcataccgtttaatagtttgaaaagcatgcgtgcgaaaaacgaggaaggtgggttggaaaaatggacgaagatcacagccacatgtgtctctgtacctgcttggagtggaggaggaggaggtcggagtacatgcggtcgtagggcttgaaggccttggcggcggcggcgagagcggcggcggtctcgccggcgacctccgacccggggttgttgatgtcgatcttgaacgccgtgcgcggcgtcgacatgtcctcggcgcgctcccagcacaggtggtcgctgtcgccgtcacccacctaatcaaagaatccagaaaatttttcttgagggcactagtgggccgtgttgggctcttggtgagatgggccttgagtgcgtgcgtacctggacccagagggcgttgtgctgggtgtgggccttgacgaagtagttggtgccccagcggatggcgtcgaggacgcggtggagcttgttgccgtcgaccatctccttctcgaactcgaccaccccccacgacagcatcgtcaccgcgtacgccatcgggagcccgaacttcacgtggtcgccggagtcgtagtacccgcccaccaaatccacctgcaaattcatccatccttcgattcaattcgcgccgcattactcaacccgatcgagcatttacccggccttgccttttacatccaactggatatacacggccattgcaatagagaactttgtcccgtggacaacacaatctaaaatttacttctataaagatttaaactcaggactttaaagtactactctaacgactgtaaccactatcgagcatttggttgattgaaccggaggcggcggagatgtatgtattaccccctgggagaagccgtcggtgagggcggagtcgccgcgccaccggacgaggcggtcgtcggggagcttgccggagcgctgcgcctcgaagaacaggaggcacttgtcgaacgcgccggcgtagtcgaacgccgacgcctccaccgacgcggccgccgcgaggaggagaaccagcgacgccgccgccggtatcagcaggaaggtggttgccggcgtcttgttcatcgtcgccgccattgctcgacctcggtagtggaatactggattgagggagaggcccgcacggcggaggagttttataaggtcgccatgatcgacgacgtggaggacggtggcgcgcggccgtggcatcgtgggcgcacgcgatgtgcctcgcacgtagcgaggaggagagatacgacgacgacgacgacgaggtgagcttttggcggggtttgagccatgcacgtcgtggagccgaaactgcagaaatggttgcaactcaagcgtgtaatagtttaattggtaatataataatagttgaagattagttttttttttaaggtaatggagttgaagattggatgcttgtagttttaagggaagattagaaaaaaaatgaaaggctgggtgcctgggtctgatgatcattgtctttttttttttttgagaatttgatgatcattgtgtcaactaccaattgtgtcggcttggatcgacatgaagtccactccagttacactgcgtgatcttgtgttgcaaatgattttccaatcaattttatcacgtttgtgccattgatctggatatttgtggaaggtcaacccagatattatgcatatatattcaaggtgagctgagccaaacatctctgtaccttcctgctgttcaagagctttcacagcaccatctgcactcgatctccagtgcatcagaaccgaagtaccttccttgctctcctgtgaatcctgctgtatgagtttcggtttcctttatctcctgagacaggcagaactccgtgcatgttcttaggaaaatgtgtcattttcaaaaaagaaaaagaaaaatgttgtgtcctatagccaactgttggcttgaaatcatctataatcaacttaatagccaactcatacaatagttacctataaatatatactacataattaatatttggtctcatctatcatacacacatacaccttgaagtctgtgctgcaactggttataaatctgtagccccgctgtcattctctctctttttttattttttcgaaatgtgtttatagctggcttatagcctgctattgcacctgctctaagcagaccaaatgcacaactgcacactggttttattcagtgtaactgcacatcgactccgccatggcacggcatcgatctaccatgccggccaggccgatttactgaattcatcagcagccaagaataaaattatcgatcacttcttttggttgttgccaccaggagtgatcagccgacgactagatgtgccagctttcagctctcgagcgaagtggcaatggtgtcggagctacgcggctctggatttccggcgaaggagacggcgcggctgacgtagagccgcaccaccctggccgcgagattcgaatccaacggtgtatgtacgactacgagccatcaggatagcgatctacggacagtttccactcggccgcggtgatcctgagttcctgaccgcttgattcggatccgacggtttccgtacaggcccgtacggtcgctaacgatgcgcagcgtcgcagcgatccatgtcgagcaaggactctaaagaaaatactaacaacaaactgagggctcttttgcaaaagtcaccctgtgcttacgcgatcgcagccatgaggttttgatccaacggtgtcagttaatgccactcctcctctctcttcttcttcttcccccggcgatctctccgtcccagccgccgcggcgtcgctccggcaggcgcatccgccggaatgggacggcctcgtcgttatctccggtaaactcgcctctcagagcctccgatcccctcacctcctccgcagcggggccgtcccaacacgctcatcggccggaatggtgaggcctcatcgtcgtcgtctccgataaactcgccacccaacaccgccctcgcctccgctctcaccgtcatcaactgcggcccggcgccccagatccagcatgcgcgtcctcagaacgacgaagcgttgtcgtttcctccagtcaatccaactcgcctgctcacctctgtcgcagtgtaatccttgtaacgtatgcatctttcactggtcatggactacaccccctcccaccaaaaaaaaaaaaaaaacttcaaactatatatttagatatagactatgttcaaatacagaattagaagttactctctccatcacataatataaggcgtccacatattttaagattccaccttcaaaacattttgaccatcatttagtacaatataaattgaattttacttgctaaaaattatatcattggattaatatttgaatttattttcatatggttataattttgttactacaaccttattatatatatgagaaattataaaacaaagattagttttggagactaatataggatagagggagtagtttcttgaagaaaagaatggaggaagtagttgttagtcagatggcgtcaatttgagccttgtgtttagtggtcctgcatatgattgagcaaacatacttcaaggtggtggttttctttttgataaagtttaagaagatggtgggtgatgtgttctttgataaagaagtttaagaagatgttcttcttaacgaaaacaaagtctacttgggagcaaaaaaaagatgataatgctattgagtattggcaactctttcaaactagacaaagatggtgattctattgacgatgcttccaaactacaatgattccattgcaacttgaacaaccggaaatttaattagttgttgagtgattttactctttagcaggtacagtgaggtatcctttttttattaagaaacttggtatacctcttctcttaatacctcggctattaagagataccaaaatctacattaaaaaattgatctctctaggtatccacaatacctcggctattaagagaaaccaaaataaaaaaaaaatgatctctctaggtatccacaaagacagtaaaatttctcttgttctacatatgggatatattcaactgtcctacattccgacattcctcctggtggcaaaaaaaattgcctcgcgaaaataacattgagaacattcaaacgagcccatcctagctacagaactcttctactatctggcatataaaaaccgcctggaggatcgatctgcatggacaaaaattcccatttcaagcaagcaacagcatacactacaggccttgaacccatctgcaggtacccagaagcaacgctctaagtcttaaaggatttacttaaaggggcaagcatctgaagtcgaaaacccacgggccgagtcgctctttcaaaaaaccaaaaaaaaaaacccttcgggtgttctgctaccagtctactactagaaagagctaaagctcatcaacttccagccttggtatgatggtaccgcgctagagcatagtctgaaactctgaatgttgggactatggaggtgcttctggttctaggacccatacagtacaggtaatggagagaacatgatgtatttcgatgccgtggagatcatgcaaccattcagttagaccgagataggaagaattcatagtctggatgacggttgatagacttctccccgttggccttgggtatcaccatgcttgacataactgatgcaccatgtcttaaagtcttcagcctctgtttcaggacttcagcacgatcagttttggggccaacgtctaatgacattggcttgatctctgggtttctcagttgaaaccattgctctccctgtaaacaaaaaatataaataaggatgagttcagcattaaaatatctatgaaaatactaccagcaagaaaactaaaaggtttttctagtacacaaaggtttccgccatctggtataataacagaaaactttatattcctttactaatacaatgattttccatagtggattgtccacctatgcacaatcaacttggtcacagacagatgggatgaagatgacgtttgtccaacaccatatcttactgtcttaaattaagcttaaaaggggaagtgcactagagatataagcaagccacctatgggaggtcacaacttgattagtcaaataagaaaaaaaaacaagaattaaagtttactcataaagcttttgttagatgaagatgaggttttacattgaacttttagtaccgtgctgaatgtgattagtaataataataaattgtggctacaaacctatactatcc

SEQ ID NO: 5425 - DNA, 165846 bp, Oryza sativa
tttgtcttatggaacaaacaacaaggagggtttgatagctgtgtttgacctgggaggaggtacctttgatgtctcaattcttgaaatctccaatggggtgttcgaggtcagtatttatgaactacacactgatgctaactagtaactttatgtacaaagaaaatgtagttacataatattcctttttcctgctgattcactgattatcttcttgtcaggtcaaagcaacaaatggtgacacttttctgggaggagaagactttgataacactcttttggagttcttggtgagtgaattcaagaggagtgaagctattgatctggcaaaggacaggctggctctgcagaggttacgtgaagctgctgagaaggctaaaattgaactctcatcgactgcccagaccgagattaaccttccattcatcacagctgatgcttctggagctaaacatttgaacattacacttacaagatcaaagtttgaatctttggtgaatagcctcatcgagaggaccagagagccatgcaagaattgcttgaaggatgctggtataactaccaaggaggttgatgaggtccttcttgttggtggaatgacaagagttccaaaagtgcaggaaattgtttcagagatttttggcaagtccccaagcaaaggggtcaacccagatgaagctgtagccatgggtgcagccatacagggtggtattctccgtggagatgtaaaggagctgcttctccttgatgtgacccccctttcacttggtatcgagactcttggtggtatcttcaccagactgattaaccggaacactacaatccccacgaagaaaagtcaggttagcaagcatcccaatggttaatgacctagcatctagttcattgtcacgtgattaaattttgtttgtattttcatattgtggtatagtagtagattacatagtgttgctctgttctttatcatggattattttgtgattgatccatgaatactcttatatcatgcattacatgatatactaacttcctgctttttagctacgtacttattcttgaccttgctgtttgattttatctgccaggaccttgttcttctatctgtagtgatagattgcttgccacctctttcaaggggtttccatttcatatgtttgacctccttaatttactccatgcattctgcaggtgttctccactgctgctgacaaccagacacaagtgggcattcgtgtcttgcaaggtgagcgtgagatggcgacagacaacaagcttcttggtgagtttgatcttgttggcattccaccagcgccaagaggtatgccacagatcgaggtcacatttgacatcgatgccaatggaattgtgacggtctctgcaaaagacaagtctaccgggaaggagcagcaaatcaccatccgatcctccggtggcctctcagaagctgagattcagaagatggtccaggaggctgagcttcactctcagaaggatcaggagcggaaagccctcattgacatcagaaacaacgctgacactaccatttacagcgttgagaaaagtctgggagagtacagggacaagattcctgcagaggttgccactgagattgagacagcaatcgccgatctccgctctgtgatgacctcagatgacatcgagaagatcaaggccaatatcgaagcggccaacaaggctgtttcaaagattgggcagcatatgtctggtggtggtggtggcgcaggcggttcagagacaggaggatctcagggcggaggcgagcaggctccagaggctgagtacgaggaggtcaagaagtgaaaccgcatgtgctaacagttgccctgcttttagagatagcagctagtagttttttggaagagaccgggatactaggaccttgcgcgttgtaataagttttgtcatacgaaaacacacctaagctcgtaggcctgtctagttgggttgtaatgcatgacttggttgcattggctccttttgcttgcgatacatcgcgcaaactggacgtgatattgtgatattttttttcaccctgttcactcatgagtacaatgaatcctgcatggaagtgatgctgcttctctggcttccgcttgcttgcttgtgctgagcctggtgctgttttggactacaagtcgaggatctcgactctaaaacaagtcattttaggtaatcacggttccgttttgcacgcctactagtaaatattattttgctctgtttcatgaactctctttatctcatgcaatgcataatactgatttctttagttattcttctacggtagaagtgtagaaccttgctgattgataacatgggcaccggcaccgtgtatgtaaacaccgaacacaaacgttctgcacgtgtgcacggttcaagcgtttatagcatctagcgcatctcttcccacaagtcaagctgtgccgaggctggctgaccattattgagagaggccttgacccactccggccatcgcacatttgcctggctaacctcgccattgcaaaccgagtcaaggttcaaagctagctggaactcctgagctagctgtctctgattctaattaagctgtcaactggctactagtcggtgccggacttcatgccggtgatgataattcggcaggaatgaaattaaatgaattacatgcatgcacgttcctcggttcctcctgctatttcctcctgagaaatcgaacccaatcgaattggcacatggaatgccgagtccaaagaagtttctggcgaaaaaaaaaaggtaaaacggctagaagattgtgacatctggcttggaattcggttgcattctggacagtccaagtatgcatctagaagagaagataaattttgattagatgaaagtatgaaacgcctcgaccaaaagttcatcacttttctcttccaactgttgttttctggatgatttgggtcaatttcagcggttgatgtttgtttcaaaatattctgggtgggatcttccgcggcgaaaattaggtacagtgacagggtcaaacacaagtgctactacgtgttcatcttatctacgtgttccaggatgtagctgcaactgcaagcgcggaaaaagggtcaggcgcggaaaccgtaggttaggagagaaaggtatcgaggctgggaaggagagtgtcaatggagatgatggcaagaagcgcactcaaacccttgcagaaaagaggagggaagatagtggaacgagagaatgcaaccgggaataggagaatttactctatgccactggattaatattggtacagtcttttctgtttcattaaggaaaaagaaaatctagcaaggattaatgtgacataactgtataaacattcagtaaagaatttccgtttacgaagaaatgttgattaatcgaccaaggcttgcagcaaacgaaacgtgctcgatctaatttggtaattacgtctgtatattataaaccagtaaaccactgctttgatcccaagaaagtgattactttaaaacaagtagacgcgataggtcattatctagattcaggacgccatgtcagcgtgcatgtcacctttgcttcccctttcttcagatgacaacttatccaagccatccaagcactcttagcagccgcatctccagacacaaccgatgtcatcaagcccaataatcaaacaccaaagcataaacgacgccgcatcagacaaactaaacgcgacaataaaaaaaaatcgaccaaatcgcagacacacaaattttccacagtttcaggctcgcaggcagctcgccacctccttccttgcaaagcaaatccaaccaatcaaatgaacgaagctatcccccaccaagaaaaacaaaaaacaaaaacaaaaatactacacttcaccgcttgcgtacacgaccaagaaaatccgaaacaacatgcagtccggctcgagtctatataaagcgagcaaagcggagaccgagatgaccaaacacacaagctttgatcgatctctcccacacggctcaaacgcgcatacacgtaaacacacaagctttgatccttctgttcgccatggacggcgaggcgacgagcttgatgatctcgccggagatccgcgacgcggtgacgaaggttgccgtgttcgtgctggtgcaggcgctggtctacctcatcctccgcagctcgtcgagcgtcttctccaaggacggcaagctgaggtcgtccatgagcttccggtcgatgcggtccatgagcgtcaggcgcttcctcgcgccgctctccgacgtccccgtcggcaccgacgagccctggccgtcgccgtcgtcctcgccgtcgccgaccttgtcgcgccgctgggctagccgccgcgaggattaattgaagcggttagtgctagcttctgggctctggccagctaggtgctagtttggttactctgaagaaacctgaattatcatgggttggtttggtttgtgattaatggaaatggaaaatttgggaactgggctctgaaagaggcagattattagagtggatcttgtagatatgtggattgaattaagttaatactgaatggtggattatttgattctttacaatttgtctgctttcctcaatctgtaaattggaagtatactattcagatggcgtaaatctgaagttcttatgtacatgctaatacaggagtattatactatacagtacgaagtattggattgagagtttgcactagtaggagctggaatattgctttatttttttttcgcgaacgcacaaaagaattgcacgtcaatatattagagaatattgctttaattattgatctcgttacaacttaatatctgaagagatcatctcaaatctctatttacagtatatatcaattgcttgatttaggtagttagtcacttgtgcttctggatcatttccctaacctcatccatcacaagccatgctttatggcctcctatcacttccgctgcccattctccatccttccataactgaacatgaacgagaactctaagatcaaattttggtttttttttttttgaaaccaaagccagcaattgctggtgttatattaagcagaatgagagatatttacaaattttggtatatggacaatgaactgtgaaggaagtgtggagttacctggatagtgggcattttctgaagatagaagtgcatccaaacacgtggaaagacagaaattgagaatgaataagataagtattggagtcactctgaatcaacagttaatacagaaaaaaaaaagacaagctcaaaatttgctgactcacagttatattccctcttttcaccacagtctgtggaactttgttgacatcgacaaagtagaacctgactctacaaaagaaatgagaaataccattttaattcgagtgaagcaatgggacactcacagtccataccccgcaaggctgtcctctataacttgattgaattcatattgtcaattgtgtcagccctacatacaaacatttgatgaaatttaaaccaaccctggaaattctcctgctatcttctccagtctgggcttcagatatatgcatttccgacaccaactagccatcctggcaagaacaatttaagagaacctcagcatctgcggaagcatttctttagggaatggttgaagactagcattctgataaagaaaatagacattcatctcaacaacatctcaattattgatcacactcctcacaagtccatggaacaatcacaagtcgttcaggtgggtccaaatgaattattttagcacatttcttaagactaagtgggccaagtgggccattccagccagtcacccatttcgaaatcaacattcatcatggaacttccaccgatacaaatttttaacaaaaagcttcaattcgaaaggaatcacatgtcttttagttaaacttgtgacactcccgttgcaatttgaacctgacaaacggggtattccaacaaaactttttcacttcatggtatcttcagaaactttctgaagagaatgataactttcagaaactaacacgatgctacattggtcgcagaatcccaggtcgattcctagcgaatctaagaactctgtaacactcaagcgcagttctaattgctgaattcagagagaattcatgggctggcaaaatcagggatgctcacgtagtaaatcagaaaaatgaaacagggaaaggcaaaagcggatcataccagtcgatgatgatgggctgcttgttctcgacggaccaccggagcgcgtcgtcgagcttctccatggagtcgatctcctccatctccaccggcttcgacacgtcccagaagtaggcctccgccctcaacatcccatcccctctctccctcctcctccccttccccccgcccccgcccccgccaccgctccacatcccgagcggcctccccgccgccccgccaccgccagcgacggtcgagcatgcagccgcgggtggctgcagggcgcctgcggcgggcgcctcgcgcgcgcgcagcacccgggggctcggcgctatgagcgccattgttcggggacgcggcgcccgcgctgcgcgttggtcggcggcggcgatccggtgaggcggtgagcgaactgttcgtggcagtggcggcggcgggaagcctgagcttatccgtattgctgcgcttgcgtagagaggagaggagaggagaggagaggaggggtggagcgcgcggcgacggcgaggtggggtaggaagggacaaaagcgttggcgtctgggcgactgggccctaccggatcgcggaaatatctcgagattttttagtgggaataagttcacttcaggaccctcaaaagtgaccaatctaattcatgaccctaaaccgtaaaaccggatatcttcaccccccaaactattgaaaccggtgcaatttgactcccttggtggttttggatgacggcttcgctgacgtggcgctgacgtggcagtattgactcggtcttctttccacgtggcgttgacatggcacttaggtgacattagaaaaaaaaatatgcgtgggacccattagtcattcacacacaataaaaaattgtggggcccactgacatgtgggccccacatgtcatcctctctctccctttcttcctcctcccttctctctttctttctctttctcttttctcccctttggctggccgcgagggagcacgggcggctggagctggagcggcggcgggtgggccagagcagcggcagcggcggcggcggcggtagcctcgccatcagccttgccaagtggagagaggagaggagaggagagcaggtgagggaggaacggaggtggtgggttacacgagaggcggcggtggcgcgtgagggccggaagggagaggggagaagcggagccgccgagctcatgttgtcgctgccggtgcctcctcccgcactcgtgctcgcccgcacaccgccggagccctgccgctcgacccgctcgatgcctccgccgtcgacgtcccgcgcccgccgccgccgtcgacgtcctgcacctgccgccgccggtgcctcctcccgcactcgcgctcgcccgcacgccgccggagccgccgctcaacccgctcgatgcctccgccgtcgacgtcccgcgcccgccgccgtcgacatcccgcgcccgccgccgccgtcgacgtcccgcgcgatgcgaggatggatgcagggaggtgttggaggaaggcgacgaggagctctgatcccggcgatgcggatggatccgaagctgtagccggcccatagaccaccgtccccccgctcgatctcgtcggcgtcggcgctgtcgtcctctctcgcgtagctctagctcgccgccgcttcagctctcgccgaccgccaccaatccggcccacgccccacgctgccaactccagcccaccgccgccgccgctgctccagctagctccggccgccgccgctccagctagctctcgacgccgccgccgccgccgcttcagctcccaccggtcgcgtcgcttcagaccccgcccaccgccgctcgctccccgcagacgcccgaagtggagaggtagaacaaaaagagagaagggaggaggaggggaggttcgagaggaagaagaaagggaagagatgacaggtggggcccacatgttagtgggccccacaatcttgtgtgtgtgaatgccaaatgggtcccacatatatgtttttaattgaaatgccacctcagcgccacgtcagcacacagactaggtcaacactgccacgtcagcgccacgtcagcgaaaccgccatccaaaaccaccaagggagtcaaattgcaccggtttcaatagtttgggggtgaagatatccggttttgcggtttagggtcatggattagattcgggtctcttttaagggtcatgaagtgaacttattcctttttagtgcgactcggtcaagtttctctgcatgggcttagcaccatccggtagcatattccagcggaaataagtctacttgccgcccctcatcttttcgagtttagttggtatcactacttcctccgtttcatattataagactttctagcattatccaccttcatatatatgttaaagaaactagatatatatgtgtgtctaaattcattaacatctatatgaatatggacaatgctagaaagtcttataatctgaaacggagggagtatatcgcaatattaaaaatattcactcccatcctaacaaaagctgcccgagtaatgtcgtaggacaatatgaatgactgttttgactaacgtggcatcctaatcagtaaaaagaaaatttgaaaacatgtggaacctacatgtaagtgaacttccggatctcctcacctatcccatcccttccccatctctccacatatcccctctctttttcaggagctcattagcagggagaggggcagcggttggccagcccatccatgggaagcggcaacggtggtggcggagggggttcgagtagtccacgatggtgaaggagaaggagccagcaagctcgagctcacttgccatccacaagaagacgacggtgatggtgagcgggctggaaaggatggggtcgcggctatcagtgatggcggaggaaggcagagatgaggaaggggtgctacgacggtagcggcggaactcaagctcaagcagtggtgccatcgccatatcctagtttccgtatcaaactgtttcacgctgcccagcttgcccgcaaattcctgatcttcctccatgagcgagatgcgctccgcatcacatatgcggtggcgacctggcccgacacctctttgtcgctccttggtagctcgggggagaaggcgagaagggagggcccagcctggatgacaaccatggcttctctgattcggcagcccccgctccgagtagggtgcccttgctccaataggttgttcttgctcaggtttgtccttgtatgccgctaagcaggccacgcgccgcaccgaacctccttaccctgagctacttccttgtcagtcacacctcctgatcaccacgccggcatcagtcacacctcccgatcactgctctctatcggtgtgctcaatgcatcgtgtttcagagaaactagaaatagtggcgcgctacgctgcgccggttgaagatgtcaccgaacaaccaatatataattgcttgaaggtccaacagaactacaaactggacatggaattaagcataacagccggaacacgtcagagagacttactaattaccagtaacccgtataaacaaaaggttgtaaatttactttattagctacgaaataatttcagcacattttatactggtacactccagcaatgacatgcacttatgcaacctctaaactactctcctgcactgacgggaagtatatcggatatgcttggtgttgcatatattaccgcagaaactccctccctagtagtcctataacagtaaaacaaaagaagattagtctatgcttgccgatgacaatgatttgaaggttgacagattaagcaatgatgaattttacaatcccatagggaagtatactacagttatcttgcattcaatcaaaattataacgcttttggcgagttctgttatctctctataatatcaagctatcaactatatggtgaaaaggaacggccaagttgagatactgaaataacttttctcgctaaaactttgaagtgcaactgccagtaaaagtgttttccacgtttaagggaagaaaatggatgagcatatggttgaattggaaaattttcactatggtgtcatttactctacatattttgaaaaactaaataagtaacattcagaaacaactggcaatacaatgaactgggcgaatatacccaatgcatttaaactgactattcattgatgcaaataggaggcattaattgtctagacaaatattttttttagttcaaggtgaatcaccataatacataagagccacatctatcctgctatcactccttagtgggctgtaggaaatcatctctattttcgacaacaaatactttgctattctgagctcacagctagtaattcagttttaaaagacaaagagctgaatataattgtggaaactacaattgtttcatcaaaatagttattgcagaaggcctggatgagtaaaatagaaataaaaaacaatacctcaccgcagagaatgatgatgggtaaagggaagaaaaaaaatcctgcagacaaatatacaccatgttagcatacaacctataattgaccatattaaccattcaatgatctaccagctaagagaattaaaagtgtaaagaaggatctagtccatttgatccaatgatctataacattgtcaggataggtataacagtcgtacaacaaaagtactgaaaatggtacacagataatagggtatcaagcaaattggatcttcctgcatataaatcatccatttaactgaaagtctagttctattagtgccaaacctaaatcgtctagaatctacatgaagaaccaagtgggtactgagagcaaacacacaaagaaaaatgctaattcgtaaatgactgaaagcctacctgatgcttgaaatactatattgtctgtgcattgtctgtaagagctcctctaatggtatatagcctgcgatttgaaatgtctcatttgaatgatatgactatttatgtacaattgcaacatatttttgttatgaaaacatatgttaccctcacgcatgctctttgcaaacacctagatcacgatccctctgtacaaagcacattgtgcatatcctcctgcagccaagtttagaaaatattcagaaatcgatcctcctgtagccaaattttaatgatggataaagatggtacagatcagtagctacatgatgtaggagatggtgatggccccagtggctgagctgatgaaggtggcagactgtttgtcgaagtcatgaatgttgacctgaactacgaaactgaacaaaatgatattcatgtaaatagggaatgacagagtgaggataaagtagaagaaacaggactggaagagaaggtgggcataggtgttcaccttgaaaggagggatggtagatcagcattgtctgagtatcagcaggctgacgatggagacggatacactcattcaccctggacacttcgggagttgagattcacaaggcccaaatgattcgcatgagatggggaaacaccgcatctcgagctcaagctcgcagaccgtcgagatgatgctttgtatagacgttgccacaatggcacttgattggggacgaactaccatcgatgggccaacgacgacggaggagaaaagccggcgagagcacgagaagagtgggaagaagagaaggcgaggcaaagagaggggcgtgaagtggggagctagcggcggccggggggcacgcacaccacgccctcgctccgttgtgcgaggcggagagccggcggtgtgcgccgatgtgtcgccctccacgtgcgtgagggctacggcagtgtggcggcgccgcggcggatgagccatatgcgtgcgggccgtgagtgttgctagggttttggctgtgtggggatatgttgggaagatcttgactgtctgttgtcctcttattgatctgatggtggtggaagagccggcaccgtagcccaggtggatggctggatcgatcccaacacagaattgaacagcgctagggtaggtggaactcaaacatgattaaccagaagaacggggtgtttttttggaaaaaatgatgacatggcacgctaatctttcgccattcctacggtgtttggatagtttaatatgaggggaggagatattgagaaaagagggtggaaagagagaagagggaaggcgagtgagaatgacatgtggactcatttttatttttgctaaacgcctagtcaacactagtggactaggtcactttccaatccagtaaaaaccagctatatgtaatatcggaggataaaatttaacccggttttgtaagttgtggttggtgttatggtctagggatgcgaattaaacttgatgtaatgatatggggaaaatggacttattccttcgagctgcgtcacatgcggcgcaagtctccccgacggcccaatcttagttccggaggcccaaaagtaggcaatgggctctaaaggaattaatgcctgcgttcctcacgtcgcgtagttctgatttttctgaaagcgtacttctgatttttctgaaacggatgggagttcagattcagtgttcagaattcacatgttgctggcctgaccatcgaatttacatgtttctggcctgatgaccatctatctagacacgcattcactcaactccttgctgcagttcatcaatggcagatggacactcgatcgacagctgacatgatgcgaactcagttcatcgatcggtcgacacatcacacacttcgcccagccaaagctgcctaaactgctggatagccagccatgctcgaaccgaacagccatgactctgcaccgttgagttaggagtagccgcacctaaaactaaaagatctcatcaagaattcaagatcctcgtacaccacttgcgagttgcgacgcttcagtaatctaatctaatcgtacaggtacgtactctactgctgtatacgtacgaatcatgcttctttactcctttacacgacggaacactttcaatccgttgctgctgctgcttttgtgtacgaactgacgtcctcgcatagctgcatgcaggatgcaggatgcgtggctttcaccggcatgcttgttacgcctttgattggtcccgcagtaagcagcagcagaaattaaaagccataaaaaaggcacggacccttgcttaacccgtactccatggatcttccctttccaatgttactgtttctcctcctgttctagtactagtactactatgctgggatccacttaagccggcctcaattctcatcaaggatttatgctagagctcaatgagcttaatctccttctattaatataacgtcaagtaacctgtttgaccgttcggaaaaaaatgggcattacgaaaagccgaaattcgtaaaagctttttttgggttggaaaggaactcccggcgtaatgttgctcgtcgtcgtcaattggccatgatcgattagttcgtggtgcttatgatgatactacggtgaacaataatctgatcactcaaaagaaacggaagaagatgacgattaggccccatgcaccgaaagaatgattcaaatgacttcttcatgcaattccattgccaaatcttaaggtttatgctcattgctttcacataaaaacaggcattggtgagtggcgaccagcctctgtagtctttagtctctagtggagctctttttcgcaggcatgtgacctgcacggcagttcacaagtgcatgacaaggagttggtcaaaagggagaggaaaaaaactgcctctgaagtagctggttaccaacgctacaacgcgacgtgcaaatgtcttgttgacacgatcgaatcctcttgagatagcctactacaactgcgagtgaaccagtacctaaccctctccaaatatcgatatttgtcatagttcatttcacttctttttcgggcgactatgtatcatgcaacttcttcagttgcacacttacacgtctcgtggtgttaggctcgacttcactatttcgcaggccgtgtactttttgccggaatctttttctttctttctttgcagcgttctttacagtgttgtaatagtataattatcaattaattaatctctggatcatggagttggcatctgatcagtcaaggaacttaggctgttccccagtgtcattgggtagacactcacctgaaaatggacaccttggcagttggcaccttgcagcctttcaggtttgcgaagcaatgaaaatttcaaacttattaaaaattgaaaagaatccaacttgatctgcatgcaatcgtcggttttattttatgaatcttatcttggaagttaggcagtgtagcagacttgtccctctcctatcagaaatcggcaatctgttgataggtttcaggcgtgtgcggatggtccaagtgcacatatacatgtatcgacatggctaacctttgcacttacatagctaatagcccattggaattaggcacgctaattaaacgacacaagtagatcacttcagatcagatcacctggagtttcacatttaaccggcgcattcaacacgatccaatctaactgatttatttctgaagctgcacgcctgcacctgttgtgaatggctcaaaccttcttcagtttgtagtcatggtgatcataaagagcctatttggtttgaagccaatttgtgccaacaagttttggcataaccaaatttgatggtatagaatttgaattagttttggcacaaataaaccaaacaagacctaacagtcgtttgacactattaaagccgccaacattttggtatggcaaaaaaattgatttcaatagatcacgtcccatgcgtcagatttggcatggacggcccagatcagagttgcacccggttgagttgggtggttactagttaggccgccaaagaagatgatgtacaagtgcgtacggacagggtcgcactagtgctactacggcagatgacgtggcggtgccaaacaatgaacagtcaaatagcacttcagtccccggattgtccaagtggaggcagatcacgcgataatgctgcattcaaacgtaccactcttatcttcttatcttcggttctgtttcttttcttcccttttgaggaagtcaaccatgcaaacatagtgctgcttgctgtacttcaccatgatttatgtaaggaaaccatgatttaaactttgaagaagcctgttgagttttagtttgactgaaattgcaactcgcaagcctgcaacgccactgtagtgggaaccattttaacccatggagagatatctacttattctttacatgtcttctaaaaagttatgaaaaaatcatattatgaaaaaattggtaaggaatattacaatatatgatttcacaaatatgcaagttaaattatatgttgtaaaaaaatattgtgaatatacgtgtagtagtttctccctctgtctatgaatataagggattatatatttacgttaatttagccaaaaaatataatgaatagaacaaatggaggactagaacatctaaaaccatgaaactgtagggggccagagatggattggcacattcatagttaatttgccttttttttataatatatgaatgtcgaatttgatattatatgtttgtgaaatgatatatgatatatcacatattaatctgacttgttaaatatttttaatttttttaagtaagtatggatatctcgaaatatcaatggtatttgccatatagtgaacactatttaactaaccagttccattaaaagcctatttaaccaacatttttagctgaaatttgatatcccgctgtttaattccctgtaaaattaagctagaatttttcacatagcctaaattgcacgggggttatttaggaaaatgatacacgaactaaaagaaatccttacaaaatttttttataaccagcaattgattagatttaatggttgagatatttgtttgtaagattcttttaaaatacgtacactagcaatgtgaattatcgcagtgatgattatttaaaattgccataatcctcctctagattcgccgtctattgactgttgaccagggtttcaaaaaccgccgggggcccggttaccgccacccggcggtacggcggttaccggcggtaaccgcggtaaccgcgcaaaaccgcgacaaatttacaaatcgaaatttgaattcaaaaattcgggcaaaccgcgcggtttggcgcggttaccgcgcggtttgacgcggtaaccacgcggtttggcgcggttaccgcgcgatgtgtaatgggttgcacagtaacgggccggcccatttttttttctttttccaattttcaaatttattctccgttttgctctcaaatttgaataaatattactcttttttgagaaatttcttcaccataaaacactataaatcaagcactaccttcactattttttttgatttttttcttttttttttaaatttttgaatttggacgaattttattaaaccgtaccgcgcggtacgggtaaccgtacccccgcggtacgggcggtaaccgcggtaaccgcgcggttaccggcggtttttcacaccctgctgttgacagcgcagccaaattcaaattccccgagcgattctcaagcgcatgtcgcccacgttcctactaaacccgaaaacgcgacggaatttaaatccccccaaacccaaaaagatcgcgaaagttagtttcgctcccaacccgccgcaccacctcgcgctcgccgccaccgcgcgccgcgccggcgccgccgccgtctcctcccctacaaaatcctccgccgcagatcactctctccacccgcggagcgcctcctttcctcccccaccgccaccgccaccgcctactccttctcccgcttcgatcgaaaccctcgggagctctcgccgcggccgccgcgcgcgagtgcgagcagtatcagatgaagggcggcgcgtggaagcagagcggcgtggccgatcacgttggctacctcggcggcggaggcggggcgctggtcggccgcgcgcgacgggcgaggctgtgcctctacggcctcgcgctcgccttcggcgcgttcgcggcgttcctcgccttcgcgccctcgcttccggcgccgccgccctcctcgccggcggcagcgtggttcgacggcctcctcgcctccgcgtcgccctaccgcgcgcaggtctcgggctacttctcctcgctgttccccgccaactccacctccccggagcctcctggaggagcagcgacgaatcggcgaggatcgagcggtggtggtgggttctccgcgacgggtgggcaagcgggaaccaatggctccagtacagttgttgccggtgagcagggaagaggagttgaagtatcaagcagcaatgcgggaggtgttccgagcggcaactccccatccggcaacgctactgcggcgatgcagagcaacccgccgcccaatgatcaagcgggaggcggtgccgcagccaataactccaccacgggttccgccggcgaggctgcagttccaagccgcagttcagccagaaacggcacgatgaccaaagatggtgcccctgatcggatcaatggcaccgacgtgatcgcgagttcatctggagatgtcaccgcagtgaaagctaatgcaagaaatgctgccgggtctactcaccagctaggtggtgcaagtgcgatcgtagattcaagcaatggaactgctgctccatccatcaataagactgggaatgcagcagtggccacggacggcaatggcgctgcgcctcagagaggaggagccccaggcaagaaccagactgtcccaaatccgccggctgcactcgatcagaacaagagtggaagcagagctgctgcttcaggtggaagcaatagtacaatggatgctacaccacaggggattgctagtaacaccacagaggctgctgtcgatgccggtggtaagaagaagaaaacccattggattgaagcaatggcgagctgcgatatgttctatggaaattgggtccgagatgactcataccctctctatcccgagggatcatgtcctcacatcgatgagtccttcaactgcccgctcaatggccgccctgataatgcttaccagaggctccggtggcagcccagcggatgcagcattccaaggtgagttgagactacttgagcaactctgttttattcagttcttggtgtttcatgtgacacagctgaaaattcagttccatgatgttcataacagattgaacccgagtgacatgttggagaggctgagggggaagaggctggtgtttgtcggtgattcgctcaacaggaacatgtgggaatccctggtttgcatcttgaggaattctgtcaaggacaagagaaaggtctttgaggtgtcaggcaggcaacaattcagagccgagggctcctattctttcttgtttcaggtatattgtgcatttcaatcatgtctcatgctttgcatctgcgctaatttcagcataaggaatgaatgctcatttgcaaatttcctgttgtctaggactacaactgcagcgtggagttcttccgctcccctttccttgttcaggaatgggagttccccgtcaggaagggtttaaccaaggaaactcttaggcttgacatgatcagcaactctttcccgaggtacaaggatgcggatatcatcatcttcaataccgggcactggtggactcatgaaaaaacttctctagggtaagttggaattggtgctttctgattttgctgaagatctgcatgccatgcgttctgcatttcaagtgttgcttaccactgttagtatgttgaacctgtcacaggaaagattactaccaagagggtaaccgtgtatacagtgagctgaatgttgatgatgccttccagaaagctcttattacctgggccaagtgggttgattccagtgtaaatcccaagaaaacaactgtgttcttcagaggctactcatcatcccatttcaggttggcaaaaccttttctgaattctggcaagtttagtttgatcatgtgcaatatcatgttatcggagtagctgctgacatcatgtttattgtgtgtttcgattgtgcagtgggggccaatggaattcaggaggcagttgcgacaaggaaaccgagccaataacaaatgagaagttcctcacaccatacccacggaagatgagcatcctggaggacgtgctcagtgggatgaaaacacctgttgtttacctgaatatcacaaggatgactgactacaggaaggaggcacacccttctgtctaccgcaagcagaagttgactgaggaggagaagaaatcgcctcagatatatcaggactgcagccactggtgcctccctggagtacccgactcctggaatgagcttctctacgcacagattatggttaaacagcatcaaatgttgcaccaataaaggcaagtgtgttgaattacttgttcctgtacatgagctgttgtttgtatgagtgaggttaaggattttggtatcctttcatagagagaagtagtcagttagtcacagtctgacagtcgatatacgaccaacacgtattctgtataggctcataggattttatgatgtaaagttcatgtctagctagaattaatcagaaacagagaacaacaatatagcatacatgagatggtatatataggatcctcttccaagaatccctgccatttttgttatctgaccactaccttttacattcttagcatggtgatgtagtatcatttgagttcttcttggatatattaaagtatagagaaatagttgtattgacacctcaatctcttgaatcctgaatgattggtgtttcgttctgtgtatattcgtacttaagttctttgtaagtaagtttgtcaggtaatatgattgtacaacagatttttcagtactactgaagtttcggttaaatctgtcagatgcaagtacggcagctgttatacctgaatatgatagcagtttcaactttgatgagatcctgcataggtactattttgctgcatggttctgttctggtttcaactcagctgttatctctcttgaatattgagaagtaccccctgttaaacagctcatcattaattcatattccaatttaggcctgtaggctgtagcaatatgactatatgagcttctgcacattgctgctagacgagtcacagattcaggtagaagcttcagaatgcgcttctgcacattgctactagacgagttgcaaattcaggtagaagcctcagaagttgctatcgtaaacaacatttgccgtctgaattttttttcgcctttggggggaaaaatgcttgcagttgatgtgaacgtactagttgctacactgtagtctgtagcaaacgttgtttacgctttggttggggacataaatcagaaagcaggctattgtctgctagtggtgttttaccttgattttgcatggaccatgcatctggcattcttgctggtcctttcccttgtcgtatggcatcgtttaatttctcgcctctttaaatagatggtatgaaattaaatacgcattttatttgggtttatacatggatcatgaggacgaaacatacctttttctggctgattggacaatgaattaatgccgataatttactgaagcttttgtttggtatggactatatatatgggtatactgctagtactaccttgcaagcatgtgatcgacgtggtgtctgattaattagcagtctgctgttggtgagtccatttagctagctgggtttttggagcattatgtgctgcctgtactagcctgtacatgcatgccgacagaggacgtgcgcccaggatctagatgtgcgcattctgtcccaaatgcccatcagatggttgcccatcagctgcatatcgattcacagaaccgaaccatctgatggtccatgtctgaaggccatgccgacctgcctcgtagacgcctgtgtgtttatactttctggtgcatgatgtgagtggtctagatctatatgctctgattatgaatacatcgttgtatttgacttttttttaaaaaaaaaacaagaattcaatatttaggttagacacatggaaatatcatatacgatgttattcctatagaaatgagtatggtcgtgatagcataattttgttgtgtatcacaaataactcataaaatagaagttagtggagttcgaccgttgtgttgaatagcatgtatttcagagaagggggcgagtatcatttattccacatcatggataattccacgattatgggcaaccccgcttcatgcaccaggatcctctaacaagattaggcgataaaccgcctacctggaaagaaaagaaaataacattagcaaactattagatagtaaaaaaaatcccattgaaaacgatgttttcgatccctttatacagagagagagaaatcagtgtaaaaaaaagagagagaaaagttgctattgccatccttttctttgcgtgttttggtttctcttaaatcctaatggctattggactattatggaacattttcttttcaaaaaataatatactaactgtgtatacacatcaaagtaactccaatgtaagactgaaattgaaccttgcaccaaaagttccaaccgcgcatattatgagaatctatagtatatcattaataaaattgacttcaaaagagaagtgatcgtaaccaattaaaaatattttttgtggggtcacacaagagggagggcaaatgtaggtaagattgagattgactttatgtgggtcccacaaatcaattttcacgctgccacgatctaaccgaaaatttgtttgcttggatggaccacacatgtcgaaccaatactagagttaccctcataatcataataagtgtgctaggataaagtgttatttaaggaagataatcaaactcacaatcaacgaacagttttaaacgtaaatacggacacgagttaaggctaaccatgtggatataaaaacgcatgcacaaaattgttttatgcaaacatttatttgtaagacatccatcacaccaattcacacacaagtcttctttcagtctttacctcccccatttggaacctcaaacgaagacatgccaactgaaaaccacaaaccatagatctagaaatgtacacctaccttcttttttcccccacatgtattgttcatttgtacgcatagcaatactgtccactagacaaatctcacctgcctctccatcccatctcctatacaacagttctaatgcacatggcgtattgcatgcaaaaacaaacccatcccaccactcacgccatccatccatccatccatccacctctggagtcttgataagtgcacccatctcatctcatctcctactaggccaaagccaaaccaacccaaacccaaaaggccaaaagccaatcaaggcaacaatgcgcaaatatgcaaagtgtaaaaactgcaccaccaatctactcctattgtgcttactggttcccataaataaatgccatccatgaggcataaaaggccaaccaaaaccaaggaaccaacaccccaaagcccccctcctttaatttgcaccctccccaaatctccattgctccctctctctctctctctctctctctctcctccttctccccttctctctctctttctctctcatccatccatgaggatcaggaggcggcctcagtccctgcaggctctctcctccctgcatccctcctcagatccatccactgctccccagcctccaccaagaaaccatggacgttactggctctcggtagacaaggtggatgaggaggagaagaagtcggagcggttgcacttgcacccaaatgcggatcttgccgacgacgactcgtcggcggcgatgcgcgcggccgcggcattgccgttgttcccgcaggtatacactaccccctttgatcccaatctgctccaacgacagagaaaacaagaaacttgccattatgaatgattcttgttactagttactatcatcataggttgcaccacacccgtttatggcggatgcccagatctatctaactaacccccccccccccccatgttcttggattgatgccattttgccaggacaatgcggttgtggaatgcagcaagatcaggccccgtggtggtgcacagcagggagcagcagatggtcacaggaggtatgtgaagaacaactgaaactggaacaggaacaaaacaagaaagtgcctctgctatgctaacttgtgtcatttgtgtcatttgtgtgggtgtgagtgacagtagtagtggtggtagcggtagtggggggtagtaataaatggaaagggaaagcatccaagggactttttctatcttctgggcttggtttttactgttttatactgggcaatgccagcttgacacatgacacacatcaatccaaccaatttaatacacggccctgctcatgtaggcatgtactactgctactagtgttcttggcttctttactgctaatccatccagcgcactactgctcttgcaccctcgatcttggcatcttcgatcggccacttccatggctgttctatggctgattgtgtgatcgcctctcttacagcctgttttttgcttgtcctcttccatgatcgcattggtgcaaccgtgcaagccatgctgatcgatcggcagacatggaccatgtgcgtcgcgagcgtcgtgaactattcccttgtgtttggcatcataagttgctgcatctctgattgcattgggttggattcattgctgtagctgcttgttcgtcagatggttgacagatgactcgatgatgttcttgcattttgcagcctagagaatggccattacagcaagcctgatccggcgatcaggagtactacaggagagcgtctcgtcaacggcgtcgtccgggcaatgccagtggccgcgaacgcgaaggaagagaccaagaacgacggcggcggcggcggcggagccaagaagcggcgtggcccggcggtgctgatggaggggtcacgttgcagccgcgtgaacgggcgcgggtggcgctgcagccagccgacgctggtcggctactccctctgcgagcaccacctcggcaagggccggatgcggagcgtcaccggcggccgcggcggcgccggccagctcggccgcaccgagccgaggaagaacaccgccgccgccgctgtcgccgcggcgcccaaggcggcggcggcggtggctgagccgccggtcgtgcggccatgctagacgacgcgagatcgatcgatcggttcaactgcaagattcttttgttctatggtgatggtggtgcatatcaggtggtggtggtggtgaatcatgaatgtgaattccatgttccgttttctgtgaattgcaaattccatggcgtcttcgtggaagaactggaagatcacactgcagatgatctgctcttgaccagaatttcccgtgatagattccattgatccccttgcattcccaggatccaaaaccatgcaaaaccgttgtgcactctcgccgggtgcaatgcaaccgcattgatctcactgttcctcatcgatcacccacacgcaaaaaagccacaaaaaaaattcgtgaagtcagaatgcatttagtttgcgtcgtgcaatcgtctccgatccgacatccatggacgtactacagccacacggatcgatcgagcaattacttgcgtcaaaattatcacctggaaagcggaagcaacattccggataaagcctgacgcgacgcaaggctgcctgtccgggacagacaggggaaggatgtcagtgtcaaggcagtacttagccacttaagtactcacagtacattgatcataacctcttctactactgcctccgtcccgaaacaagtgcagccataagtttctgcgtccaactttgattgtccgtcttatttgaaatttttttataattagtatttttattgttatgagatgatacaacatgaatggtactttactcgtgacttatttttttttcaaaaaattttcaaataagacgagcggtcaaagttgggcacgaaaaaccatggctgcatttattttgggagggagggagtaactaacaacatgctctagtctaccaatgtttctaggctcatcaaagcacgctcgccatagcataggattcgtacaaaccgtcttcacattaacgctcacacacacagacacagtgtagggcagcttgtgcatgatcacgagaggcacaaaacgaacacaggagatcaagaagaagaaaaaagaaaatttaaaaaattggccagggcaaaaaaatgatgtgtctgttagatgcttttggatggtagcacgtagaggagatccggatgagctagcagatctcaaagctgcatgtggaggggaagctagctagccactgtagtagagctcgatcgcccagttgcctcttcttgcatggcttctagctggaggcagcaatggaacaactagccagagagagtgcatgagatcgttgcttgggacaaaaaaaccgtgtcagaatggacttggagtgtggggaacctaccttattatcttagcttcatgcatgtgattaatcggtgattatgtcttaatggaaggaaatgcactctgatccgttcgattttgcaggggaattatctgtgccgttgatttcaagggtcaatccctagataggacaatatggtcaggcactggtgggtcgactgggctcgtctgggagtgaacagtaaaaatatagcattaatttagagattgaaagtgtaacattttatagcaaacgtagtagagatagatttgtcttgactccaaaattttcaggaaagcatcattagattgttatgattgtgaggcaacatccagtaaatcattcatttaatttttttttgagcttgccattgtgtgtactacttgttcaaatgacaattcaacttgatgaaataaaattgagacccctatggaacatagaaatggtaaaataagggattttagtaggaataatacacaataaaatactaaaaacacataagaaacatagaaacggtcttttaaatagatggacagacgatgcaaataaaaatagagttagatgagagagaaagactgaaagaaaatttctctagaagtctacatgaaccattccaaatgacttttataggatttcaaaagcttcaaatatctgttttaaagagccaaacaggaaattttcttataggcacaatactttgtttcaaagtcaaagaaggcctgactgtgaagctcacccagtgaccaagccaactgacacatggttaggtcactgcaaagctaagcaaaaaaatatctccacattgctatcccagaaaggtccttttaggataggataacgcatttctcgtcttcacaaacgtacgtacggtctcactcactcactcgcaccaccggacctcacctgccgcggccatggagttgctgctcctcccttctcgaggcgccgccacacgcccgcttcaccaaccgagccggcgacgcgtcgccggcgtgttcaccgcccggccggcggcggtggcaagctccagcaacgtcgaggtcatcgacaccaccgctgcggcggcggcgaggggggacgtcgccaagaaccgccaagaatggcgcgcggcgggcgggctcgggctcgggctcaacctgtcggaggacatgaggcgcgggatgatgtggcggatgctggcgccacccgcggcggcggtcgcggcggaggccgcgttcctgagggtgcttgacggcgcggcgagcgacgcggcgccggcctgggccggctccgcgggctccgccgtgctgttcgccgtggggctgctcggtttccactacgggttcctgtcgtcgaggtggaacgccgcggagaggggctcgctggtggggtgggagctcgccgctagccactggagcgaactgtccatggccaagcattcctccatagacgacgaagtggacgacgacgaggacgaggaggaggaagacgaagatgaggaagaagtagaagatgaagacactgactaattaactcgatttcacagcactttgttcgattaaaccatgaaatactcagtaaagtggtttaagacttgtagtcagatatatatattcagattaatagagattgtagttgtacatgaccgttttatgctaaaagaacattcaactcgcagctgagggctcctttggaacgctgaaacgttacaaaaatcttcacacgagttagttcgtttctaaaatgttcgtaaaattcctctttcccataggtcatttcggatactatcttaacatcaccacacgactctaagtgttaatcaactggaccgaagaacatgacaaacatacttacatggtactcctaattaagatcgtgcacgtctggtgacccgtggcgtgctgcacttgtgagcggtgagcccccgcctaatcattcaagaacctcgtcgacgccggcgtcgccgatgaggcgaccgtgttcggcggcgaggagggcgagttcctgcgggcactcatcgacgcggacacgcgtcgttcctggtcgggacgctgctggtggcggacgcgtcgatcagcgacgaggcgtgggtcgggcggcgggagcgcgacggggagctcgcgttcctcgagtcggaggaggaggtgctgtggcggtggacggcgcggcgcgggtgccggcgaggcggcgctgcgcgcggcggccgcggtgaccggactcgacctgcagcctccgctctgggtggcgttcctgctcttcggcctcctcctcggcgtcccgtacggcgtgttctcggcgagcttcgatccggcggtggagggatcgatcgtggctcggctgggaggagttcgtgcacacaacattcgccacgtcgtgctccgcgccgccgccgccggcgacggccatgtctacgatcaccgcgacaagtagaaagattgttactacatacgtattccaatccagcaaactgtgaatctgtgattgctcagcctaactgtttagtggtatcatcagttgatgagctgttgtgagttgtgactcgatagtgatgttctttttgtgaaaattagtagggtttttggttgcttttcgggtgtccatgaatcatgacccttgttgttaattgagagctgcaatgctgagaaaaaaaatgcactagtgctagcgtgcaatagggtatacactgttatctcacaagctgagtaacttgtgtagcaacggacaagcatctctaacctgatccaggtgctgaggtgcagggtcaccagtttgcacagctaccagcatgtaggcgagcagggatgcaggcaatgcttcaagccaagaatgaaacagtggttcatgaaaatacagtactcctttatttcaaaatatatgatattattgatttttcacataacgtttgaccattcatctgattaaaaatatatataaatattatttattttgttgtaacttattttatcatcaaataaaacataatcttaacttatacttttacatacttatattaaattttttaatgagacaaatggttaaacgttgtatgcaaagtcaatgtatcatacattttgaaaagaaggtagtatctgatttagttcatccagtctagtctctgtcgctacgagattaatagaagggaaaatatgcagctagtgaaaaatccgtatgcgagggagctagttagagatgtaccatgcgcgacccgttgcttaatggcatggcattgtgtatatacaaccgtctgaatacgaccagttgcatattatactcctaaaactctagtcgtagtggtgaggggtgaattcgtcaccacgcacaactgacatgtggggactagaaattgatgaatctgtcatcacttacttccactatcagctgacatgtcgatgccactaataaacagtgaagcacgcagaatattcattcccaagctatgaaaaagaacaaaagaatatattcaacctccttgcaatgtatgggtatttagctagtactatacatgaagggtttgccgcgcatgcatcaattcatgactataccttgaatagttgaatacgaatacgttagcgtttccaaaacgttcctacctccgatccaatacaaactttatccgcgtttccaaaacgttcctacctccgatccaatacaaactttatcctagttcccgtatactccattcgttccaacatataatacgtactatgatatatcacattaatcaaagtatcttatattttggatggaggaaatatacatacacgagagccacaccaagcttaactgtaaggccctgttcttttttccaataaaaactagataaactttttgataaaagtgatatactttttaaactgctaaacggttcgtttcgtgcgaaaactttctatacgaaagttgttctaaaacatgaaattaatccattttttaagtttgtaataattaaaattcaattaatcatatgttattaccacatcgttttgcgtgaaacaattaatatttatgttcatcttcatcttaagtagattcaaacaccaccttaatgtgagcatatatatggaggcgacacagttactggaagctccggtggtggattcagagaatcgtttcgttggtgtcataacgtgtctatcggtatcataggatgctaattatgcttagattatagtgttataacatatggataaacaatttcgctatatgttttgtcgaaagtcatcggtgtcacctgataccagcccttctactttggatccgccccttcagctcccgttgggcagtgcccgcgcccgtgcggcacgttgcgtaaagggagaagggtgttggagatgaagcgggacatgtacacgggacaccatgtacgcgtgcagaatcatggtttacaaccggttcggcgtgtggtcaccgcgacaccaggggtacctcaagttcgccaggctcggcggggcgatctctcgatcctgaaccagaaatttggaggcgctgatagagcagcacgggctgtttgcttgggacgagtacaatgcacggcaaggtggagttgttggctgcgcgtgagtagctgcagcgccagcggctttttttctccgccgcgcgcccgcccgctcggcttgtgattgcgaggagggaagagatgcggcgagccaagcgacagtgtgagcgggacccccggcgtctggtgtcgttgaagaagaaacttcgggctcccaggcaggcccaaccgcagcatccgtccccggcccgtttgcttgcacactttttactgtttctttttcctttttttattgagagagttgtgctcggatgagtttaggctgtcttcggctcttctttttcgcgggcaagcttccccaaactgctaaaacggtatatattttttatataaacattctatagaagaaatgttttaaaaaatcatactaacttatttttaaagtttttttaagttaatacttaattaatcgtgcactaattggttcctaatccttaccccagaacacagcggtttgaggtcgtttcaaaagccaaacgtacgcgtgaaaaaaaaagaaagagaaaagcaaatgcacaattttggtagggaagcaaaactaaaaatgaccctacgatcagtgtgcagcagggcatatcgtaccgttaatctgctccaccgacgacgggaacggcgaaccgacggcctcccaccccgccgcgacgagagcttatccatgagacaagcgtctttaacgcaacagcttgccgagccctgatccagttgcaggcaaccaacaaactaacacaattgcttagcagatacgcaggcaagatttcaggccaagaatgaaacagttattagtgaaaaactagccgtcattatatacatgagatgtagttcctccagtttggtactctagctaccagatctaattgtggggcaaaaaaaaaattatgtagctcacatagaatacattctgccaagtaagatagccacaaggatgtcagggctctagcgcataaaaatgtgaccaaacgttagcaccttgtcgatccaaatcatacccgcccatgctgacgagcatcacattcacgcgcgccacgttccaatgcagaattataagattgatcgttcaacttcgacatcccagctcgcttcaatcgcctattccgatacctccatgcgacttgaatacgcgttgcagcaatggttctccagtagggtgactcatacctgttggatgcagttgcaacagtagcgcaccagcattagtgaacattgtcatacatatcatagaagatagatattcggcaactgacacaactgaatgcatgacctgcatggagcagagtaccgtagtagtttctaattatcccaaatatcccagctaataacaattactgtgatgcatgatgaactcccttagttttttcccaactaacttatggtaaaattaatttaaatcaacagataaaccattcataagcctacacaattctagttgaatcagagaattattctggtgagcatatatgatcatgtgacactaaagaaaaaagtctccacctgattgcaccctgcactcgtggattgcgcaagaatcgtgaaaattgtgaagttacttcttcgagatcgcttgcccttagtacaaaagcttcaacatttgttaaacatcttacagtacgaatagcaaccaaacgcataccatggaatctcattctcccaccatctgaaacaatagaaatatggagacttaccaaatataaatcacagaaaagagaaaacaataaaaacacaaaatgcaaaaactgcagacctctgttagctgaagagtgttccaagtaccatgtcaggagctcctctccacatacatcaccttcatgtaacggagctttgcttccatctgcactgatgctttctagctttcccctcactatgaagaccattttttcaactggaccaccttgataaaggatgtcacttccgctaatatacaagttttgtcttagtttgtcacatatagcgtccaagataggccaatccatcaatgtgaataatcggacctgcaaaataattgtagtcagcatttccttgaaaattgtaggggtaaatcatcagcaacctcaaattttaaatgcatcatgagcatggaaagtaaaaatgtgatagagtaactagttgcagtgcttgctctcccagaacagtcagagtcctcatataaacaaaccttgttaagaaatctaaagaaatgacggcgtatgtccctttgaatatcttctggtaaattacttaaaagctcctcttcattcaccccttgggtagctgcccaggtgaacctttctgcgcgtctaaccctcctggacattcataaaactattaagtattacaatcttccagtccaaaaataaagaggaaatcatttgcttgccaactccaacaaatgtaaaagttcatgttctgcctggggaagtttgtgttctttgcccattataggaatactccagatttaccattccctccctctccaacaaatctttaacttctggtatgattaagattgtggagatgaagaagagaatgcaaagaggaaaagcctatttcgaacatttcacaaactgacactcatttttcttaaagacgacagaatacactgagtagcgattgttggttagttgcacatttagagtggcaaatactcaatatcaatccttggtgtcaaagaaaagataaaattgcacccttttgggcgagttaaaaattgatttccgcacaaataaactagttcgaaataatgatcctaaaagaatgtagcaaaccaaaattcaggtatctcattgacattgccatgagactgttgtgcatcttctgcatatggaaacttggtaactaaattgacaaatttcaatatcaaacaaatgatgtttccactaaatctgtttcctcaaaatatatcatgcattcgttttacccacaaaacaaaatgagatctgtaacacagatcatagcttgcatgagattccacttataagatgatttatcaagaaaagcagcctgataactgttgaatatgtacacgtttttcttcttctgaataataggagccacataaacaataaaaagtaagacaaagcaaaaaaaacaacaacatattaatagtctgaattaataaatggttgcgatttgcaacaagattaaggaatatatgatgttattttttaaagaaaagattagtaaaattttgtttagaagttatgtagatgaaccttcttaaatcttctggcaggcgtctatggctcatccactgttcaacatcacgcctcctaagttgcatttctagtctcctatccaaaaaaagaagaagagagaatcaggactagatattttttctgttagctggtacagcttatatctatatagaggtgtcaattcctgatgtgtattaacacaacaattagaggtccatctcaggattgtaaggtagacaatattgcacaataaacactagcaaattttgcatgtataaccacgtaccgtcttccaagagcttggagaaaattttgcatgttcccaataagtaatgcgaaaagcaacagccccaaaccaataatagccatagtaaacaggacttcccatgcaaaataacttgggacaagattaccagctagcgtacttatttgctgacgtcaaaccaaaataacatcagtaaagggtagtcaaaattgtacagtgttagcatggatgctgtaatcacgtatagaaaccttatacatcaaatggaacaaatgagacacaacttaagtacaagaatataaggaacaaaagtcaaatacctggaaaccccaaaataatgaatatatataacgtttaacagcattgtcctctgtagttagcaaaacagcctgttcataaatcccatagtggaaaccgttgtctccagtgtcgaaacaagctgttgaggctgaatcattaaaccactgctgtctgcttagttgattctgcttcccaatattaatgccacgtccacaatctataaaaccatcacaagatggaatttttgatgcagaacaagcattccgtaggcattggttgaccctctgtcaaatgaaaataaaaggaataataacatcatgaacctctactttagttaacatctcctgagtagcttgatatgatcaagtcctctattaaaaataccaaaggagtcgtgaacaacttaaaaggagcaggtgaatatagcaatttacaatcaccccttttaacacaaggaaatcaaatgtgcatcgttgtaacaatagaggttgtacagctcttagcctccatggcagctgtatctgttgtactagtttgaacctcttctcaatcttaataaactttggccgcgtatcttacgccggcccggcgaaaaacacaaggaaatcagcatgtatacaataaaatgcaatctaaatgaaaacaacaaattaaacagaagatatgttttctccgtatcaataataaagcaataataaagcacacattgtcatggcatagttctccaaatataaggaaacaattaataatatgacattcaatttgttggaatttgtaaaatgccactcgagtcagtgttgcatccataaaatgcatttcttaatttaattccttgttctttgccgattacgagccatatgaaaagaaaagcatgcctaccccactgtctatcaccatttctcttcatcccaaaaatccaacagtttccaaacaattgctctccacctctggtggcctagactctgacaggctccatcagccattgagttataaaacccctctagtctgcaaccaattctgagacctctgacatggctggccacaacagtagcgaggtgaatttttcagattttggtccttttgaaaaacttatttcgcaaatagacccttggaaaaacttatcccagaaatggtccttcttggggcgccagagtggctggcgccgtccccctgccgacgtggcggggcgatgctgaggtagctagggggagcgcgccagagtggctggcgcccccccccccccccaatttttttatttttcttttatttttttgatatttttttttcacgcttagggacacataagaacccaccatagaaaaaatgaactcaaatggacgtaatatgtgacctgtagaatttttcctctcctctcctctctctccgaactagtgcagaggagagagatgtgcaacttttttatttttattttatttttctgatatttttttcacacttaggaactcacaagaaccaaccatataaaaaatgaactcaaatggacaaaatatgtggcctatggaattttccaaagctctaccgagaaacttctctcctcgaaaacacaatcttgcaagcggaatttggaggttttaatatcgccgaacccggcgaagctggggagaatcggatgtaacattttctgtagatgtccatggatatattatttgcctgattccgagtccgtatgagaaaattacgcctattttaataaatgacattttgtccgtttcggtagagttttggaaaattctacaagtcacattttgtccgtttgagtttattttttatatggttggttcctatgttctcctaagtgtgaaaaaaatatcaaaaaaatgaaataaaaattaaaaaattgcatctctctgtactgtttaacttatggctatcatttcatgtggttatattttgaattagattaagtaatttcatatagtgatagagtgcattatgtataacatgctgatcaaagggttttactaaatgagctatggtctaattttagtgaaggtgcaaagtagactaagtggtatgctagctattttcagacttagctaagtggtagttcgagtttaaatttggttgtatcgtgatcctaagtgtgaaaaaacatccgaaaaaataaaacaaaattgacaccgttgcaactccatacagagaaataggaatggaggtgaggggtgggggggggggtgtggcgcccccctccctcgggcgctcctgccacgtcggttcgcgtgtgccacggtggcaggaggacggcgccagagaggctggcgccgtcccgttggatgacggcgccagccactctgacgccccaaaaaggaccatttctgggataagttttttcaggggtctatttgcgaaataagtttttcaaaaggaccaaaatgtgaaaaatccaggcgagtgatgacgatgaagcttgagcaggttgagatagcactacaagtcaaccattgcaatgtgtgtgatgacgatgaagcttgagcaggtggcaacaatgatgagggagagggaacagtcgtactgctgctctttgtgagggggtaaaggagaatggagaaataagaagacaaagggagggcatactggtaagtttcaatatttgagtggatgcaaaggttgatttgagtggtttccctatttcaacatttaagtgacactatcaatttccccagatgaaaaactactggttcaacatgaataaacacaatatttttgtgcagaaaactgaaatagaagctgaactaacctgcaatccaaataggtaccaacatgaaccaacaacatgtcccgccaaaacaaacattagaaggttaatcacaaagttagcccacgctgactcgaatatgaatccattggcagatgagtcagactgaccaccaagcaatggtacaaatctgatgatgcggggaacatactgaagaagaacagtgatacgcagtaaattcttagcatagtttgcagttgataacccaacatatttagggatgaccagcaatatcatcacctttatcaaggaacagaagacaaaaaaaaagtattagccaataagatataaaaaggtgtaaattgtttcgatgaatatcctttattaatagggttagaaaaaaatgcaattctgatttacataagcaactggggcaataaatagataaagggcatcagtgcaatcagatcaaatgatgctcatactgacaatattgatggcaaacagaacagaaagtaacaaagaattgccagcctagctaaggtgttcctctgcatgatcaatttcatgagactcatcctcaatctgctaaggtcacaagtatggaataatcaattagtcattatcatgcccaagatccatagtattttcaatgctaaacagcaacttctttttgacttcttgtcaatttctagttggcttaaatacattggcaaatactctgagaccaacaagaaactaccaaaataaacctgaaaggttcaatagcatatattttcaacggggacttgaaccaatactccttagatgaagcttatgtattttaaagtacatcaatagtggagatcacaagtttatagcttaaaaggataatgtggtctattgtgcacgtgaagagaactgaaagaaatgctcttgatctgttcatgataggtccataacactagctacatagggcaatgaatttgctgtgtgcatgaaaaagatgaacatggatcactagcacttgccaatcgcaagcattcagttgtggccaccggtccacaaagccatggcagatgcaaagtaataagccaagcaaacaagaaaagcaattttcaacagctggatggatagctgggacctcctaactcctatgctgcttgtgccaggtctccaacatactctccaggatgtatagtgcgttcccagtagctaactcttttatttgtttgacctaccctaaaaaataattatcataaccctaagaacaagtttgccttctgctaccgacttgaagaggagtaccaaagcaatataaaaatataaatagaatgataaaggaaaacttcagcctagataataagtcatccatcagggataaagaagaaaaatgaagcttaatgtcaaaatttagccacatcaactcagaaggataaaacaagttacctgagggagtggaagcacaacgaagaagtcgagtaaaaaatatccacgaagataacggacagcaattttctttggctcgtctactaaatctccagctcccactactcgcgattctggagctacataagccagtctgaactgaaagagaaatgcaaaaaataaaacggtcaaaagttgataatatgttttcttggggttaaaactggacaggaacaaatagatgcaaaataaaataaaatacaagatatgataaatcaaactaaaacatgataccagaatggagtcaaagcatgacaaaccattacaattaacaaacaaagggtaaaaagatatcacaactatttgatcatggagatatgataaatcatccgctgaagatcaaacaatgcattactgttagttactaaaacatgataccaggacacaagaatattgaacctgagcggctgagccttttctcacatattgtcaacagataaaaagtgcaagttatactcacaaaaaaccagtatctaatttggcatttttagaagaaaactactgatcactcaacaaatatacttgtcctaatatgcataccaaagaaccaaaatataatcaaactgccttccatctgatgccttagtgaccatgttatttatgaaagaattttataaaatgtggaaccataccctatcatggaacatgaattatagaaccttctatagaatagcaaaagcaatgatgtactgacctgaagaagcatgtgtagaaaataaatagcatcagtcacgcttctcacaactgcaagtgctgtagcaaaatgccagttcaacacaatgcacttgttatcctgcataaaaaaaaagggaacaaaagtaagtgcaggtcagctttgatcttcggagtatctgagattttcggaatttccgaaaagcactgcttctgcatctacttaaaagttttaatcgcctattccttcccccctccccttttaggcttatttgaccctttcaatccattacacaagatatcaacacttagaacagttaaccgataggagaatagaatgctgcaacaggagtaagaaaaattacacaagattagctcacaaactcacaaacaaggtgcaacaacaaatgaagtgtacaagaaagttgtaggcttttgacagatggatatgaactagcatcttcaagtgaactagttaccttttgaactgataataggaagaaaaatagtgggtcaatgaatatggcaaccaggcatgatatcacaaagaactgattccattgctgaacaacttttgcatgtgggttcataactggaatgcgtgaaaggaaacgctcaatttccttcttccatccaccaccatgctcacaaagaaaattatggaacttcaagagagcaaaagaaaacagattagattattcaatacaacaataccacagtcagtaactttaagcgctcttaagaagtgctttgatcattatgttgaagaaatctaactagacaaaaaaaaaactaagaaccaaggtactaaatagcattcacaatggccacaattgcagccgcaataacaatagcggggtacttccgctacagcgctacctccagcaatattggctgttattttccattgaagattgaaatagaaattttgatgcttaaaattgagttatctgtagccaaatgttgattgcttactaggagatttttatataagaagaagataaatatcaactaatattacctctcatctatgtagaggtgcattctatactctgtttttttttttttgccttttatcttttatgtttcttttagacttgtgttctctactttataattcagaagtactaggcttctcgaatccagatcacttatgatgattgtgaagtatgtatcaatactatgctattttactagaaaaatgttgcgcaatccagccacaactatcaggttcagataaaatcatatagttttaatgttttgtgcattcctacaaaaagagggaagtaagaccaccttactgtccaatgtacttgatcctctgtgaaaatgccttttgtttttacaagcaggagggcagttgacacaatcaggatcgtcacattgtcccaaaggtccagacatcatcaaatgttcattctttggaacattcccactataagaccacctgtttcctccaatttcttctggcattatcgcatgtggcttgttgacttgttttccttgtggaggtcgaggaggcatatctggtgtatttgtaaatggaatgcccgctgctgcagtttgtgttggtggctgaacaaacagaggaccagtatggggtacaaatgtgtcttcttcgtattcatcatccctaactggtatgcacattgatgtacttctaggaggaaacgttggtagctcaacatttcttagtagcataggaatatcatctctctcctggtcagacatttcttaaccctgaaatcaacatccattgtaatagaaaatcaagttcaatgacacaagcaagaaagtttgcatacttttgtataaaagaacattatctatcttcagagagtaacgactccaatcaatatcaatactcatgttggaattatatttgtagcacaatgtcagcataacaataacgaaaattttcagaacattttcaggaatgtaaaaacacattactgaatgccagtgtttgaaacaaccaccttagatagaaatataaagttattaacctataatggccactagaatgatacagcatgaaaatacactctgcggtagagaatccacatgtagattggccaaacaaaatcagcccctgttgtgtcagtaacctgctgcatatctaacaatggtgacaagcctatcacaatcaagtgttcacctgattaggtccccaacttacagaaccaattacatctgtaggagtcccccaaagaacagagaacctgaaatgagataaagacattttgcacttgttatagaagggaaacctatagcattactgaatacggactgctgaattggaactaagaagtgcaaaccaataaagacagcaaatacagctgcaacaactttaagactagttgtgtccaatactccaatgtatgagatgaacgaagagagaaaataactaataaatagtttaatataaaaaggggtatatatcacttgaacttgcacattgtgatatataccaatagaaagcctttggttctctcaaaataccactgaaatagtgtgctcttcctcaatctgaatctaccgttctcctctgatggaggttcgattgacccttgaagattgaagccaagcagccagggcaggcgtgtggtagcctccagggcatcgtcagtgccctccttaagcagcttgagcaatggcggcacctggctgcagcgagcaagctacactaggttggcggtggagtcatctaatcaagggaaaaacattggttcattcatcctcgccgccgccactcatttgctacacccccattgcttcagtggaatcatctatcttatcatcaaaatcaccaaacaccagcaaaacattgcacttcaccaaatctaacacccagattcgcatacaaaaaaaacaattcaattacttccaggaaaaccacgaactcatcggcttccaaatcaaagtaggactcgaagcaacgaggcggcgacctcagggaagacagacggcggcgggaggtggctaccctggctgaacgcgagggcacgcaccgccgccaacaaaaaaaaatcccataaaaatcgcctctccgactcctctggaagcatcaaacccctactcccccactctaccacatcgccgcggaaaagcgcagaaaaaaatgaacaaaaaaatgaagagaaatcgaactaacccgacgtgttcttcttcttcctcctcgagacgtcgggagattgcaccgatcaacagcggccaaccacaatcgctttcagaacttgtgcgcgatttggacactggagcgagatagcgaactatttttttttccacttctcctttcctttttcttttctttttgatttttaatcccttcctcttgtggcttccacgccaaggaccaggaggagagaaagcgagtggacacgggggcaaagagtcaaaacgacgtctccttttctctcactgacacggggcacgtgaggaggggcccgctgctcagtagatggcgcgtggggcccaccaggcaccaggtgggttttggactgtagctgctgccccgacgcgctgctcgctgccccactctctccccattcccctccacgccgccgccgccgccgccgcgtggatggccggagtttccgccgcctccgccgccgggaagatcgggagcttcctctccaagaggccgtacgcgccgccgtcctgggcctcgcacctgtcccccgccccctcgcagaccttctcgctcggccatgtgagtttgtttccctaagtccaccgcttgatcgttgatcctaacggccgcacttgttcttatcggtggattcgattcgaagtagttttgaattgattaggaggatcgattccgggaaactcacggtttaatttctaattgaaacagttcccgacgccgatccacaagtggaatctgcccaatttgccgaatggcacggaggtgtggatcaaggttagagataagcaacagtttgctgtatcaatgaatagatatgattcagccccgcaaaaaaagaaagaagaaaagaattgatatgattcagggaatatgttccatttactctatcaatgaatagatatatgattcagggtagagtagtttgtttatggagtttggcttctgacacgagagtttgggggaaattgcagcgagacgacatctcaggcatgcagttgagcgggaacaaggtccggaagctcgagttcctgatggcagatgccgtcgcgcagggcgctgactgcgttataactgtaggtggcatccagagcaatcactgccgtgccaccgcagtggctgcaaagtatataaatcttgattgttatctgatactgcgcacatccaaggtgatctttgtacttatgacttatgaggttattaaatcattaaattgatatgatatcgtgtggtagcatatttgggctaacctagttttggtggggcatgttcacattcagcttcttgtggataaggaccctggtttggttgggaatctccttgttgagagattggtgggagcgcatattgatcttgtttcaaaagaagaatatggaaaaattggcagtgtggtatgctcttttcgatgatgtgctattattgcttttattattattttcataattccatcgggccatgtgtagcaaaggaactttttatattttggtgttatactgatacttgatatccatactcaagtagttattaaaggggctaaaggtccaatcaagtaatgcatcctgcagtatatgtctgcatcatacaattagcatggtcattttttccctattctgaggaaagatcatgattatattgcctattctttgaatatgtatgtagataaactggtaaagtggcattgcctattaaaatatctgagtgatctttttcttgttagaacttctttattcatattgatattgcttaaaagtccctaagcctagtatggatttatttggttcaggctttagcggacttgctgaaaaagaagcttttggaagaaggccgaaaaccatatgttattcctgttggtggatcaaactctctaggaacttggtattgttttctgttcaatcctaactattgaaccatttttgcattttcaatttctttgtgcgtttatagcatactttgaatattcctcagggactattattattcatggattggtgtttgccatcagtctatcagaaaagaagagattagtttgtatttgaataaacattagggcatcacttttttttggcaaatttctattggtcaatatactatgttggacctggaatgttggaattgtctaaggccctaggctctgaatctagtggatctcatgcaacactagaagatccggttctatcttgtgtggtggctaacaagtggagcatagctgaaggacaaatgtagtgtattctatccacatttaatcaacaacattgaatagaatataagattactgtaaagagaaggtttgcacttcaaagttcaaacaggtctcagaatttgtgaaagtgatacccgattgttgaaacttgacctatctttgtaacttgtattgtttcctttttctttttgtaaatcagaacttgttttgtttcttgataggggatatatagaagcaataagggagattgaacatcaaattcagatatcaggtgatgttcagtttgacgacattgttgttgcatgtggcaggtattttgtcaatacgcaccattctttacttttaaggggtacttatgtactcacttgttattgcgtcatgcctagttcctgaaagtagcaattgctgctttatgacttgaatgatttttaaatttatgcagcggtggaaccattgctggtcttgctttaggatcaaaattgagtagcttaaaggcaaaagtatgcactttctttgattgttttctatcctgctgaaattgttcgactaattatccatttttaggataggtccatgctttctctgtttgtgatgatcctggatatttccattcctatgttcaagacctgattgatggacttcattctgatttgcgttcacatgatttagtcaacattgaaaatgtaagtacatttttaaagttctatatttgatatttaaatggtattgaagagtggacttacatcctctaattatgacattgttatgcgcgtatcagtatataacataattgttctgaaactagtttattcatttcattgttccaattttatggtgcaactctaattgatgatatttcctgctaatgtgcattggtagaattttgtgaacatttgacttgattacctgcaactgccgcttcacaggctaagggcttaggttatgccatgaacacagctgaggagcttaagtttgttaaagatatagctacagcaacaggcattgtccttgatccagtctacaggtacaatatattccttttgttgaaacattaatcccaagaaacaccttttgcatgtaactctaattttacaaccagtatacttgccatttgtcgaaaagtataaaaagttttgttctgttagactaatattgaaggtcatcacaagttcatgatagactggccatatcattgcctaaagatatatgcttcatatttctgcagtggaaaggcagcatatggaatgctgaaagacatgggtgctaatccagctaagtgggaagggcgaaaaattctttttgtacatacaggtggtcttcttggtttgtatgataaggttgatgagttatcatctttgagtgggagttggcgcagaatggatcttgaagaatctgttccacgcaaagatggaactggtaagatgttctgattgctatgctccaaaattgcttccattgttgttagaggtttcagacatctcattgtctaaaaagagtattcgcctcaatttgtacgacaaaattcaaagcagatggttaatgtaaaacactgtttgttatatttaaagaataaagcatatatttctgccatttggaaataaaggtttatatacatttgatgtactgccaggcaccttttctattatctttgcttatgtaagattgttttattttataaaaaagaaaatcagatatgccatttctgttacaaagacctgcctaagcaaaaaactgttcttagggcccctgtcgtatacataaagcaagcacaccattggcaatctttaacattcaccattaaacagtagtaatgaactatacataggaagtaacagaaggaaatacaccgaagattcaacttaataacattccaatagcatggaaaagctaagtgcaggagccagagaccaatccttgcaatggcaccaactcagatgaaggttctctgctaaaagatggatgaacagcaaaacaagcccagcattccaatttccagcagtcccatgtagcatagaatcaggcatttgacacggttggtgcacgcaccacagtaaccgggcaggttgcattgttgacaacatagttgctaacacttccaagtagggccctgcattgaggtaaaaaccattgattcacacgcaatttaactgagaagaggtttagatcaaagaatgaaaaaggtttaaatgctaaccttttcaagggtcctagtcccctgcaaccaagaacaaaggtattcaccttgagatcgtctactgcctcacagagtttctcccttgcatcaccccagtaaacttttgccagtacttcaacctgatccagccaatatggaatcagtgttttgctttgaattacatttggatcaacgtttctttttagtttgattacatttgaatcaaccttcccttctagtttttacagtcccatcacaggtaattcatgaagaattcagagaaggctgcagaatcattacctgcttggacttggattcagcttgcaggatctccagtacctccttatcggggttgatcccatacctcgcctgcacgttcatctccataaactccagcagaggaatcaaagctacacaaagtcaaaaaccaacggtaaatcagatgcaaaacctgtcaatcttttctgaaccagaatttgctgaacaagagaagaaactgaaaaggcaaaagaaaaaaaaaatgcaatgcccctacatacgtgagccggtgctcttccagagctccttgtggctggcatctgctcctttgggaaggacatggacgaggatgatccggtcgccggccttcaccaggttatccaccgcccacttcgccgcggccttgctcgacggcgagtagtccatgccgagcccaatggttcgcttctcagccgccatggcaatgggtaaacgaaggtggtgaagctgtcgaagtaaacacctaaagaaaagagaggtatttgtggtgctatctctgggttaggcttgtagcacaagtactcctatttaaggacgtcgttgaacagcaacagaaatagggtgacatatcgcctgttgatagcgaacttgtagactaggttgcctttattccttgtgcaaactgccttttctcctttacatggccgatcggccgttcgccagataggcagccatgatggtgcttctctctccagaaggctctttaatcatctggaaagacgaagaatattttcgtccaagctcagtacaagtatggctttgatctgtggcccagtgtcaattgcgttaattaggagccaataatgtttccaggtctcaattctgacgcagtttcttgttttcctggccaatgacatggaaacaagtacggttccagaacatagagatatttcacttgcctagcagctgtagggggtgtttagatgagaggtgtaaagttttagcatgtcacatcgggtattatatagggtgtcacatgtagtgttcaagcactaataaaaaaacgaattacagaatccgtcagtaaatagcgagatgaatttattaaccctaattaatatattattagtaaatgtttactgtagcactacattatcaaatcatggagcgattagacttaaaagattcgtctcgcaaattagtcgcaatctgtataattaattttttttctatatttaatactttataaaggtgttcaaacgctcaatgcaatagggtgcaaaatttttgttagggaactataaacaggccgtaatttactagtactatgttttgttcattcgtattgagaactggtccatccaagtttatttgtagttgaagattgcaaggttggcacaaaaaaaggtccaaaaccatgggcatgttggcggtttacaaaacgggagcggaatcgtatgctcaaattttattcttcttcacagctataggccctggatggaaacgctcaatgcctctcaatacaataatcccaacaaattattatgcacatatgcttcggtcaacttcagttgaaaagcccctacgtacattcctagtttcctacttttcttcatattaaaataaacaaaaacataatatttgatagaacagatttatagtattaagatatattatatattatttataatattaagagtaatagatttgtttattttagaacagatcgagagtacgctactgcaaaccaactgtgcttgtgaacttctttgatcggtggcgtagcagaccaacagcgaccgacgagctgggccgcgcgagacaaagccctaccactaggcccaagggatggcgaccttcatggttttgggcccgcgcagcccatcaaatcatcagagtctatccgggccatttcgcaacccgtggctgtgtctgaattcttcttagatgaaagattcaatcaacaggacgacgaacagcacactttatgtaacagtagaagcaacccagggaatacgcaatgcttttctttttacatggcatagatcgatgaagttccaaaccattcacttaatccgattaattacgcgcattctaatcgcttgcatctaatatagtgattaaagcagtttgggacgtctaggactcgttctaacaagcagaaaaaaaaaaaactcaaaaattagggaaggacctaatatcaaataattagaaggggttaggttttgaacccaggtcgtctagcccaccatcttgtggagctagccgaaagacccctgagtatttctcgttctaacaagcacctcacctctacttgtctctaacaagcagaggtgaggtgcaattaaacaagggttgaataagctaatcccgggcaaataccaccgaattaagtttgtgcaagtggacagaattcaagttctggactcattcagtccttcttcattgaatattcttgtggattctcgcgaacttttacttgcaaagtccgacaatattcagaagccaaggtatgcagtgtacagttcagtcttgcaacacttataaataggagtagcttctctcattcaccaaatgcaccaagcttgacatcccctgattcctgaagaagttaactggaggttacaatagcattctatttttactctgctggttcctttttgctatttagctgtgtatatttctttcatcttcgcgtaattttgtaggagattttcaattggttcctttgtttacaggagcatttcatttggagcattagagcttgtgcagctcggatattcctggagcaagaatggggaagtccaagcgtaacaacgtcaagaagagcatctggcagctcctctgcggctgctcatcacctcagacgagcgattaactgagactgcaacacacgatattaaggagaataaagttgctcatgctgatggacgttgggctcaggggttgatgtgattacaaggtgtcggaaagttattgattgtttcattaaattgtctgtagatttattcgtgttgaatttagttccgttgtagtaaaggaaattcaagtctcttgtaaccagattctgaaataaaaccgtttcaccttgtatcatggctatggcctaaaatatttctggtttcctccaaactgggtaatacggggaaactattttaaactctcgaggggatgtctccttgttgtttgtatgttactcaaatggttatgaaaaaatttgagaaaatatattaatatgtgatatatcacttcacaaacatacaaagtcaaatttaacttctacatatcgtaacgaaaaaataaatttgactatgaatatactttaattatctgtagtttgtttttttacaacttataaaagttgatttaacttgcatgtttgtggagtaatatatcacatgttaatacatcttctcaaaaaaatttcataaccatttgagtgacatgtaaacaacgatgggtcattcactcgagagttcaaaatccactctccgacgatatattactgtattgcttaaattggtactaattggtaggtagactggtaaggcatgatttttttcccttaatataggtagaagttttatagatttttcacaagaataagataatttctcaaacaaaacaagaaatgagaggacaatatgaatgtggaacttcggtcaggctgtgctcatcgaaaatcggttcctccctacatatggcattagctggttgaaggcattgtctagaattcgaagaatttggtctctagtatgaaaacctatgatttgggttttgttgatcggatcatggcaatgacaatgcaatttttattttggaggtgttgtttttaaggttttctaagtgatgcgtgtatagagtataaagcttgtggttgtagctcactatggcatgatatttgttatcatgtcgttcttctttctaaaaaataattataggttgtggacaacctactatgctggtgccaagagtgatcttagattaattgtatcactttattataattgtttacatccatcaagaaagtttcctttatcttaaaaaaataaaacctctaaatttacttccaaggacacctaaatagtactcacttttggtggaaaaaatatcgtttcaacatcgatatagtcttcaattgaagcttttttttcataaaagataactaaatatccaacaaatcaaaatatatgatttttcatacatgcaattcatatgttaaaaatattgtgacttaaaatatgttcaaacaatgtgtttttgtcctaagaggggttagttttcaagcgggggctgctatataacggaatctcgttttcgaacgggatgataccggttaggtatcaggtcttgatacataacctgtatcatgcgtttctatcacatacgtatcaggtgatacttgagaagtatcagatgatatctatcatgtatcatgcgattcttatcacatagagggtgatacttacgaggtatcatgtcctaatacctaaccggtatcaggtgatacctaccaggtatcatgcgattctaccacgtatcagatgatacttgtgaggtatcagatcctgatacctaaccggtatcaggtgatacctatcaggtatcatgcgattctaccacgtatcagatgatacttgcgaggtatcagatggtacctatcaggtatcaggtgatacttatcaggtatcatgtgattctaccacgtatcaggtgatatttgtgaggtatcagatgatacctatcagatatcatgcgattcttaccacgtagaatgtgatacttgcgaggtatcagacgatacctaccagatatcccaccgtccatgtcccacgctagagctcgttgctggcagccacatcctccaccgtccacgccatgtcagagcttgtcgccggcggccgcgtcctccgtcatccacgccccatgccggagctcgtcgtcgacgaccgcatcctccaccgtctacgccacgttggagctcatcaccggcaaccgcttccttcgtcatccacgtcccacgatggagctcgtcgccgacagccgtgtccttcgtcatccatgtcccacgccggagctcgtcgtagacggccgcatcctgcactgtccacgccacgtcggagctcatcaccggcggacgcttccttcgtcatccacgtcccacgatggagctcgtcgctgacgaccgcgtccttcatcatccatgtcccacgtcggagctcgtcgtagacggccgcatcctccaccgtccacgccgcgtcggagcttgtcgccgacggccacgtccttccccacctcgacgagctagccaagtacgtgctcgttgtgctctgcgccgacggcggtggtgagggcaacaccttcgcactctacttcctcatctgttgccgcgtccgtgttgtcctcctcctcccctgcgccggtgccgacgccgccggcgaggagctcacgatcacggggcagtgcgtcgacagtgcgggtgtgggcgccgctgcctatgtcagccatgcgcgcgcgctggagcggcaccgtgtcctgcagaggttgctgctgctgttcaggacgtgcatggtcaggtatcgctactatttgaataagcaaggggataaaaggatcccgtccggacggaattccggtgcgtagcattcccgttttcaagcacccctttctgagttccgacccatactctgtttactctttttcttccatggtactactgcatcgctactactccacatatcacgattgtacgcttgcacatcgcacgcccgacgttcgaaacgcaagttaacatgcgtgaacttctgaagcatcttattgttttaatcatttgcagtaagcatctgattgctttaatcatctgcagtaatttttaagagtaaatcatttgccatatttagcagcagcaattattgaaccgttccaagctaaccaaggtaaacggtcgtccatgcttcagtcaagggatcgagcttggctgatttggccttcttttttaaggtcgcatttgggcttttttgagaccgaagaaatccaggtttacgcgtaccctttttgcactaccatgttgctgcatacatgccgaccggtgaacgcatcaaacctgctgacaggtcagtttcaggtcaggtcatacacccacactcgatggattgggaacatctgctgacgtgcagtcccaactataactgcacgttagagattgcacgcaatccagtcatccaatttttccgttgaaggtccagattaaatgctacagtagtcttgctacagccctaacggtgtcctgttgaaatttgggcatttgaatttacatcctacagccctaacaactgtttaagttgtagtcacgcaggaaccaaatcgaccatcgatgtatcgtatcaaagacaatttgtaaggccctgtttaggtttcaactttttattctttagactttcaatttttctgtcacatcgaacttttctacacaaacaaactttcaacttttccgttaaatcgttctaatttttttaaacttctaattttagtgtggaactgaacacagccttaagtcaattttactcgtcaagcacaatatacacataaaacgagctactagctactacatgaagcttgaaatataagcaaccttttgttctttaaaaactagtactacttgactagaaaattatagtatatttcagtgaacactccatgtcaagtgcaaactagttaagcgggagttcaaagtgtaggagtacgtgttaactgtaaccaatgacctggtccaggcggcaccttttgcggattccgtatgtacttttcctgcttcgtgcggaccaagcttccttcgtcgtgttactcgagggtgaacgtacaggactcgttattcgctgaattttcatgtggttttttctcatgttgttttcctagtaacgcttgataactacggtgtgtttgctctctggcacggaaaacagaacggtccattagggcacccacaatggttatctataagctatctacaagatatccatgtcagcatattttcctacttggaagatattaaatgaagagagagagagcaaagctatctactagcttagagatagtctatagagaaaaacgaggcaatgcatgagagagctatagatacctatgtagacatactattgaggtggtttactattaatctagtctattgctgagatgtacatgttttatagagagcaccctactttaccattgcgggtgctcttagtacgtgattaattaagtatttgctatttttttaaaaaaatagattagtttaatttttttaagcaacttccgtataaaaactttttttaaaaaacataccgtttaacagtttgaaaaacgtgcgatggaaaacgagggagatgagctgggaaaaaggggtatccgaacacacctactagtgcaaacttacaatttactgtagtagaagttctcatatcaactggtcaccctcagctagcatgagatcgagaagagtcgttcaaaagtgaactgtacatgattcagtcaaacaatccgagtaaagcttgctagtgctgttcacaattactcatgcagaaaccaagtcatagtttcacggggttgtcacggtgtcacaccgtattcgaccacttgttgcttgttgcgtactagcatacataccatgggatgcaacaaattaaggtactatgtgtgcagctaatataacaatattcaaagtgctcacactgatagacactctcaaggattaacttgacgtcttgaccttgatcaattcatcataagtacgttacgagtcgttcgccggtacggttcttggggaacaaggcaatattctacacggtgaaaagtacggaacacaggctaagctaggagaattaaacgtaccattttcacagaacattctaagaaaacagagttaattatacaaaatgaaaccaagttgttgcacaaagtgaaaaatccaagcccaacttcaactgtcacttgctagctaggccgacctgttctacattgtcatcactgaagttctccatggttcttcatgtacttttcctagtatgtgctcggtaagcttccctgatcgtcttacccgcagcactataaaaggacgaaatgggtggcttgttggaggcaccaaacattcagagacatcgagctctctttgatctctcgctgagctaagctagcatttgttcatctgaagtgttattccagttaagttcaggttcagtagcagcagagggcgagctcttttcagagtaatcgaggatgcctgaccacaacggggtgaagaagagcatactgagcgtactgtgcggctgcttttctccaccaaagacgaaaggttgagatgagatcatggcttcatgtacatcgatctgtagtgttattcatcttgttcagatctagaattgttctgtgtacatgagaggtaataagaggccggtgtagtggccgtgcgtcccagtccatcaggtagttttccattgatttgatttgtactcttgtaggttatagttgtttacgccgattgtattgttccatacgtatgtgtggttgtgtgttttgtatgagtcttgagtgataaagaattaccagcttgtttctgaacgttttcactatactcgcaactcgctccactgtcccctgaatatgtctgtatactattactatgaccgagtcaatgcttataggtggttatagggaaaatatagtataaaccatatatacgatggaaatctaaaaattattgttagatgtaaaaatggatgcatgagatttatccacgtcaccaagagtccgagtaaaatttttactcatgatttcatgattgaaactgagagtagaatttttacaattggtgacatggacaaatttcaagcatgcagttttacatccaagaacagttttttactacatattttccttggttagggtctgcctacccgagcttgggctccagccaattccaaacaatcaaagtttcaaacaagctgaaacaaaagaaaagaaaaagaagaatccatggatgtgttccttctaaaccatccatgttaccaagatgactcctgcactaaaagtttccctattattcttggcgatcatcttgtgacctccaccataatcaccaattaaaaagaaattatctaagatctctccctttaccatcatacctctaattagtcggagatgtaataatgtaaatggtagaagagcgtgtgtaattaatactccctccgtttcagattacaagatgttttgactttggtcaaagtcaaattatttcaagtttaactaagttataaatatagtaatatttaaatactaaattagtttcatcaaatcaataattgaatatattttcataataaatttgtcttgggttgaaaatgttactatattttttctataaactttgtcaaacttaaaacagtttgactttaaccaaagttaaaacatcttataacctaaaacggagggagtagcttttagttgtgtagcgcccgttccgtcgtggcgcctagcgggaaaattatctcttaaaaaccctatttgcgaaatttgtttccttgcttgttgtctagtgtccgtgccatctcaagatctcaatccccgatctatcgtcgagttcaaattccgaatccaaatccttccaaaatcatttcctccgcaaaagtctattttgcctcccccgaggtcgatgggccgaatctcgctcggcccatctccccctctcccccggccctctcctctctctcccgggcgctctctctctctctctctctctctcgctttccccggcgcgttccccccccccgactcgctactcgcgcgtgcgagagccgcgccgagcgccccctcctctcgcgcgagctccccgctcgcaaagccggccccgtgcgccgtcgctcgcgcgcgcgcccgcgtggtttcccgcccgagccgcgtcgtctgcgccgtccgcgtcgcccggtcccgctgcccagccgcgccgcccgttgtttcccacgcgcgcgtgccgagtggccgaccgcccggtcgccgccgccgtcaccctctgccgcgccagcccgcgcctgtcgcccgtgtcgtcgcgccgctccaaaccgccccgccatcatcgccgtcgtcatcgcccggcccccgccactccgcgcgctagcctccaaggggcggaggcagagagcccctctccctctgccgagtcgccccgctccctcctccttttcccgaatcggcaaaggggcgagccccctttctctccctccttttcctctttttctcccctttttcccctctcgccggcgtcacctcctgtcgccgctttggacgctagccggagcgccagctcgccggcttgaccgcccatgtcggttcccctctctcaaaccgacattgccgcccttttaaacccgtcttccccctcccttcctttcctctcccattcgtctcctcaccgttgtcgccgctcccgtgctctgcctcgcctccgccgtccatcgccaagcgccgggagagccggtgcgttcgtggacgcggaaggggactccgggcgcgccctcttcttcctcttccccggcccgaggccggagagatcactcccgcgccgtcggcctctcgtcactgcgccccgtcccgcacggtagtgtctctctccgttcttcctcctcgctccatctcctccccctagctttcggtagtagcttgagtagactccccgtagttagccggcgccgccccgaccgttgccgtcgctcgccgtgtgctcgccgccgtcgccgcccgagctccgtaacacccgctcgtcgccggcctcgctcggcgtagttccgcccaatccgacgctagcatcggattcccgtagccgcgtggatgctctcgccgccgggaattggcccctcgtgacctcgtcgccgttttccccttttcccgccgccggttgccgccgccgcgattcgccgccgtcaagctccctccggcgaatccgagccgttggctcgtctcccctcatcacgtgcaaccacccggtgtgctcgctttcgccgatatcgccgtggttcgctccgccgctcgccgctgttgtccgccgtccgttccggccggcgtcgtcgtctacctcccgccggcccgcgtggcagccacgtaggcgccacgtcggcgccagctcagccgaggtcgggacgggccgaccccggtcagcccctcccgtgcgcgcgttccaccgcgagccgtgaggctgcgcatgggcccgccgcatccgttcctccgcgaaccgcgcgcgtgcaccgcgtcccagccccgcccgcgcgcgtacgccgcaaactccctccgcacggtgagccgagccgctaacaagcgggtcccacccgggaccgcgcgcggtgagcccggtccaccggctctctctcccctcccctcccgcgcgcgcgcttgggccgtcttgggccggccggcccgttaagctcggccgagccgctccatttaccttgggcagcgccctagccgcccgaggaaaagtctgatttccatccctcttttcttttcttttcttttcttttcttttccaaaaaggatttaattaaatccttttcctttagaccaaaaatccaataatcttagaaattcaatatcttcccaaccgtaaatctgtttgactccgttcaacttccaaaattcctcaaatctcgagatctatctaatggcacgcttagaggtcattaatagggctttattttcgccgtttgttgagttgttccgtttcgcgtgtagttccggagcccgaagacccgcagtgcgaggatttcgaggatcaagctccagatctctagcaaggcaagccacctttgaacatcttgagcctatatttgaaatttaattatgttgcttgaaaaatattatgcattgataggatcgcacttaatcttttgtcccgtctgcaagacagattggcggacttacctaaattgttgcatttgatcctttccttgttaattgttacagcatgtccccttgtaaccacctagttgcgtcttgatattcgtgcatcctgtgcgagtatcgacggacgccttcaaacttataatctgaataacaacttgggtaaaacttgggttttacgaaagatttggaaaacccgacacctgggtcggtgcttgcgaactaaatgaatttccaaaaccgcggaccggggaacgtaccgggtgtacggtttcccgctctcgcacttaaggaccgttttccttggaatttcatccaaacataagacaagtacgaccacatgggtggaatgggacacccctggctgagtaactagcttatcaggggagccttgatgccgagagacatgtggattcgccggggtggtgtcggggaggacccctgggcttcctggcacagtatggtctgggacctaacctgttgttggtctgggacccctctcgtcggcatatggcaaacctgtgtcggctttcgaaatgccttgtcatgaaagcttggaggtctcccgacgtggctgatccccacgggctgggtgacccgggttagtaatgtcgtgtgggtaaagtgtaccccctctgcagaggttaacaaactgttcgaacagccgtgcccacggtcatgggcggatgtgaggtgattcctagcgtagttttgtttgactactgcttgtgaaattgctgttgtgaaaaggggttcgatgtttgaaaaatctgcagctgatgggatcagctaggcccgggtggctgtttgaaaagttgtaggcccgggtggccgtttgaaaagttgttggcccgggtggccgtttgaaaagctgttggccgggtgccaaccttgttttaattctaaagactgatacattgcacatacttcgaccggacgagacgcactgtctcatccgtgtcgtttgagaagcactcgcttagttgtttttagaaaagagttcaaataaaatcaattgcaaaaacaacagccttcccttgaagcctgcattaaacacttaattcccatggcttgctgagtactcccgtactcacccttgctctatataaatatcccccccagttgctgaagaagatgaagcagatcctgctgatgaggagttcttccaggagcaagccggctacgatgagttttagggtttcggcctagttcccaagtcacgcctgtgtgtttggtccaagtcctggcttccgtttcccttttgtaatgcagttgtgagctcgggatctgtccgcagcccaacatgactgtacttctactctataataaagagacctctgttgctgtgatattctgtctccctgtgataccagcactgtttcctgggactggtatcgattaacaggctaaattggagcgtcacgggctagttccggtcgggactagttcggggcgtgacaagttgcaagcaaatttactggcatgtaagagagaaagaggagaggagagagaaacgctgatgttaaattttacatcaacccttagcttgtacggaatacatgataaaaagtaatttttgctgcataagggtgaggaaaggaaggaatgataattaaaaaaaacttttatagattaatgattagagcatatatttgtcttaactattgtaatagggatagtttttaaataacttgtattgcttaggaaacatactatgttctatctttcggggtggggttaggggtgggtgggtggaggcggaaattattgctctatttttttgcaaggttggaaacttgttaacgcgaaacaacgtgataaactaaacaggacaataaacatcacacgaaatacaaaaatattccattgcatgcaagatgaccgtggtagagtctgttcttaaactttcagcagagctgttaatttcagggtgtacatgcagtatgattcagtttcagtcaatcaagaaaaacacttgcaagctactgtactttcggcgtcatggccggccggctttgcatccaagaagaaacatttccatacacgtacctggtgatctggtcgtgatcgagctgatgagaaatgatgaggtgacgctgaacctgaagccttggacgacgtacgcagtacgcttacctgaagagacaaaaacaaccgcccaagctaagatttggtgggggcaaaccctgtcggccgcaaaggcacatacatatatattccatgtaaattacgtcgaaggctcgtagatgcgttggattttcgaagattccaacatgagacgtgaaactctgctaaggtctggtttagttctcaacttttgcttcaacttttaactttttcatcacatcgaaacttttctacacatacaaacttttaacttttacataacatcgttttaattttaaccaaacttttaattttagcgttaactaaacccaccctaaacatacacgcgcttcctgggacgacgaaattagacgcatcctacatgcagaacgtcgtacaatctcgtcaatgtcgctagcgaatcgtggccctatttttctccgcgcgacaatcagccaacacacgcaagatcgatagtgcgccgccttgcgtggatttagccgttgtgattgtggtgaaaaaacaaaagttcattgagagatgaaaatggaagtgcatttccttcccaaaaaaagaaccgtccgtccgttcgatacggctgcatccgagtcacactttacactagtgcgcatttccctggtttttacccccgaaataggcctgaaatgtccctccattttggagtataagctctcaggggtacggacagaaagcgaccgtgctatctatttatactccacgcattcagggctctgcttattggcagcggttgttgcttgcagagttacagttccaatactcctcttgacagagagcacccgtgttagttcgtagaagttgttccttgttagctgctgatggagaacggacgcggcggcggcggcgacgacacgacgaatcggcgaagcaagccggcgccaaagcgcggcggagccctgaagagcatcctcagattactctgcttctgcggtgctcccgcggaagcatagttatgaattatgatgatccatacacgggcgtaaagcacgtagctgaatctgggccgctcaacacgataaggagtacgtttggtatatgtcactggttccctaattaagtatgggtttgttctttccgtgcttgtgaaactaatgttagtgttgtaaattaggtacgctggtgttggtcggtgtggatgagtcatgtctgtctatgtataattatggtcttagttacattcatttgaacgcatgtaatccaaatactcatatatatatatattctcctcatttaagttgttatatacctacacggcttggagacgaaagcacaaacagcgagggtggcggtatcgctaagacgagcccgcgtgagaaagaaaaacggcccgctcggcacagcccaaccatggatcctcgcgggtgggctgagacggcgagacttggtcactagcacggatgcacgcgcgccattgttccgcgcccgcgaatccgcgacgcggttggcgtcttggttgcgaaccagccgcgcgctgcgcgcaccgcggcaaccgtgccgatttgcgttgcgttgcgcggcggggcggggcggccgaatcttgcggacttgcacagttgcaccgaccgagagcgattgtgccttacggttacgggggaatagaaatcgtcgcgcagcaagcacgcacgaaataggggatgatgctacttgcttaattttactttagattaagtttaaactgatgcgggtggtgtctaagtttgtattaaggggatgcatatatggtgaaaatagattaattatagtttaaaaaattttcttaaccgggttcctgggcactcccctaatgtactctagctccgcccctgtgtgcagccccggcgagcatatgatcatttggacgcccctcggctcgctccgctcaatgtggtgaactaaacattagttaaagattatacttgaaatatatatagttctacttaccaatcaaagttcagtaggctcgaactaagactgtctgttaactaagacttacaaatcaaatatatatatagctcgaactaagactgtctgttagcttaaagatttcgtaggctcggcttgagctttaattgagcttgagtctaggcagatgaacttgcttgaactccgccctactctaggctgatgaagcgaaggctatagtatgagcaaatcatcgttgttcgaacaaacttcggtagctctggttatatactgtagtaaaaatgttacagtataatagtcctcgcaatatatttttcttgtttttaatatttagtttgtcctgaaataaattaaactctcgtagcctaaggtaattttagtggtgctttaatatgcagttcctccatcctaaaataaattaaactcttgcatcccaagataattttagtggtgaggaaagtagtatttgtgggtgggtatgttaagggaattgaaactataaaactttttgattcatttgtaagtctaatccctccgttacattaaaaatcaatctagtactatgaatttagacatacatctgtccagagtcatactaaaatatgccacgtccagtcctaggttcgtttttcgtgggatagaaggagtaggtaagaagatagtattaattgatttatttcatgactttgaactctactagtatatggccatgtttagttcacaaaacaaaaacttttcacccatcacattaaatgtgtggacacatgtgtggagtattaactgtgtttagttccacgccaaaattagaagtttgaagaaaaaagttagaaatttatgtgtgtaggaaagttttgatgtgatgaaaaagttggaagtttgaagaaaaaattggtaactaaacaaggcctaaatgtaaataaaaataaaaactaattatacagtttgcgttaaattgtaatacgaatcttttaagcctaattgtgtcatgatttaacaatgtggtgctacagtaaatatttgctaatgacgaattaactaggcttaataaattcgtcccgcagttttctggcggaatctataatttgttttattattagacaacgtttaatacttcaaatatgtgtccgtatatccaatgtaacacctcgaaataaatttgtttccaactaaaccgggcctaatacggagcatctgcgcctgtgcgttctgaagcatcttattaccttaatcattgccatctatcattgcagtactagtttgcagcaaaaatagttgaaccgttccaagcgagttgctacctttaaccgtcccaagctaggtgcgcttgtgaagggaacgaacttggcttgccttcctttgttttatttttcttctaaattaagactgcccatactccatagctagtcagaatcccagtttacgcgtattatttgcagcgtcgtgttttgttgcatgcatgccgaccatactagaaactgattaaggacttgtttagtttcaaactttttctttaaatttttaactttttcatcacatcaaaatttttctacacacataaacttttaacttttccgtcacatcgttccaattttaaccaaacttctaattctggcgtgaactaaacacaccctatgccaagttcaagtgcatttaactgaaacaatgacctggtccaggttgcgccttttggcgattgcgcatgtactagctacttgcaaaccaagtttcctcaatttcgtcgcgtgaatcgagggtacatgactcgttaattattcgctgaaattttcttatgttttttcacgttcttttcgtagtaaagcttatattgatatggacaattatatcaagatgatacggttaagtaaatgactatacagttgagtaaaaaggaatatgatattttaaaggtaaaattggttctatggcatcgaaagttctcgattttgattctatagcattaaaagtttatggttcactttaatagcactgaaaactacatccgttactatttttagcattctgtcagcagttccgtcggctcaccccatcctacctctatcttcttcctcctgcgctctccctcctatggttgaccactcttcaaggcatcaggcgagctcgaccatgacagtatagcgctgagcgagttggagccttggatggtggcagctggttctggcatgctagaggcggcggctcttgggtcggtagacaacggatccagggcaaggaggagcgggtcggcactcaggcgagcccgcaacgagcgcgagggtggtgcttcggggcgaatttgagggccgatggatgagctcgatcgagggcagcatgtcggagagagctcaagggcgccgacaataatttggagggctttgcttccgtgcggacccgacaatgccggcgacgagctggacaatgacacttcgggcgttcatggattggatgagcttgaggatgacgcatctaggggagaccgagggcagtgcacgcggacgaactcggaagcggcacggccgcggaggaaatggacctggttgagcacgcaagatttgaacaagctctagcatggccatggcggcgcggcagacgagatcgatcgacgattgcgctgtacgggcaaagctagaacgtggatagatcacacctagcaagcgcggatgaacacagcggcttgcggatgagctcgtgagggctcacgtattacatgacgagctcgtggagccagcatactgtgttcgcaccatggctgaccggcctgagctcctgtatgactgctgtttcgagatgagaaggaagtggaagagggccaccattggtgtttgatctaattttttgttgaaaaataataataagaaaagaaaactaactggagtttggatggaatgctaaacagaagtaacggaggtaactttaggtgctatcaaaatgagccgtaaacttttgatgctataaaaccaaaatcgacaactttcgatgctctagaactaattttgtctattttaaactagccaccttacagtgttcaaaagtaaacggtgcttaagtcaaccaatccgagtacgtaggagcaggagtatatattcaccgtccaggtcctagtttatgcgtatttatatcacagtgttcttttgcgaaatactcctaaagtgtactcacacaacatattcgaccacgtgttacataccataccatggaagacaataaattaaggaatataatgcagctagccggaccccggcattcctccaaattaattaagataagtaattagagtactattaattattgaagtgctcatcacactaacatgctcctccattcgcttccctcgcttcaagctcttagtcccggtcacaagtatagggcttgtttggattgaagccaattatcccctaccatatatagaatttcattcctatgatcaatttcataagaaaataactaaaagacatggtcaattccatagaaaaataagtaaaaagataatatttcttagaaaacttttatttggatcaatctttcttgtggtgcattttcttataggattgaattgaaaaacatgaaatttcgattcttgcgtttttcggtcatacgtttcaaacgagagccttaacgttaagacaagattatgtcaaatttctaaattttcgatcatcaacaaaattttcaaatatttagtttaaaaataagagaaataatatatgtaaatttgtctcagaaaatattatcatattatcctaatattataaaactattagactttgtaaagttattttaatatataaaatcgatatttggaattttaaaatattaatccaattttatcctttccaccaccggggagtgatggttggtgcgacctattctacatatattattgtcactgaagttaattttctatgcatggttcttcatgtacttttcctagtttatatacatcgtgtttggaaagcttctggtcgtgttacaatagcgaggcctataaagaggacgacattggagatgctgcctggaggcatcaatcatccaactcttgttctctcgcttagtttctttggccatctgaagcattaattaatttccagtttagttttgggttcatcatattcagtaatcggtatcagagctcttctaacagtagccgacgatgcagcgtcatcccaacagagtgaagaagagcatgctcagagcaatctgcagctgtttttcaccacccaagacaaaagattgagatcggcgcagggtgccgcggcgcgacatagctttctgcagtctgcacgggttagtacacgatcgggattgacggggattatctacaatagtgctcatgcagtggtagctatagtcacgagcatgtggacctaggtcctaacgtttagtgactactactacatgtacatgtacagtagagaatccatatacacattatgttgggtcgaaatgatgatgcttatgtctgatagtatatataaattatgttgggtagaaatgtcgatgtttttgttcttgttttatgtcatatcgatatgtagtgccgcaacaaggccggcgtggtggcagtccagatagtccatcaggtcgtggtcctttatttgatctgtaatgttgtggagtagtatgatattgtgtgctagttctttcatacatgtaacgtgccatgtagggttgtccatcgatcatcttttattcttttgtaaagaatggctatgtgtttgcaaggaatgtgagtgatagaagaattactaatgtattacttcctctgttctaaaatatatatatttctattatttaaattttataccacaatatgaggatttctacattgattcccacgattcacatcacttccataaatccagagccaatgacttcaaagagaatctaatccattcaaaattttaaaatagaaaactgaagtaacttaagagaaatcttttcaactaattaaccttagtacttgctaaacaacctaaaaatattatatgttgaaatgtagtgagtatttacctccactctcttaaaaagaacatatacatatatgttctatttgaaaaaaaaagtcgtaaaataacctcaaccatttcctttaccatttttataacaaaataaaaaatggtaaaacagaaacagaaactaagccggagccgaaccgcaagctataattaaggctttattagtaacgtcctactacatacatgcgcgtgtaatccaaatagcattttcattttttcttaaaaaaaaagtacgaattacccccccggccgcgaactatcacagtcgatcgaattaccccctgaacaacaaaaccagacatcctccacccccaactatgcaaacccgacaaataacccccatgagcactgttctgagcggtttttgacttgagtttgtacacgtggcgccaacatggcaatccagtcagcaaagaaaatttaaaaaactccctggacccacttgtcatctccctccctcgaccaaatctctcccaagtcccaatccccctacactctctctctctctctctctctcgctcgcttgagagctcggggcggccggctagcggcggcatcatggggagagcgcgctacggttagcggaagggtgcgccgaggagggcgctggaggcctggagcctagaggcagcggcgttgctgaacgttgcttttagcaccctgcggcggcggtgcggaggcgagtggagcacgcctgcatggctagtggtggatgtcctctctctcctctactcgcgccgagcaacgctcggcgtgacaagacggggtcggtagtggcagcggtgctcaggttgtggagttcactgttgacctcgccgcctccacagcaaactcgaagccacccgtcgcacagcttccccccaccccctcccccacatcgtagcaccctgagtagaaaaggcgggtggtagtggcagcggcaggagaggcgggcaaaagagacggcggcgacaggatctaccacctctcctccctcacctccgccactggtcgccgcccccattcctagcctcgacccagccgccgctctcatcctgaacaccgcctccgccaccagccatcgccgccattccaaacgctgaagagagggggtcgaaccgagcctccaaacgtctccatcaccagccgacgagcccccttcccgagtcccgcctctagttgcatgcctctgccaccagccgttgtccctatcccggaccccgcctcgagccgcctccgccacctctatcctgagcgacgcctctcctgcctccgccaccggccaccaccccatcccgggccctgcctccagccgcctctgccacccctatcccgagcaacgcctctcccgcctatgccagtctgccacccccatctcgagccccacctctcccgcttcctccgtccagccgacgcctaccccgagctgaagagaatgggaaagagacgggggagaggaaagattaagagagagaagaaatagatgataggtggaccccacaaatttattattattattgctgactggattgatacgttgatgccacgtgtgcaaactcccagtcaaaacagctcaaaacagtgttagggggtaattcgtccggtatgaataatcgagggtgtaaaatatcttgtatttgagtttaagaggataattcggtcggccttaatagttccagggataattcgtactatttctttttttttttttggcaatacatatagcacgtttaccctgcaactgcaattcacacacgttttacctggcacaccctgttctttaacgtttgcgttatttgttgatggtaaactgcgacgcgagccaccccttcctccgttcctcgtctcggaggcggaagctctgcatgcatcgcggctaagcgagacggcccggccaaaccgcgcgcgaaacgcagcgtaaagcccaaccgcgcgtgttgatatctatggcacgagcccacgtgaaaataccgtccctctcgtctcggcacagcaccacggaataacggatcgcatcgcggccgcgtttcgatcgggcggactgcacgagcccccgcagttcggctgttcggcgccaccgagccgaggtggttgcctggttggtgcgttggcacagcccgcgcgcacgcgcacacgcacacgcggctgaatctttcctccgcgcgcggggcgtgcgcgtacaacggcacaagcccaaaccatgccggggtgactgccgccgtgcgttgcacggcgagatgtgtggcgcgagcgacccgatcgtgcacgcggattcgcggcgcggcaagcggagcacacaacgtctccggagtccggatccaaaagaggctttcggggcccatcgcagcgggccgggggagtgtggtggtgacttcctcatgaagccagccgcttttcccaactttagtcttcgccaagaatttctagggatcatacactcgtcatttccatcccccaactctttaccaaaagaagttggcacgccgtgtctcatgtctgtgggggagtaaaagaccgacgattgatttgaatggaagcatgtagcagagaggagatctcgggtccagtccaatacttcggctccgttcttttcagctcagggactaaattttttttaagtctctatcacatgagatgtttgaacactaatttagagtattaaacatagattaattataaaacatattctataaaccttggactaattcgcaagacgaatctattgagcctaattaatacatgattagtccatgtgatgctacagtaaacatttgctaattatggattaactagacttaaaaaattcatctcgtaaattagctctcatttatgcaattatttttattattagtctatgtttaatactctaaattagtgtcaaacaccctatgtgacaaagactaaagtttagtccctacatccaaacaccaccacttggggaaaaattttgggtttggttatcacatcggatatacggacacacatttgaagtattaaacgtagtctaataacaaaacaaaccacagattccgctaggaaacagtgagatgaatttattaagcctaattaatccgtcattggcaaatattcactgtagcaccacattaccaaatcatggcgcaattatacttaaaatattcgtctcgcaatttacacgcaaactgtgtaattgattttttccacatttaatactccatgcatgtgtccaaatatcttcgatgtgatgggtgaaaagtttttgttttgggaactaaacaaggcctcattcataaaattattaaaactgattacttgcttcacgatttgaaaaaaaaatgttttctcaaaaaaaaatcttctactgtagtattatttagaccacttattttaagttattttaagttctttggtaagttacttttcataatatttaatttaccatgcaataaatagataattcacgataaccatcagctcaacaatataattaaagggatatctattgatcttttaatggatttataactttaaatcttgcagaattttttcaagggactatcttgcaaaaattttaaccaatgatatatcccattttaaatgaaataacaaaaataaataatcataaatctagaaaaaatagtgtaaaatctaattttggtgcactgtaactgagtataaatatatgctaactggatataaatgctatctaacaaagtatatatgtaagcttgatatacatgaacatgaattttgatacaaaatcctacgaacgaaagttgaaagacagaaacctaaaaatccattgtaagtaaaatagcaaaaatgtaattcaaagcctttgtgtaatcattaactcggcttctgatcttgtctcggccccatgtccacacttctaagttcgaattaatcgctacaacaaacaacggtcgggccttcacgtagcatccctggccctcgatgttttcttatcgatcgatcctttattggcttccatcaatgcatgcatgttaatacagatttgctacgtacgtagtacgtacgtacatgcaagccatgcatgcatgattaaattcatttttcatcgtcgtgtcagccactcaggcagggccgtcataaacgttaaattgcaggttcagacgtttgcagtaggttgtcaccaccaccagctccagtgaacaaatctgacgcgagatttcagattttcaccgctttcacctcaccaagagatcgaccggccgctcgtgaaatttcgcgcatttcacctcaccaattcaccaatggcttcaataatgtggcgccgcagattgaagcagtttacccatgtgcagctggaaacagatcctgagacgtaaccaaaacgggcgccgattgttgagcaaaattcagtaatgaaaaggatggtactggtacgtacgcgagtcgttgtaaagaatcaagtgcatgcatatatatgctcgatcgccagccggtgtcctcgctcggatgtgtgcaactgtggaatgtggaggctgcatatatagctgagctgctgggccagttgtgtttgtaaaggatatcaatggtgaagaacagcaacaaatcatcacgagctgctttggttatgggtaggtggccgttttaaatccttgcagatggttcaagattcgcaacagttgacttggggttgccatgcaataactgactagctgacagtcttagtacatgtgtttgcccaccattcaattttgccactgcacatgctcggctctaatactccatagctagcgattttcatataaataagttagggtcatgttagatttagaggattatctatttagacagtgtttagttcctttaaactttcaatttttccgtcccattaaatatttagacacatacatgaagcattaaatatggatgaaaaaaccaattacacagtttgcaggtaaattgcgagacgaatcttttgagcctaattacgtcatgatttgacaatgtgatgctgcagtaaatatttactaatgatggattaattaggcttaataaattcgtctcgcagtttacaggtggaatctgtaatttgttttgttattagtctatagttaatactttaaatgtgtatccgtgtacttcaaaaaaattttggcacacgaactaaacatggccttcattataaaaataattaatatataaaaataaacttaacagataatttaaaacaaaatggtctaaacaatatagtaggaaaaagtgttttttaagaaaaaaatatcttttaaagtatggggcagataattcattttcaataatctgaaaaataaaagaacaaaggcctagggccatttgaaacaaagtatttaccggattatggcattttaaattgtgttttaagtagttttatagctaatttgttaaaggtgtggcaaattatataaactgggaccaataaatcgttgatcacaggtgaagtttagctcaaataattaagtgatttgccacaactgtatcaatctaaatgcttgcctaacaaacattgacatgtcgacattcgacgtgataaactatggctgtggacagaacaatgtccttaccgattacattgttttatatcagcggggaatgtgaaacatgccaatgaggttcaaaccttcaattcgttccatctcttcgaatcaaggcagtatataactactactcgaagggatgtaaattttagtggaggatcggattagccgcagctctgaacaacatgcatatactcctagatcgaagaggagagaggaattgaaatagctgtcacaagacaccaagcaagttcatcattgtaccacagtggacaagactagtgatcagtagctagtaggataatccatgtgtctaaattacctagtactgtacctgatagcactggtcagtggagatggtgaaaactagaggcagaggctccgcttaggtcgttaggcgcactgtttctttcggctgatttggtgtgggtgtctcgcacatgcttcgccagttttgccactctcgcagtcgcagctagcaacaggcgccttgcgctgcataatcacaaagtctcgcgcgtacagtttccgatccaggacagaaaagctttgggaggtgatagtcgccaataattacatcttagtacaagattctaccctacaacagacaactcggcaaagcggtaaaaaaaaattagcagctctaatctattggtgtcctaggccatatcatctgttcctactcttgtagtactacggcaattcttaattaacttgttcagtgtacgtagtacagtatcattgttgcttcaatttcgccggcatccttttgagtcgggatttgtgactagtgaccaccaaataaactatagtggtaatctttttctgattgtagctatcaaattagacatggtaaatgcgtcaccaaccaagcaaattaacacgtttaggcagagccgcagaatgcactacatagatcatcaagcaattagcacagggcgcaataaaaatctttcctagccgcgctactgagtcccttctacacgatagtaggacgtacggcatgcatgcactctactagctccaagccctgcaagcatgaatgtttgtcacccaatcattaaccgagtaggtaaaggccacggttaaatatgcaaatcaaactataatagggccttgtttagtttcaaactttttcttcaaactttcaacttttccatcacatacaaactttcctacacacatcatttcaatttcaatcaaactttcaattttaacgtgaactaaacacaccctagcaaaagtacagagaaaaaaaaacaaggctacgtttttctcaagatggacgtgcagctttgggtagagacacggcagtcgagctagccgtagttgcagtaagcacacaggcaagtagatatggtccaattggcttaaccatttttattttcttcttcagaggaatggcttaaccattggtgagtgagcatgatggagtagtaaaactgttggaagctagcattaattcatttgcttttgcattgaccattagcagaaagagtgagtgagagagcaagtaaagaagagaagtagcagagcacgcacctgcaaaagaggccacttccacttccaagtcgatagtttctctgtaaaattaactcatgggtttacaccaaaagtcgaatcagcttatggattcatgtcagggctaagtactcgtaccctttcttgaccccctttggggaactcatttctgttccaggcctgattgatctcccttttggaccatgccttttattgatcaatatgtacgtttctttgcttcattagctggttcagaacttcagattagttacattctttaattggtcatttccttgtgccgttgtgcatatagatgattgatgaacaaaccacaccagcagattaatctgtcaatgatcacaccacatatatattttctctgtctgtttctttaggtttaccaaccatgcatgcatggtaaatttcatattaattattgacatttcatatcatcctctgaaattcgatgtttcacatcatccaatactactagtagcttttaagtactggtagtatcttaaatagtgatattgttgtgtggacccttttggtcattattggtgatatgtgaagccccacacttgggttgggcaaaggagtttctgtaacaagtacacagagctatgataagctcgcagttgtccaaggatggcagtaatggcagaagctcaaaacttatggtacagtaaaaaggagaaatatagcaaacacattttcttggcctcgtccaaagattttcatgaaagaatgctaaagctaccggtgctgtccccgtctggtgcagcagcgatacgaacaaaaacatcaacagtcacgtagtacttgcaactcctttttactctccccacccaacaattttactttaccacccctcggtcacacttgatggcattaattcctctactgcaaatgtcaaatattgcatgtgatggcattggcgtgaaatgttttgtgaatacatagaaatagcttatgatcatgaatataacatatagaaagcctcctccttttggattaaatgattttaccagatttttgtaggataattgagttaagtcacgtgaaaattccgtaaaaattcatgttttagccaattagccctaaaagagcaatgttacacgtacttaaactttttttaacagagctcttataaacattgatctaaatcttttgaattaactagatgacagttacaagaaatctagatatatgacatagcacatcaatattagtaagagtttaattaaaaaaaatagtacgtttaatattttttgttctaaggttgtatacatgtcacacaaactaaactataccacattattaacaaactgtctacattgcttttaagtactaatgtactatccatatctatctattttagatcttttgtatctcggcgagtatatggatggacactgttgatcaatttcacaatgtattgaatgcactgctggcaacattctccgatgatgatagaaagggggagagggcaatcaaacataacgaatcacgagaaaggcctagatgcatggagctatccatccagcaaccgcaactttttcccctttgctcttttgctcttgtttattcgttcttttcccattgaccggttgctggctgcctggctcctcctattgatcaattccgtccattcccatccgcccaattcgacacagcttttgttgccacgaaagttgcctcctatttaagccccagcctcatcagcattcagctgcacagccataatagctagctctctcacacacataaacacacacgaaaggacgtaacagggcaaaggagagtaaggccatggccctagacaactaccactcctactacgtcgacgaccacttcgtgctgcctcctcctcctcctcctcagctggattgggattgggatcagctacagctgcacacacttggaggaggaggaggagacgccgcccaagatggcattcatggcgcctttcttccggccatgcgtaagacacacccactgctactagctaccacctcacacacagtatatacgtagactcatgcatacgcagatacgcttgctttcctcttttgcttgcaagctagctagctagggcatgtttgtgtagtgaactagtgagatagtgtcgttgagcttaggttcgttggtgtgtgtagtaggtttggagtcgccggagtcgtcgtcgtcggaggcgtccagtggctacctgcaagacgccgtcgcgcactggagcgaccgttgcaataagcggcagaggatggcggaggcggcggcgccgcctcgacggccagcggcggcggcggcgaacgaggacctgcactgccttcttcaggtaaatgccatcaacacattcatggacaatgtacccgtcatcgaagatatatgatgcatggttcatcgtagattcattgatgcaagaacttgttgcgttttcaggtagctatagtgggtagctagctcggcgcctagacaatatattcattctttagtagtggttacttattactggagcttttttaaaaaagatgaaagatcatgagatcactgaaacttttttgttgcctgtaaaacttccaagtagcagtagtaattaatctcgagtagaacgaaagtgctaagaacataacagagatcacagcaaagtggaaaggcacaactccattgtcgcaatgtcgcatatatgcagtaacatatacttacgtacaaaagagcagtgcagcgtcgtcgtgtctcctcgcagaaagcaagctgtgcctgattgtcttcttcctcgccttttgctctagctaactcgtagctgctgttgttttgttgcttgctcttgccacacacagagcttctgggattccagcagcagcggcggcgaggggggtctcatgcatgaattgaatatcatgatcccggagagcggcagttttgtctcaggtgattatgaatatcgacacgtccttttcaatcggacagcttttactaccacatctaaacaccagattaatcatatctccgatcgagttcttcctcgtcactgcatggctgaatttcttcaggctaagcaacaacagctagagacaaaatagctgtcggcttctcatcacagtcaattatcagcaaacttagtacatctgatcttagtgtcaaagtagttgcattaaaacaacttaggaccctgtttattgggcaggagatgaggacgacgcatcgggttgggagcaggagcagaggggcccgatcagcgcagcagcagcagcagcaacatcagcagtgcaggtgccagcggcgcagggaggaggaggaggagaggcagctgatcccatcctccacaaccacaactcctcgcccgccacctctcgcaccaccaccgggcaaggcgctgcgcagcaactgcagctgcaaaaggcaactagtgcagcaggcgcgggccacgcagcggcagcggcagggcggccagggcgccgcggcaattactcctgcgaggagcacgtcatcgtgggcaaacagcagcagcagccatcgccgtcctctcgtgccgcctccgcgtcgtcgcctcgtcgctcctcgtcgctgacaggtgaggtgaggtggggtgggggtgggtgggtgaccggtgggcaattatcactcgccgcgcatgtgtggcaactgaggcggtggcagggattggggcggggagcagcagtgcttgcagtcttgcagatgtggtttcgaacgtatttgccttgttaaacagtttcataggcatgcatggatgcatggcaggccgcatctattgattgcccccctcagttgttatttactccttcatagtatagcttctataaatgaagagggtttttaagtaaaatgctacatctgtcccataatagttgtctttctaggattcaaaatttgttccaatatatttatcactagaaagtactagttgtcacatccattcctctatattcaaatttcttccttttctacccctaaactactactccactcctaaccatatataccatttaatgtggggtattatagtcttttttctgaaatcttagtccctgctaaactatctagaatgacaagtattttgggacggacgaagtaaatagtcatgttgttactgttcaaccccccttaataataagaattgcatttgttgatgtttatagaagtgtaaaagaaatttcttggtcattcattcacagggaaggagaagagggacacgggcgtgctgtacccgtttgcagttgtcaagccgctggggttagaaggcggcggcgcggcgacgctgaacgacgtcaaccagaggatcctgaagcggccagccaggccggtccggcacccagtcggccagttcgcgtgcagccctgctgtgtacgctcatggactaggcctgtccggcaaagcagttgttagcctcacaaggatcaggacggcaggaaagggcaccataaccatcatcagaacgagagggtgaagtgaaggaaccaattatatggagaactgaacggacaaatgtcttggtcaggaagttaggataataatgggggagttagtttacccacccttgtaaatacatagccacatcctgtgggtgaggagggttcaaattcaccaggatgcatcaaggtatggtacatatggaagactgcattgtatcgttaccttgtcggggcctcagtactgtattcaattcaaccctcttatcatgccaagcataaaccaagatgtatattggcacagcctttaggtgcctgcgtaggaagtcccttatcccggattctgatgaggaagatcggcaatgaactagcgagtatcagcacataacaatcaataaacctgctacgtgtaactgcaaatggaccgtcgaatacaagaatactcgaaagcgctatagcctatcggcctctctccaccatcgccgtatcgcgtgggcgtttggctaggagtataggacgcaggcatcacagcagcggagcataacaaataaagagtaaacagtatcctacgagaacatggtatacaactatacctactaacatcatttgctgcagcagactcagctaacaagaggtagtatgcacccctcatctagcaaccctcttttgtaattaccgagtcatatttttacggtagtttcttttttttttcaaaaaaaaatgtgtcacttcaagcattgtacacatatataccacaatattagtatattatgttcagaactaagctttccttctttccgttttaaaaaggacaagcatcgtttaatcgcagaaagatgataaatgaagacatactccaggcttttgattgacgctagggtactgcataaatacccccaacctgctttcacaaggagtaccatgagcaagtgcagtaagaaaatgacgaagaaactaaaaaaacatatttgctgtaaaatacagcatcacttgcctgaagacgcagtaattttttatttatcaactcgattctctgccagcttttgatgttccattttggcaagacaatttcaactttatgctgccgctctatgctttcctccatcattacttcatattgacctcttcctgcagttgtgcccttccaagaagcatgagccaaccaaatacaaggattggagtgaccagacacaagccgaacatatgtctccaggaacagaaaataaatcacattaatatgtcacgagattgccaatctaaagatgctttggatgtacatcgtgtccagatcacattccatgcgacataaaggttcctgagcaaccgatcttgagagtccaacaattatgagttaaaagatcacatgcaaccgatcttcagttgcaagatggaaccttgagataatatggagatctcgaattatggacaaaaacagggatagctgcatcacgtatctgtttcatcttgcaggagtatctcataaatgtcagttcgaatgtgcaattccttgtcacgcattacttcttggagatctgacaactctttcagtgtcaaaattgaactcagtttttcaaatccatcaagccataatcgtttagacctgcaaagtgggatgtcttgttatgagtgccaagttccaattgtcattagtttggccatcactcaagttacagtttaaatgtttaatattagaaaacaatagcagctaaaataacatgaaaatagaacttgtgtttcccaaacccacaattaaagatggaactttttgataaaaaaataaaaaagaaaaggcagaagctacaagttccgagttccaagtaacaagttcatagagcaaccatatttgcaagaacaccaatttactgtcaaagcactttcttccaaaaaagtgtggttatttaaactttatactctattgtacatttagctatctgtaagggcaatagcacaacaaagttcaggtgcccattatcctctgatgagatctcttctgtactctagtaatatagtgtaagtataagatacaaatgtaacaaaaaacatataaatgatctttgttccaaattggctacataaaaatagctggatatagatggatgatagaataagcaatcatgtaagtataaccagagaaacatcaaattgcgacaacatatttcagtaccataccatggacaggcatgtatagctctgaagaacacacgccgagctgcagaagcattgcaagctatctctgcctcataagctagataacagcgccacaacagaacggatttctgtaacttatcatcagtcagagctctctcaaacagattgtgtattctattgtctgatccagctttgcacaattcaaaggacaaagcaaagagcaagccaattatggaaggatccctgataaaatcaaaagacaaagagcagtaaatatgcaatgcaataccatgcgcacttcagaagatatttttagaagagtgcatgcacccaaactggctacttaaaggaaaaaaaaatacttgatatatactgtttactgtgtcaggaagttcgcaggttacaaatgtatctctatatactgtgaaaagcatcacaaaaaaatgtattgctaaaggagaccaagagaatcattagcaggatcaattacatttctaccttattacacaatatattccatatttttgtcagagaagaacaccatagcatgtaataaaagcagtgtgttatggattttgtagggaagagaactcacctttgattaaatttgtcgagtgtgagacgtagattattggaaacactgtaaaggcaacctagagttaacatggctgcatatgattttgggttgtacggatatgtttgtattccttgcgatatttttggccaaacccttgagagactcaactgattaagatttttctgaagctgcttgatgtagtgcatccacaattcttcgaattctaagctatggttgttctctgaaaaatcatgataagagtatgcttaatagattgcgaatttgacagatgagaataataatacatatttacagacatagaaaagcaaagtaaatgaaaaggataaataaaatcatgaactatcaagcactgcagaaataaaataaatgtaagatctacagtgaaatgctagttaatttggactatgggtggagacttgtgatccaaataagcttgatacttcatgcaaaatcttggtatcaaaagctgtagttgacacctgagcagccttgggagtactagaaaggagcttgtcacttccagtcagaaaataggtatgtttattgaagattgtaaaatatctaagagtttagcaagatacatgaaaacaatttcaaatgtcaaactaaaaaatacgtctaacagagccctaaagacaggttataattcaatagttagcagatggtagatagccaatatataacaattaaaggaacagaaaatgtaatggcttagcatgtggttgcttttatgatcagtatctattagactatcactagtacttgagaaaaaagtatgggaggacaaacaatggctacaatttgtacaaaagtcaactcgccccgcttatagataaataaacatacacatgagctaaaagtaaaggcatgagtaattatcattcagattatcaagaaaaaggtgctgaaggatgaaatacctgaaggtgtcatataaaaggtctcttctataacttcaagaccagaagcaaaaccagatgtcatactctcaaacaaagatgctgagcagattagagcaacagactcttctttcataccatcacttgcaaatgaagatcgcaagcttctaatctgctctttaaatccttgacgagcctttaacacctgaggtcgtgatatagacccatcaaaagaagcatacttcgccttgtcccctaagcaggacagaacgtggattgcacgatccacagagtcagaattgtttcttgaagcatatattgctagctccatctcagcataccaaaaataaagaataggaaccttcttcctgagatcctgcccaacgaaagcagaagcgagcataaataaatgtgctagaatagaagactatataaggcacattgttgtgctgggaatagagccctgaaatcaataaaactatgtttgacatagctgaccaagtaccgatgtggtgtttcctttccaataacataaactgctcaagacaattaactacgtagtatatgctttcataaagttgcttgaaacctattctaactcaaccacgagattgctgctagaccaatgtgagaaacctgaatggcaaaaatatgttagccaattttcttgcaacaggccacatcaaaatgattgtctattgagaaaaccaagtgtcacaatgtccactctataatagtagctacccctaacataatattgcgaataggttgagtagttatagcatgtgatctaagttggtgaccattggtttgtgtccatggtggaattgaaaataatattgtgaaaacgagtgagtacctctattccaaaatagaggttccctacttgccataggaggtgcgcagtcaaactttcaacactttcaaaaaaaacttttcaaaccttaagcactaatagatatcatgttattgtttctcacagtaactaattccaggcagtacattttataatgcttatcaatgtataatgtaaaagaagggtataattgctagcagtgtgtcagagaaccattgcaatatacagaactacatctatattggaatttggaagggaggtagtgagtgagacccatttgacatactgatctatatttctagcagcattggcacattacaaagacataatgacaacattgattgtatttttggatctgaacatactgattcatttactttatggttttacctctgaagctccttgagaagttgatagtgccaagtcgaatatatgccttgctttgacaaagtccccattcatagcctcaattcgtccatatattccacaaagcaaaagatcctacccgaaaaaggtgacatggttcagtttttttttcttatttcaaaagaaaagagcgtcgtgctccaagtatcactgttaagaatatttactgatacatgtagtgcaggtatataaatattaaaaaaatgcacacatggaactgttggaaaagcaagatccaaaataagatgaacgttgaaatactttgagctagttaaatgaaatggatgttattgaattgaagagacatgtctcaatctctgaagaactcagtttgattttggttcccaaactgcatgatgcatccagtctaccaagagacgcagattaaatacaatgcacgtattcaagaaaacataaaatgcacaactagctagcttaaaacacatgaaaaaactaccggtttctgtatgctcattgcacaactaacgacctagttttcacctgttatgctactcagccaagtgatgccaaaaatacggaacaaggcatacctgtctgtctttcttcaatagatttttggccaaagcccgggatgcggtggctggagtagccagatatttttcttgagctgtatgaatttggggggtaacaagaacagcttcctccaggatatgattacgagggaatacatcaaggaaaagcaatattgcatttttcagaaatttcgcagtgccaggcctttgagaaaattcatgcatagttcctaacaatgacaccattttattatgaactgaagtttggttcttgtctataaggttagacaccgtactaagatcttcctgaatgtcatctgtaatcatctctaggctcaaattcctatcaatccaacttgaactgttggtggatgtcctggaatgtaaaaatatcctgtagttaactcattggtacacaacaatatgaaaatggcaagaaacaaattgtgaaaagtaacaacttattcatagtgcaacccaatgaactgctcataattaatacagatttttaaggcacataaaatgaggacaaggctgatataacacatttcacatctcactgccatcgtctctgttttcatcctacatgtccaaatgtttgcttgcaaggactataaactcctgggcagtaataccattaccatctattttccttaatttctggattcaagtaaaactatcaacatgatcagcacaagtctaaaattaagatgcacttgccatgttgaatcatacacctcattatacagttacagctatcattagtatgttctttcaaaggcccatatagtgatgatcttaaggaatacgttcacatctttaaaaaatgagcaataatatttgctgtttcactgaggtcgaaatgccatttttattgtacaagtgctagtagactttgcgtacagagaatgacaacagcttatctgaaaagaagtagatgaaattaccatctagaaatttttccaccatagaaatcaatgaattggcatatcaaagaaaagcgagcctcttcagaagatagagagaacaggaactcagttatatcctcaaacaaaattactctggaaagctgatcattgtcttctccagttggagcatcatcagaataaagtgatcctgtccatgaaaatggcatccagtgtaagtactgggttagctaaaaaaacaatgtgatttgtcaatctacaaacacaaggagaaaataacgtaccaagtttttcatgaagaggcatccattgttcattatcccttgataactccataaatgaccatctattccacgtttttggatctttaacttcactattgtaatcagcatctccatcaatcccaagctttttcagcaaagattcaacatcttcttgtgcagatgggtcctcatcatctggattttctgcatcatttccatcagatgtcgatggttccactttgcttgtttcactattagtccttagagaaggatcaaaccaaccactccaaccacccctttcagtttcttgggtattttcttgtatatctatattttgtctactctcctcatcttttgccaaccatctggaccatccaagagccccatcttctccgattctagcaccaccattgttccagaagtgctcaaagagtctttgcttactgcttgtggtcagatgaaggggaggggagaataaactaaattctatttgagcctgaaatagtgcagttgctaattcccgatgtccagtatgccattcgaaccgacacaaattcacaaatatatccactagaccgagttcaagatgaattaaggaagaatacttaggttcgagacgatcatattgtgtatcctgtgaaaaaaagaaagaaagaataaacatcagaaaattttaactcgctaacagtgcatacatgccgagagagggatagaaaaaggggagggggagcagataagctgaactatatacaaagaaacactgaagttgaacctgcctacatagcttagtacaagctgcagataaagcctgtactgcataagcgtaagacttccgtaggtcagatactttgaatctggagaattccccttgacacagaagtagatactgtttccacaacttacaactatccgggtgtttcatgagtatctgctcccatttatccaggagattctgggtgctatccctctcaccatatgccttcagaagataaagcaataattcttcattatctggattaagctctacagctttttccaatatactaatttttctttcagttgtttgcaaacgggctgctttctgaggttgagtactggcaactttatcctgtaaaaagtagcagagaaaatttcttcagtggatttataaagagcggacaaggaaaaggttgaatgaagaaacattatattaataaggttgatatcttagaactctctatgtaactactaatgatatcccataaaagtaacaacaatgtggatcacactatgcactgtttcacaaaagaaatattataacatcagacaaattggtaatacctggaatcgggcaaagtccaaccaaattttctcattgtgagggaactcccgagacatcttgttgaattctcgtgtcctccgaagtatttcatcttcccaagattcttcaagttcctgttccccagtagtgttattttcaggaagagatggtatccctagggggataaaatcttctgggagaattgcagagttatcctttttcaatacttttaggtgtttgaaacccttatttctttctacaactgcatatttcgccgagtagtagcgacctccagctcttgctttgctattcagtccatctaaatctgactcatgacccatatgtaccgagacacccaagttatgaaacaaaagccgttttagaccacgtgcctctggcatgttttgagacttgtagcgtgcaatatccattctgcataattttcttgtgtgtcaaatttcagtaaaatgaaaaatgcatctacagtcaaactaaacaaaaatgaagaaagcagaaaaataaagaatcaactcatgaaccaaggaaaaaaatggaaagtcacaaaatcacactaagcattaatattctggccaaagcatgatgtaagctgattcattctatttaaatcagatctcgcttttctcaagacgaaatcaaatcagcccacttaacttcaaaggggactaaacattaatgagcttcgagttcagtaaatttgcctaacagtttcttgcaactcaattagcccagaggcttttatttatttccctcagagatcacaacaaatatgtttaaacaagtagctatgaatctaggaaaacaaacttgatactgagaattctgatgatgccctaaacagaagcaagcctgcacaacatctaacatgccactttagcagctagtctagcacaccttcatggaattgcgcaattaacataaacgcccatggttttcaaatggaacctgataccgcaaaaatggaacaaacccagtgcgtatgcctgattattaacttcagatgacaatgcaagttcagctttgctacacatttcatatgcaaaaacctgacctgtatatcgatccaaacgccaagttatcctggtcgcccttggcgtcgaagtagtaatccttagccaacttcgtctccgacccagcccaagcgcgaacccccggctttcgcgaggcttccgcgctattgtaccgctccttctcccgcctccgcttcctcctcttcctatccttccgtctgtccctcctctcctcgtcggaggccggaggcgacggtgagtagggcagcaggtcatacttagcaggtgcgggccgtggcgcctcctcttcgtccgacgaggcgcttagcggcggcggtacggatgaggaggcagtggcggggatgttgagggaggaggcgtcgaaggagaagctagggtttgagagccactgggaccccgccgcgggggcggaggattcctcgggcgccgagagggggaagagaggaaatagagaggaggaggaggaggagcgggcggcggctgtggtgggagcatgcggatcgccttctccgccggcggcgaaggcgggtggcggcggcggaatctccggcgatggctccatggcggttgcgagccgagggggaggagagagagccgagggggacgaagaggtcgggcccacggtgataatggactctggcttgttgggctaactaaattcagcccataagtttattgggcctccatgagtgtgagagatcgacagataattgggggcataagttcacttcagatcccttaatttgtcgccaaatctaaaattcatgtctaagggcctgttcactttgatgccaaaaatactttaccaaattgccaaaattttggcatagttgccaaaattttggtaacttgccaaaattttggcaggatttcttatatagttaccaaaatttggcaggaaactaaacgtacacatatttttggcaactttaccaaaatttggtaaggttgaaaatggcatcaaaatgaacaggccctaaacctctactccctccgtcccataatatagcaatctagtataggatgtgacatttcatagtacaacgaatctgggcaggccgcatgtctagattcattgtactatgaaatattttatctggtcctaggttgttatattatgggacggagggagtatcagatatgactgtatgacgcgtccctcaactcctaaaatcagtgaaaacaatatctcaagacggttcggatgatggttttcggttgaggttgggtttaaatcgtttccttaatcggtactccctctatctaaaaaaagccaacctgacccctcctagtcctacgaatccgtagtactaggagggtcacatccctttttaggttggctttttttgggacggaggaattactagatataatgtgttgctcaacttttaaaaccagtataagcatgcgttgctcaacttttaaaactagtataagcaagatctaaaggtggctcggacgacggttttaatgtctggtttaacttgatcctcgtcccacgcttactttctgttgctgcgttctggcactgtccattgcgagatgttaaaaacacgaaaggcgcacgcacggacgcacggcaccaaatgggcagcaaccggaaaacccgaacgatgtggctctcgtttctcgcacgaggaaccgagacatatggtttgtcttcatcgtcaggaaacgaaagcaaaacgcccgcacacagggcaaactcatgctttgattcacacgcaacaatcataagacggttcccatggtgctgtgccgccccatgcatgctcaagcattcttcatcccagaaaaacccgagctcttttagacctacaaaaacatggatcgagaggcaatacgatccacatcgaacttagattaatctacagtggagcgggacgatgttgagcacgagcaataggtcgctctcgcttcctttgacccctgtgtgcacgacgttcgccggtggcgaggaggacggcgcgttcacggagaaacagcgcaagtatcccatcaagatgaggcggcgcatatgcgcgagctgcgggctgcgccgcacggagcaccgcgccgacgccggcgtcggggacgagcaccacctgccgccgcgcaagcgtctcctgctcaggcgcggatgtgcaaaagaggaggagccgcagccggagccggaggaggaggtggagacctggagcggcgacgcgatcatcgtcacaagggggaagagagccccgcggaagaagcgcgacaacgcgccttgagcggcttgagctctcggggtcgtatctatgcgtgcctgcgaatttgccatctgccatcctacctgaagtaatattgacgaccatacagcaacagcatgtttcctccaagtaaaattgagaaacgtgcagatgtttttttagataatggaatgaaacattccagcctttgctcatcagagctacagccaattattacaaagtatcgtagttcaaaatgaaattaaacacaccaacaaaataaaagaccaaaccaagataaggagtatacatttattcaagtctatttgtgaatctccatccatagtttgcaaaaagttgcattactgtcgtctcaagcctacgacatgcaaccttcatatgctctccatcgtgcagatgtacatttgcgttttgcaaggaaagaatatgggccagccaatcgtgtttgtttcccaggatggattagcaggatcagcttcattcagacaagaacagtgcaaatgtgcaatacatctgaatgcattgcgataacatggtgtcctgacgatatgcggccgctcaagcatgagctgtagtgctgtaccctgtaaggtgtcaaaactgtagtggagaacaacatccatcatcacatcacattttaacaagattggtcattgcgcagggagttttcagttgccttcctgcaaatattaacaaaaatacatatcaaggacttgttttacatcatattaatgcaaattcaccacattatgcattagtgagtaattggcatatagccaatactaaacaaagaagatttgttactaagaaaaaggatcaacacagccaactcataaagaatttagtgaatgattaatatgcctgtctggcgaatattttttctattcatcagactcaaccatcttagaagttgcaagaaggtagcagtaaatttatgcaacactgaacaacatgctgcatacctctaatttggacttagcttcagattcacatgccttgcacaaaatctcatagtttttttcaagcccaatctgtagacactggaaggatcacgatatgaacatcttaatcaataaaaactatagtttataggcaaaacaataccagtggatctactcgtgatggcgaagtactggatattacatatctgcaggataagagttacattgaaatgtttcaaccagcagtcactgcaatattaacaaaccaacgataaggtataaatttagcataaataaactgtggaggaaatattcaagcctagcacttcacctcaacttcttgtagaaagccatagcaaggttgttagctttctgaacagttagcatcactgctcccatttggctctgcatgtacacgccatcaaaatcagctgatccttcatgctgagatttcagatagcaattttatgctaaaaaatgtacatgataagacagatgaaggaataagaggtatcatagaagaatataagtacgcataatatttctggaaatatgtacacacaaaattgagcaggtcattttagtaaaccatcagtaattgttaaacaagtcacattaccttacaagctataagttcaatcaattccattagaaattttcccagccccttcccctgtgcagaaggcaccatctgtaactcatagacataaacaacaggaacatcttcttccaaaacaaatctgtagtgtacaaaaccaatcaagcgatcttcattacatgcttcatgtgtaaattctagcccggaatcttgcttcataatattttgggtggtaatggcatttgaagattgccggacaaagatatatcgtgcttctggggcaaccatttcccggcgcttaattttctcttctgaaggccattctggcccatattgtccctccatgttaacctatattattgctttctagcattacattcaatatttatggggaaactgtaaaaggaagatatgcaaaatatccagcagcactaagagcaaaatgaaagagaaatatatgtgaccttgagaagattttggatgtacttccttgttgataatggaagttgatttccatgtccagactccaagtagaccaaaagacctaagcataaaaaaggtgagattgatataatgcccacaacacacatataagaaaattgcattgtactgaataggacttgttagggcctagtgttggaattatagaggtaaatttgacattaggagttttttttcctttcgctgggaatattaatagtttctacatcatgatggaacattactagtcctaaggtagtgaattttgttcaccaacagacaatgtaggttaccatttctctgatacttatgaaaatcaggaaattgcgctagatgatccttcacggctacagctttcctgataagttcttcaacagccttctttctccccaatatctaggcaaaggcagaagattatctgaatgagaccctgatattagatacatctccgctattactcctcaaatgctacctcggtgacaggagtgacaaaccacccaccaaataagtttaaaaaaagaacttttgacaaaaatctagaggttgcaacatacgtattcaacagaagaacacatgagtctaataaagttgacactgcagctttcgcagtttatgaaaataaaggaattcgacacacttgtagggtttgaagtgcgcgctaattgaactctgacataaccaagtgccaaacaccatctactaaaaaaatacacaaaatcttatcagctattcggtttcgcggaatataaaacaaatcgtatcagccatgagtaatcgactacgggtagggtgaaacgaacgagctatcgatactggccccatcaacaagaggagaggagagaaatataaagacctgcttcctgctcggcctcttctccacgccgccgccgccgccgccgccgcttctgctccgaggcctctttttctccgccgtcgccattatcccagcgcttgctggccccgtgtcggactctcgctcgggtctctctctactctctcgcaccgtcgcccggccgccggatggagggggagatccctggggaagaaaggggcgccgtgctctacagatgggtttgctaacttttggcccaactcggagagggattgttttaggtgggttgggccgattctagattggttgagaacttgagaatagggttcacattttcgacaaaaacatgtcgaattccatgatatttcgacgtttcgacatgactcggaattaagttttgattgaaatttcgaaggttaaacagtagatttggtcaaaattcagtcgaaatttatcgataaccgatcgaaatttatcgaaaaccgtgataccgatggggctcgaaatttagtggtcaaccggtaatgtaaaccctgagatgcatgaaaatctcaggattaggatgccgtgccataatcctaaattcagaggaactcaaagggactaaatccacgaggtttttgcaaaaaagtgttgtctggtaacattatagaaaagcaagtggacttaggcccccttaattcaaaggaaaatcatatcaattttgaaggatttcatttctatagaattatatgaagaatgtctcattccatgcaagttttggacgaaaattaacatgagtagaatctcatggaaagtttcatttgtatctttatcttttctcaaatctatatggtccaatcaaatgatcattctatgttttgcaattctatgttttatacttgtattattatctgaatcaagtatttttcctattcctccatttttttcatttctataattcaaagagtttttctccaaaattcatatgaaataatcaaatgatttcggagaagccattcatttactccaattctccaaaggaccatgtgggaaatttttctgttgaattttagtcctccaaaattcctccacttttccttcgctccaaagaagccaaacatatattttaattgatgggctggtagcattttgttttcttatgataaaactaaataaagtacggctattcatacaagggtcaaagttctagaataggaacaggcagataaaaaataacactatctttatttgtttctgtctaatctgtaagaatactcaaatttgagtcgtttaaatgggtcggcaatgaatatttgttctcgagtgacgtacagcagaattcccaaacccttgggctccaccaaccgctggtttgtcttgttaggccgaaaccagcgaacgagaaatgaacgagattacagggaaatttcggcgccaccgactaatggtaacaagtttcagaatgattagccggtcacgacctgttctaatgaccctgcatcttgactgaagccacccccatgttttttgccgcgagaaatcatgagcaggtgacgaatgctcatgcgccatgtgtgcatgtacagacgtggagacacctcggattgaagccagccaggtcaggtcactgtcacctgttcgctcgtgaaagcaacgggcggacgccgtgatcccgcgaaggaagctgcgccgaagctgcaggtgcaggtgcccaagggctaggatgcagacaaacagcagccaatatccatcgcacgaaatgtacgggcacacacacccgaactgccataccggccgacagctataaataaggtaatcagagttcgtgcccagaacagaagccatattcggaaagaaaacacctcgtctcgcggcgctcactcagattactcacacatcccacggcggcgtcggccgtcgtggactcgtggtgcattgatccgtcctaatcccatggctccgaacgacgccggcggtgtcgccaaggaggcgccaggaccaaggacggaacgcgcccgccgcaggccgccgatgcagcgggtctacgcgttccagttcatgctgcttggagcgacggccatcattggcgtgtacgccgagccggtgtcgtcattgccgcgcctgttcctggcgcttgtgatttggctcgtcgggtacctggcgctgttcatgggaatcatggcacgggattgacgtaggactgtaaaaaaaaaaaaaaaaaagctcaaggctcatgagctgctcgagcttgactcgtcctaagttcgattcgagctcggctcgagctcctaacgaaccgagctaaagcctattttaaagttcgcgagctttgtcgagccgagcttgagcttctagattttttttattgttatttaataaatttgtagatcaaatatgttatttatataccttgtattggcatcatatatttattttattctttttcctcttctacgatagatcataaattaattatttttaaaaagattatcctttaaaatatatattgttctaattaaaaatcaagctcaagcttaaatcgagcttgtttgaaaggtcgaacattttatagactcggctcgagcttgtatcgagctcaagcctagacaggcgagctcgctcgagcttgcctgttgacagccgccttgacacaccaagctagcggctgctgctgcttttccaacctgaacaatagtataggatagatattgtcggattacactgtaggcgatcaagattattgacccgaaggcacagtcaattccgtgcaagtcccgcggatttaactgtggatataacgagttcgagtccttgatgaactagtcccatcacgtcgagctgagaagtgcccagtggtcaaacagttctgttcgtttctttggactaagtactactactccacctagaatttgaaacggaaggagtaaagcataagagggcagctagcccacaagataccgtggaaaagtgatgtcacgggataattaaaacacacgacaaaataaaaaaatggcgtcccgtgtccctgttgtccacgtgaagaggcacgatacctagctggctcttcctgatatcgcgcgcttcccttgccggcgtcgtgttgcctttgcacctggagaagcacacacctcctcgtcggcgtcgtcgcccctaagcagcgggagcagcagacaactcccccgctaaatcctcctctttgcccccaccgacagcaacaacaacagaaggagaagagaaacgttgaggagaggaactgaggaagggagaacagaagaggaggcaacgaacgtgtggccaccggtcagccaggcggcgacggcgtgctcccccttcccccacctttgaccgtggtaccaggtacaataggtatcaggtgccaggtggtacttgataactataggtatctagtacctgataccatgcacatggtacccatggatggtacctaggtactaggcatctggtacctgataccatgcatatggtactgttgacgagaaaatcgaacacatcggctgagagatttgcttagctcctgtgcaggtccaaatcttgattagatgcgagcgtgccagtcagtttgatcctgcaactgacaagatatgcaaataatagatcaaaacagtcaatcggctgacaagccgatggaatagttccagccgatagccgataatagccgatgccgatactagccgatagcgatagggtgtaagcaatcggctatatgtccaatgtagatgatgatataaaggcaatcggctgttgataataaaatataacaataatatagtccagtataaaccaatcggcagataatgatatgataaataagcatcgatccgaaggttaaagcacacatcaactggaggtccgatgtcatgaaatccacaagattagattaaacagtgaaacctttgttgtcatcggctaaatccaacttatatgtatatgcaatccttatgagccgatgcaacgtccagataactcaccggctgaaaccccgatgaaacccttagtggcaatcaaaagcaggctagagattatggttctaagcacgacttagtagatcaaacttaactgatgtaacactaagtatgaaaagaaacataatatctagacaatcaagctgttgaccgagttttcagggtggtagatgtctaagctaatctaatctagcaacgcgatttagccgataccggcagaaaccctaaaacgagaagcagccgatagagctaaattgatatgctaagactagattaacagagacatatgataaataggtaggcaaatatatcatccaaaccagagcaatccaagaggtcgaatgtactgatgcagccttgaacgacgccgacgtagacgatacaattgcctggaccggcggaacattagacttatcccttcgccggagatcgaagacgatgtagccccgcgccgggtgccaagttccgccggaacgtaaaacaaaagtagaagtaaaaagggtggcgatgcgccgaattgtattgatcgtgaagatagattacatagaccccaggtgtacatatttatacccatgggttgatacaagtccttgtcggacaagaaagaaactttcctaaagataaaaggaaaagataaagtccttataggacactaaacacactttcctaaagataaaaggaaactaacaaactattcctaattaatagataacttgccatgccgcattctctttgaactcggtctcttttggataagcttcctttagtagatcaatttccttaaccgaatatagcaagaatccgacaactgacgacttgacaactctcatcggctaatctcaggacttcgaagccgatgctgactctaagccgatgactactctgggcttaccaaatttcactgttaacagatacccatggatggtacctaggtaccatgcatgataccctcgaggtatcaggtacaataggtatcaggtaccatgtggtacctgataattataggtatctggtacctaataccatgcacatggtacccatggatactggatggtacttaggtaccaggcatgatacccttgaggtaccatacccctagtacttggtaccaagcttgatacctaggtatcagtccgtacctgcacataacactgatgagaggaggatagcgtcgacatcgacgaagagcgcttgacactaagtaatcttgtaccaggcctgatacttgtggataccaggcctaatactgaggtatcacgacgactgatgcctgatggagaaggctgtggcgcagacgctgaaggtggtgaggtccggccggaagtcaacggtgaccatctccaagaacacgcgctgcagcaacttcatcttcaagttgatggcaaagaagaggaggtagaggttctagagcaggttgtcgccggcgttgcggcagccgaggcaccgggaccgccggcttcttctgcttctacagtggcagcggaggatccacctgcgctcaccggcaaggaggcggcaggagcagcgggcaaggacggcggcacaagtggctcatgagaagcaggcgatggagaccttggcgaggagcgcgagggaggagggcagcagccccggcgccggcagtgacggggagcgtgcgcgcggaggcggcgccgcagcgggcggaggacggcgtcgaggaagtgcggcgagatcacccccgacgccccctgacctcaccgacgccgtgccgtcgtcgtcctcctcggccgccgaagacgacgacgacgatcccttccttctggctggcttcttctcagccttctcggccttatccagagagagagagtgagtgagtttgtggaggggaagggaaggagataaggcagagatcttatccagtttatcccgttgtgacaggacaccgtgtagtagattttctgaaagcataaattagtgttgcatctctcggtaatgacttggatacttagtattataaaatacagcctattgtacttttgtttggtcgctattgagtcttgatgtcatcttctcaatttatgtgaaatctctttgcaaaaagttcttccgtttctttctagagtaatgactggtacagcaatctatgtatcgacgacctgatggccaagggcagacaacatcaattgtcaacgatgcagctggcattcgcaacttgttcagtatcatttgtcatttgagacgagagcgtatcctggtatgaatatccagggacaaataggacaccttaaaatacatgtacacctctgactactcgctacactaagatatgaacaagaatttgtctggcttgtaggatcggcctgcctcaggctgctagcttgcccaaaatcgccgtgtctagaattttcgtctgatccgtcgtctctagaccatccaccttcacaatgccatcagatccgtcgactcccagcaatttccccgtgagtccacgccaagacccagacattatctttagcttgtcgttcttcttaggcttgacaacctcaaactcgtttggaaaagcagttatttcatccccgctgcctgacgacccaagtgcgacgcggcaagatccatcctagagtttaaattcaaggatgtgtcagtgtaggaaagtgaaagaagaattaggggggtcatcttgtagatgtaaaaatagtacgcaccgggaggacttccttaaccacaccgcaggtggtatcataaccttccctgagcacattgaccaaaacatctggtaaaagccagttcctaccgccctcctcacctgaaagcagtttgggaattagtacccaaataagtgcatccagagctctagatagtttcgatcaccatccagattgactgtagaatgcattttgctggagaagcaacgaattcgaaggataaaaatattacctatggcaggagacattatatccatttcaatataacccagagtcatgggctgaccaccaggtgtgctcgggagatatgatgcaggatttggggtcattggttgcccactaggtgttggagttgcatatgagcttggattttttccggaggcatcaccgaaactaactccaggtgtaacagcccatcctgacccaggggtgggggcttcgtgtggctggggaactggagttcctggctgcaaaagtgaaatgtagaggctcaaaaacttaccattgattgccaacccaaagctaatctacagaaaataaagagcagtcaagaaatagcataagtgcatgacgaacttggtaagttgggctgctttcccaagtgacagcatcttcccagccattcctgtaataattgaattagtcaacaacaaatctatataaaataaacttatactagaattagctcgcttgcacaacataattcattttcattataaaactaaattgcacataatgtcagcatacaaaccttggtggactcattggtgcccatgctcgactaggcataggagttcgcattccattaggaactggtgttgctgtaaaagacgaacaccttgttaatatgtgtgtgtgcaagagagagagagaaagtaaataccatttatagcatgaactgcataatattttcgtttggccaacgacacaacgccagtcaaattttacatcgttcatctgaattacatctatcacacccatttcgaagtgcttcctgataagcattcaggagaggaaaggctccctccaaaaaacaacaccaatcaagatacaaagaggtgactactcatatagtttaagttgattaaacagtagagaaatgatagccattgattatgctgctaaacagtacagatgcactagcctccatataaatcttccatcaccatctgagtactcaagtactaagtagcaaagtctatccgcattaattttttacatattgagtagatgacataaagaaaacaaaactacaaagtagtgccatggaattagtacttctctccactttacatttatgacattatagataaacctcccagtctcttaggacccaaaatagctacattgggatcataatacaacatttttgttacttcttagtaaacatattctgatatttagcagtcaaagttgcttcggttatgtccaaaactacatatttgtaaacggaaggaacaaataagtgatcttagctgtcttaatttttataataaccataatgcatgtaagatggacacacctccagggtcccgcaatggagtctgaaaaggacgcagtggcgttctagatgggtgcacaggtgtttcgttgccccatgaattatgagattcactgtcgatacaagtagtcattaaatgaaatcaaacagctttccaaatatacggacaaggaggaagaaatttacccgaatggagttgcaacagtagctgtgtcagcaatatcttctctcttaactacatatttgaagcaagatagttttaaaaatcagaagaaatagtggggatttggaaggaatgcagctcaggaatgaaagttgtagtgtgtccgcagcgattgctgcatgaagaggtgtactcgttgatctccttttattggtttttgcttcccttcttaatacaaatgcgcgcaaagttcccaccaaaaatagaacaaatgacaacaaagattcacctgcaacaaccttcataagtgaatcaagctccacgcgtacaagtgctcccgtcatttctttaacacgaccacgatatcctttgtaggggccagatttaatcttgatacatctattcaccagggtatcatgccctttgccaccatgatctctgcctccaaaccgtctgccatctgcattagataggaaggacaattatgaattggtattgctattgcatttagcagagcaatgcagcctaaataaaaaaaaaacaaggagctgtgcagataatattcatacaattagtatgaggtgctttaggggggagccttcctggagattgcaaaatccttgctgaagatctaaaagcaccaaatcgtggatcaactgtacccataccctgtatcagagaagcaaaatggttaggaaaatcttccaagacaaccaacagaggtaaatagcttcaaacatacatttccgcggcggctaccagttgatcccccaacaaggaggcatgattgtgcgcttgcacagataaagcctgaatgttcaaggtggtgacgatcataaataaaaagtactcctctgtgtatatgttccacagacccttgctttccctgttgtgacaaagtgtattagacatatagtataatgggataatgtaataaacatatattctgacagaaaaaaaactaaaacagaatataatatgaaaagctaaaaacaaataaaataaactgtacacactttacaagctccttcaatgaccctaacgacatcctttgttgacacgatattactggaccgatcttttgcagatgttcgccgataaatcttgctttttatttctctgagtttcacaagaactagttcaggtttgtcaggctctcccttgagaatctaaatgcattttgggggttagtacacaaaaaatatgggaacaaaagatcattaggcatacgtgaaatgttctatacaaattttcttgcctgaagtgcttctttttccacctttataataacaccaaaagataagtttctgaaaattgaatgggaggaacattgttattacatagccgttcaatgttgtaagcaacaacaatggctcattagaaattctgagcttacccaagaagtacaagatcatgcaattcataatcaccaattctggtaagcccagtggttacctcagaactctccacaacatgatcagcgaacacacggatctgtaatcatataaacacatcagaaagtcaaaagcataatggaagtttatccaaatagtttcttatacttatgtccacgaaaattccctcacatgctctttagttgtgtccgacaaaatgatcaaaacatggccttcaactttaactaccaagcccgttgcaccttcttgaacaccagacaccacttttacatggtctccaggattgaaacatttgcagagatccccctcattgaagacaagtgtgttctgcaggtacacaaagagatgtataaattcgtaatggctacattgaaaatgacatgaaaattccttttgcaagtaattaccagaagaccaggtaattttgatcggatatgaacagtggcatcctctgctttctcaacatagccctctaagttcttaagatcacctttaataacaataacagaatcacctttcatgaagtgcccttttttcctatttgtaaatagggtggacaagctggccgcatcctcatttatgtcattatcaggttccctgaatttctccagttcatcaaatgatggctgaatattgtgtgcgcttattgactttattgaaaacgttttgtgcaagaaaccatctttgaattttaaaccatcaaccatttcatagtattccccagagtctctattcctcctccggtcaacacgaatgttcatctccttatttacaatcgagttagcagattgcagcaatacaaatatatatgaatacatactgattacaaacggaggaaaaagcaccttgcctcattggcgctaaataactttggtggtggaacaaatgatttcttctccttcacaaccttaagtccatcctgaaaatgggaaatactgatcatgctagcccatcggcactggcaaaggataatagcatgcagatgaccacggactacgtacagatttttaattttcaatttactcaaatggtcacttgttccactataaattaatacatctggcattcagtgaatcacatcagataggaaatcctaacatcataccaaatgatggcagcaacaacctaaaaaggtaatgtattaacagcagatgcatcaccacaaatataacagggcatgttaggctgaaaggtgaacataaaacgtggcaatttataccaagtaacaacttacaaatttgtttgccaaggcttgtaaatctattcttggaatgagtttcacagtaaccttttgatgcacatcatcaacgtcaacaacctgatggaggtcataaaatcaaatagtagcagaaaatgttagcatgaagaaactgtactgccgtggtgatggccataccttggcaagatcccctttatatgcaccaagcttcattcggacccatgtgttaattgaaatatcagtagacttgctctgaacagagagtacatcagccacctctcttataggcaccagagttacttttcttgaagcgaagatattgcgcacacctttgcaagcctgtaataaattttagttcccatcacatagcaggaatattacaatgtcaggtcaagcaccgtacctctttgacatgggcttctttatatgcttccacataaatgtaattcttcaggtgatctaatgcaagaacagatttaatctggagatctggcgtatcaatggacttctgcatcaaacaaatggctgtctcccgttcatgcccaatctgaaaatcataattggatatcagtgagcatcaaattatacagaaaacaaattgtggagcagaacattattcgatagaacctgcaacataccgcacatttcaccatccaaagctttggatccttcaccgatggcagaagagcttgctgttcaacctcagtcacaccatcgtcatcatccacaaaatgtgatgacggaattatatacctgtcgtgtattagcttcacaagtgcatccacgtcctcctcttcatccagcatagaagatggatgccgtctagagcttcttcccacatcttggtcagggtcgtcagctcgagtatcatcaataaagcctaccaaaacatgaaggaccatagctgacagcattaaaacacttgaacttgcttttggatattatataattcaacacaagatatattttgacaatgtgaatctgataataccaaaaggaaggtaacacatgttagtagtcagcacaagtaaacagcttagttagtttatgaattaattggagcatcttccctgtgccgcattcgaaacaaagagtaggagcatcttccaattaggtttcacatttgaaacgaagattttttaacagatctatcacaataacatagaacagccatcaggccatcagcgtattcagacaactttgaacattgataataggtagtagcagcaaattcagtccatcatattggcatgtcgcagagtcctgccattcaaggcaacgtggctttaaatagagatgattgaatgaactacgcccactcgcccagttaacttcttggttggtgaaggcctaattggtgtcgagttagtttgacggaactacttttgtcctagcaaatctgcccaatttatgacaaaaatcccggaatgaatataaacttttgcctccaactgaagttttcacatatcgctaaacagaaatctcgattcttattgccattagatgagactaaaccaccacaaacaaccatagaactgcaacaacatggaatcaatacgaaattgaccaccaaatttaatgaatctacacctggaccatttcgaacagagttgattatccagggtaaccgggaaggaactagcattgaaattgttggttcgctcaacttagcgcttaattaacaaacacaaattctacgtccaatgactcagctagcagaaaccgaaacgaaattgctgatttcgctgtgcttcgtaatttcggatttgggaaatcaatctaacgattctatcacggattcacagttcaaacaccagtgagaccaccaggaagcactcaccgtcctcgaactcgccatcctcctcctcctcctcttcatcgtcgacctgagccatatcgtcgatcaggatggacgccctcttcctcttgcgggcacggccgccgccgccacccacgtagtcctcgtcgtcatcctcctcctcctcctcatcctcatcctcactggccgcgtcgtcgatgaagctctctacgccggaccacttcccgccgccgccgcccccgcgtgaccgctttccgcccctctcctccacctccccctcctcctcctcctcttcctccgagtcgtacacctcctcttcatcctcctcctcgcggctgccgcgcgacattgcggaggctagggttccgcaccctactctcgcgagtcgtggcggcgtgggtgcgcgatgccgcggagcaaccgccgagagtcgagcgcctagtcgcgcgtggtctccctgcgcggactccgcgtgtgtgatgctgtgcgagaatgagggggaagcgtttcgatcgattgctcggaactcggaaggggaggcggggggtatttattggggcggcgagcaaccgcctcgtagccgtaggctcgaggagggcagaggtgctggctgggttgggccgggccgaagtcggtgcgcaaaacgggggaggaataagtctattatgactctctttatctctcttcttgattgaatcgcctctcaacagcaaaactgaatataatgtcttccccatcttgaaaaaccgatacaaatcaaactctttcgatgatttaggaagtggttcctgtagacgtgatatgttaattatagttgactcgctgaatcagctggttaaacccacctatcagccactctcctctctttattttcctctctcctctcctttccatctatctcctgaggtcggcagcacatatcccgccaaggagaccataagtaatcgatgttacacgccccgttggtggcgacgcaactgcagagccctggggtcaaccagccacatcggcagaaatcgttttccaaaccattgaataagtcgatttacactagttttaaaaatgagggagatgttatatgcagttttaggttgagggaggctatttaatcacgagcaagagcttagagaagtcaaatagacatattctgggtggacaggatcgagggattgggcacgatcgcacgagaacagatgcgtaaagagtaaagaccgcaacgggctaaaattattttgggccttctcggaaagtaaagaacgaaaagatgtgattgggcttcgagccttggcccatgtggcctgcatgctgcaacgcgatggcgattccaaagcaaacccatcgtctggtcgttgccgatgtggagatggaagatgctgtcgcaagcggcacgccggatatgcctttcgaacaaacaacggaagcaggcgcacagctagtcagctatctggtgcacaacacgtcaatacacccggtgagcaatttatatatatagttgttattatatgaactacaatatggtgagttgacaaaaagacccaatacattaattggttgatagataattttatcacggcaacgttggtagatcgatcatgaccaccctaaggtccaatacggaacgaaaatatgaaatatgtagttcaatttacatactacaaccagacaagtcaatgtattaatgggttgatgaattataagcattaatatatcaattattgccaaatttcatagaatgttaaagcttgatttcattgttgattttagggcctttttgtttacccctacaagtatgatttaccctcttaaatattttaaaccccgaactattaaatctggatgaatcatggcaacaaaaatatcagctcattatgcctacctaccagcctatctcgttattctttttcttccatgacgcaccaacccctccttggtgatgtcctagttctcgacgccccaacctactttcctaggcaatgccctagttctcaacgctccagcctccctccttggtagcgtgaagccatggagggaccttgataatagcatgtgaagttgtggtgtgaggacggttcaatgttttgccctctagatctataccacccgctcaagtttcacctcattgggtccccgtacaatgatggaggggatgtgtcttatggatgggatggtgaggttggcattgaagcacttgattcggtgaatgagaaggttgacatacttgatgcataggtgagcggacacgatttgatctccttgagcttgagctgtcggtgtcctcccatatgagcttgcccgccaccatccttcatgagcttacgagtcatcctctcactcgccctcccctcctttaaaatagcaccaacgaacttccctttcatcccctcctagacaagcatgtccgccaccgtcctccactaatttgcgccactatgcatcctctgtcactcccatccccataaatggtagatgggcttccccttcattccctcctagccagctcggaacgtggtcctccacaaggtcgtgttgttctttgttgctcccctccttcaaacaacattaggaggttttccctttctcccttttggccctctcgtcgctcgaattacctttctttcattgatcgaaaaaagtaagtggaaagaccaaggtggtggcaggaaacagaaagaggacaacagggaaggaggtcgtagacagcgacggccctatatttgatcgagcgagtaagaaagatagataagagggtaagaaaactaataaaatgcgtgattaggttgccatgtaatgaaatcgatgtcatatgtttgcaacgtaatattaaaactaccacttttttttacgcatgggaaggggtacggttttggttcgtgttgatttaatagctcggggattgtcaaatttccgatactctagtttaaggggatagataatacttttatgataatcgaggagataaatcaaatccttttctttttatcatggtctgttttttagatttggttcatacaaaattatatttttcccataagagcaggtacaatagctggatattagccagctataaacatattttaatgagataaacgatgagagagaagagcagcgggctacagatgtgtagccagctacagcacggactccaagacacaatgtatatatgacatgtgggaccatatattaatagtatagaaagcaactattatatgaattggctattagattgattatagatgaattggagttaatagtgaactatactattaaacttgctctaaactacttcatccgtttcacaatgtaagtgattctaacatttttcacattcataataatgttaattaatttagatagatatatatgtttaaatttattaacatcaatatgagagaaatgctagaataagggagtacttttaattagaccgttcatgtttccacggttagttccttggatcttgtctgaacggagtagctccagcttgttttctccaggaggccacgatcattgatttatctatgatcaatctgggcgtacaggccaataatttcacatgcaataaacccgttacacggtgctcgaggcgtcacgcggacgccgttcctcctttgcatgtggcgcctagaacctagagccctccgtgcacctgtccgaacacgaaacaccacacgtcatcgctgcagtaaacgccatcattgcagcacggtccacgtgtcaccatatcatcggtcgcacaccatcgccgcgtgaccgaacagccgcagttgatcccctgagtgccccactctggatttcgataattacgtatatgggtcactcgccttactccacgtcggatgctgcagatctcaccgacatatgggtccaatcttagtgggccccacacgtcacttgcataccagtggcgtcgggtaggccggcacgtagtatttgtctcccctttgcttcgacgcggggaaaccagaaatgcccgaagcggatgacgcggcacgctggcttgtgggagcacacaatctccgggcccacctgtcagccaccccccgggtttcgtgaaagtccgcgccatcaacgtcacccccacgccgaccgcacccgcctccggagaacaaatccgggcacgctgacaggtgggccctgctcgtgctcgggctccacatgtcatcgggatataaatatccgaaccgtctcatctcacctcggaagcaaagcccccgtaccggccgttcggatggttggttggcttgtggcgcggggccccgccgcgatccggtcgccgcctccaccaccacgccgcgtcaccggcggcggagcggcggagagctagccgcgcctctcgccggagcagcgcgaggcagggtggggggggggggaggctcgtggtggtggtatttgaggaggagccattggtgattgagcgccgcgtggtggtggagagggggaggtaggcggcgtatttaccccaccgggggtggccattaactctggccaccttggcatgcggataggcatcaccatgggatgcctctgacctctgcgcaggtattcgacgagatacctctgcaaatttttgcttgcgcctttgcctggattttgtggtggcctctgatctcccgtttgatgtggaattttttgcgtgttttcgcgtatgtggttcagggaggtggtggagtcggcgtgatggagagcggcgggaagcggcatttcttcccccttacgagcttgcaaatcgggtaagtctccttctgtgtgcgggggctctgttttgatctcgcggtggaaacgttcttttcattgcttttggtggaatgttccagtctcgtataatttgggtgctaatttgtgtggtccacaatgcaatgtagtcccgttgtgatataagtgaaaaaaacgagaagttacgagaaagttaactggataacttcgatgaacacggttgaagttagttacgcttgtttcccaaagggcagtggaaattgatcaaaactacaacagtcgtttattcgtttgtgttacttggtggaggaagttccagcatactgtttatgagaaaaagacaggaaagctcacttgtgggagtgggtagctgaattgtcttgtattgcttcattctagtagcatttattttgttacagaatactgtatatcttgatgagagatatgactaaagttagtaggagtagaaaggaaagctgttcttggaaatctttccaatttaaggtagtagatgtttccagtgtaaaggcacaggatcgatactatactggaacggttcaataattcagggtttgtcatttctccctacatattcatgcagagatgataaaacaaacttactataccatcacgttgttgtttgcaaaacaatctaggttttattcctaggtttagttgcctatcgtaggttgataattttgtgttttgtgcacattcatcataccttatcgactggaaatctggaattgtggctttactttacttctaggttcagtaggctgcaatacatgactccgtccgtacactggaggaaagaaaatgttaaatactgtgttcctgattaattttattttgatctgctattgtccacctggatcatatgatatcaaacagtgaacaatgtggcggttattttatcctttttctgtacatccattggactgcatttgttgtgcaaagtcgtatgaccttaagttgtattgcaattatcttaatttctgaggtgggcaattgtgttaagaattcttgcaaactgcaagttttgttttactcctcacagttttgcttgcatttactaacctcatgatcttaaagtgcaatgtaaatttggattttcatctatattacagttagttagtctgatataattattatatgcagggatttacaatcatatcttgctgaacttactatatttttgtgccctcatacgaagaagtttctcatattgcttgataaccggccatggctgcaagaccaggacacaaaacctgctcacctgtggcaattgatggtcacaaaggtatgctttactgttttacgagccacttgtaagcacacaaacgagtacttatgaatatttgttcattgcttacactttcatgtattgcccttgttacatcgattctggctcgtcttacttgttgacttcttgtcattttttgctccagtcaagactttcaccttttgcaaacactagaactaggagaaagggagatgaaactgggaagaaacttgtattctctaaagatcctagacatggttctcatttgtggaatccatcatccagatggtataccttaattgatgatgccatgcggaataaaaagcttcatgtgaataggctgaaggattctcgcctgctgaacaaggaactgcaccgaaccttatatggctttataatttttgaggtagactgggctgatgtgcgcggcatgaactatttcaatgaacttcaggtattgttttagactgaacatgatattcatagctattaatggatggtacatgcttattttgtttttatgttgttgtagactgatacttctatggcagtggaagctaaaacaatgaagagatgggaatttgagagtgtcaaccaagcttcatcattaatcacttcatggttttctggaaattactctgaatgccagctcctacaggattatttgaacagcatctctcctaaaggtaaaggcatgaatgtgctctccattcttctctgctgcatgtgcagaccacttatatgcttgctgtacaggaaatgtgttttatgacgctcagaattatttctcaacacctgaaggggacagtgagaatgtacagagtgatgatgacgattctggacctagtcaatgcatgagagagtcgtcaagttttacaagctcctcatacacaccacctccttgctctggaccttacaagagaagaaagataataagatctgatgctggaaataatatgtctgaagaatcatattctgaagttgtgacctcaccaacacattcatcatctccatcttcctcgtgctgcagtgatgatgattgtggcaagactctgctcgagcctagcacatataaggatgtgttgatcttattccggttcgatgaccacgatctccctttcagactaaaagaagtaatactttctgatgtgaggctgttaacattgctagagtatggccttccttcatgggtcatttttctccagtcatatccagtgttctgcaagacatatcgcccatggatgtgtcctcttgccagggcattgtatgtcttgatgtcaatagttactgttctcataggattttatgacctctacaagaatgtccccatgttgaaggcaactgcatcaagattgtttggccctttctttgactggatagagacgtgggaaatgatttcacgactgaagtatcttggaaccatgctttttctacataacttccagcaggcttttacatggtctcttaagattgtaactgctactaaatctgctctaagtgttttgacaaagccaatcatgggaccaattttggaggttcttgaatttaccctgccgctatggaacctttgtgctgaaacagtaggacatctgagctcagttatcatgttggcgatggagacttcatgcagtgtagttatcagtacaatgcagatgattatatggcctttttggctggtcttcagtgttgtgcttaatgttggtatgttttctgcaacctctgagacgatatgtctgctactctgctcttcaatttgtattgacctcactatgataaactttttgtgttgattctgatatctttctcttttgtattaacttcagcaaattcagtcctgtaccctttcgtttggcttcttggagaaattctagctgcacctttccggcttgttgttgcgatagcaagttttgtggcagactcttttgtggacattgttggagttctgagggagacctggtctacattgagttccttatatcaagttggttctgcatccggatcgaccggacttgcatctgaaactaccatctgggggtcactatggaaagatcttctgtaccaggtaacaaaaatatgttgatgcggccagtaattatattaggaaataggatatatggaacttactttgactttctttttcagattttccgtgcgattcgaagcattctgtatggttttgttgccttcttttcaacatgcaacaggcatcggcttaggtaaccttccttctcatccgtatgtggtagtattttcaaggtcacatgaacattaaatatgaaatcaggtatatacagaaaacatctcgtattgactgtcgaattagaattttacctgattaatgcctcatctaacatgtcattctgttgtgaacttcactggtactctggtagtgatttagtaacatggtcgagtggttcaaaataaataacaggattatatagtgtttcaaagtttacattatcacttcatgtgtgctgtgtgttaactactacttcatgctgcagcatttacaaccacattcaagtatttctccgacgcctatctcgtgttttaactggtgcacagcataccacctcttgtgaaggcacacggaggtattctagtcaaaatcatcctgtaagtccttacttttttaaaaaagttacagtctatcatgattttttttcatgaagtttaggggtaaaaatgacccttggaattgaaatcactagttcatataacagtctgttatgacaatctgagttatgcttcattgctgtttgtgcctatgcttttcccactaaaaaagtgcaaagtagtctttacaatcttggttgtttttcctagatgttaagctatgttgaactacgaaatgtctacagaatcaagtatgaaactatgattgcattttaacccacaagtggtgataactgtgaatatggctgcttttcttttcactgcacgaactgctgtaacttggattatcaaaatcatgcttatatcatcttttgcattccacatatattctacagagagtccaacatgaagtaacagttcaaaactaacttttctatattatagtttcaactaacttgtctatattatagtttcaactccttacataaacatgtctggtgtatgtacttctgtagcaaaggaaaactcacacgagataacagtgggcctggcaacttgacttgccaggtaacaacctcattcagggagcctatgcgcgggataaatagagatagccagtcgtgagctgaaaaaagtgtgaacaggaaacatttactaacacagaagcatacccggtcgactggacagaccttcaaaacaacttgcttggaattggaagagtcatgtacaggtttataccgaatgtttcatcacatagctttaatcatgtatcctatctgtaccagcgggcaagtagtgaaacaaaacgccgcaattgtacatacgcagaatctgttgtttgttcattctaatggcttgtatagcagcctagtaggtttgtgcatatcctcccgaaatgttcctctgaacaacaattttgtaattacatccgagtattagctaaatagctaagcatcaatttccataacacggttgtccaatcttttgtcttaactgtgtgtggtactcagtttcacattttaaaaacatcgttgataatcggtttcccatccagcatcacaaaggaatcgaaagtcaatactaatgggcctctacacagtaaattcagcatatatacgtttggtgggtcctcatatgtgtttgttgggtcctccagttttatcattccaaacttagatcaatcctcatcagttggaagggagagaataatctgatgtagcaagacgttttaaaaccgaattcttcagccagggtcacctttttatattcacctctctttcatcagatctcatctattcttcgccgttgtcatttcctgctgctgcacatggaggtggtgtagcatactagtagcatgcaattcaccctgccgcgtcaccaacggcacgtggggttggtgaaccggtccatgtgtgcaatagtgcaagatccaggcttgattccccatcctagccgaacggtgaaatggagcaaaaaaagaagataaggaaaacaaattgcagaaccagtgtcaccactgggggtgtgtttagtttactccaaaattagaaatttagttgaaattgaaacgatgtgacgtaaaagttaaaagtttatgtatgtaggaaagttttgatgtgatggaaaagttagaagtttgaagaaatagtttggaactaaacttggcctgagacggataatactaaggccgagtttagttccaaattttttcttctaaattccaacttttccattacattaaaacttttctatatacacaaacttctaacttttccattacatcattctaattttaaccaaactttcagttttaacgtgaaataaacgttactgccatttgtggccgtgaaattgttctgaactctgaaggtgggcactgaatcagcagcagtatcaatagtatcatatcggatgtatttgatgtcctcttccgtctgaatctattgactcttttgaagcgccgtgatctaaagtaggcagctcagagattactccctccgtctaaaaaaagacaaacactgggtttccgtgtctaaatttaactgttcgtcttatatgaaattttttatagttcgtatttttattgttgttagatgataaaacatgattaatattttatgcgtaacttatctttttaatttttttcataatttttttaaataagatggacggtcaaatgttgagcatgaaaaccagggtttgtcttttttttttagggcggagggagtatgtgatatgaatggtccatgagtgagctatagctcactggctcactgcaatcagtgtgaaaataaacgtttggttcacatgagcgcactctgtggtttcccagtcttggcctttggctgttgtcgccgcactactgtctactgctgcccgagctgcaggtgcagtacaaatccaagccccaatcatgaaccggttcatggtggtccagggatgacgtccagtgacgtagggtagccaagcatgttcatcattctgcccttcccggcctaatctttcgtgcgatgagtgaattccccagccacaccgacagaaatgcctctgggactcggatgcatgatgctccaagatccacatggctgacactgatcatagcgtgggagttcatcagatcaccatgctactctcgtctgcagcaatggccactcagtggttctcaagaggcagagagaaaaatattaatgctaatgataaaaaccttcgtgcaatgatgcaggatcccatgcatgcgcaggagcgataattctctatctgaaccagattaatcagcctgctttgaatgcaagcttctgccggtctggaatctactactgctattataggagagaagattgcagtgccacccttgccacatggtcgaagcgagaacgaagctgctagtagggaacatgaacacaactaacctgaaaattcttgacaaaaaataaaaaaactaacctgaaaatggtactagtgcagatccaaaggcctactactgcctctcctctcctttgcattatcgcgatggcacgatctcttatgtcaggtatcggaagcagaaaaatcctgtgtctttctgggtgtgttcagttgacgttaaaattgaaagtttgattgaaattgaaacaatgtgatgaaaaagttgaaagtttatgtgtgtaggaaagttttgatatgagggaaaaataaagagtttaaagaaaaggttgataactaaaccaggcctatgtctctaggacatttagcattgggccacgtttaagatgtggcaattaattatttgtcacttgctgtctatgatatatgggtccttatgtctctatgacatgtgggcccttatgcgtctatcacatatgggtctaggggcagattatttatcaccatccgtaagagtggcaaataattaattaatcctctgtctgttgggccacattcgggagcattggcactttggcagccagtgagtcaagcctgtgtgtttactactgtggccaccgacgagagagtgaggcagtgagacgggtggagacgagcggtggacgccgcgcgccgcggccggggagcaacgggcgttacggcgcacatggcgcgccccggtggaggacaagccggacgcagcagaggccgcttttccccccgttgcacagctgggatgtacgtcccctttaccaccagtcttcccccatcatttctcgccgcgcgggccctgatgcgttttcctgctggatttctatccgtttaccacttgatcgctcgctcgctcgatctgctctcctctgttcatcaccacgtccacttcatctgcaactgtgcctgcacgatcgaattggttgtttgccagaaactggctggctaatctaggggagaacgctacatgtgaagtgtggaacagctgagcgagcaagaacgacgaatcgacgacaccatgcgtgacagatgtactgaccgatctacgacgatcacggagaagaccgtgagtacacgccctgaggaattttcctaatcgtgtcgagctcaacaatagctgtgccgcagcacatctactgactactgttattactggtcttctcgtcttctgctgcaatgtgagctggggcaaacactgtagtttggacctagcgaggacatgctgcttccatccatcgagtagtagtagttgcagtatgtcttcgtctcgagcatgagcacgctagctcgactctacctactctaaccagcatgcgcggctgtccgttgttattagcggcttaaaaggcgtccaggcctttttccccactcgatccccatgtgtattcttgtccggacctcaaacataattaaccgaaggtgaagcttgaaaaaggctaacctgtcctcctgtccatttcttgcataatttacctctaaccatttcggctaccttcagatctagccatcaatcaatcaattaataagggcatttccaccccaataactagaatggtgttcatagcattaaataagttgctatctaggacaaaaaaataatatggcaagtgaataaaatgagaaaagagaaggaaaacatgtcttgcatgagacatggttcctacacaacatccaagacattatgtgagataagtagcattaaattaaagtatgaaatagtggtgtttgcattgtaagagtagtgtctagtattagtttcttgataatgtggagtttataaaaaccatatctagtgttatgggttgggactgtcctagctcatctaatcacagcaaacacggttacagctaattaatgaaccaacgtcaccaaagtaccaaaccgagctaaagcgttcaactgcagtgcaaatgtgcaaatgcaacggatgagttggtacactagtgctgtctcgcactggacactggtcatccgctccaaaaagatcctgtggtagctagtgtacctggctgcctttgtgtgcagtcatgcgttgctcgcctcatcgcctgtgtggccgagagactttactgaccaagcaattcaggtcggcagagtttgttacgtcctccaaggagaggaccatgcaattgcatgttgcgaaagcagaaaactggagagaccggggcacgctgtcggcgtcatgctacaagcgttcccttgcgtgtatgcatcgtccacctagtcacttggatgagagatttgaggggaacaaggctacaaaagtacaggtttgttatcgacaattatttggtctaagtgtagctgaaaacagtcgcgcgtatagcacgtttgattaatgctcagtcaccattttgtttcggtttacatgctaacaaaagtagggtatatcacgtcgttgaagtttacattttgtaacactcaatccagtagtccagtcaataaagaattttttttcattaaaaaggtgttttttttaacttattgtagtcacaggtggtgtttggatccagggacttaactttagtccatatatttagacactaatttagagtattaaatataaattacttacaaaactaattcaataaatgaaagctaatttgcgagacaaattttttatgtttaattaatccataattagagaatgtttactgtagcatcacatagactaatcatggattaattaggctcaatagattcgtctcgtgaattagtccaagattatggatggattttattaatagtctacgtttaatatttataattagtgttcaaacatccgatgtgatagggacttaaaaagtttagtcccatctaaacagggccacagtctatgtggagcatgttcaccgaacaccgataaatattgcaaagcccagaatgattttggtcccacatgccagaaactaccacacccacatttcggttcattttcagctcaggaaaatcgtccaacaatttcagctcaggaaattaaatcgtccgagaaaggaacaagtttggagccgttgggatgagagcaattaggtcacgcttaactacaagtacagtctcattcatcgacattgattagccagcaactaaccacttaaccccgagccagcccaagcgctccgtacgttcgttgggcccccgccgcgcaggcggagacaacggtcatccggcgcgccggtcgctctccctcgctcgcacggccgcaccacccacttcgccacgaacccgacgcgagcgcgacgtgcatctcccaacatccccgccatttcctccccacccaaaaccaacccgcccgcgtgcggctggcccactttacagcgcctcacctcccccaaccataaatccccgcccttttccccccctctccaccactcaccacgctctccactacacgactcgtcgccgtcttgctctgctgcctctcgcgcccgcgcagcagtgagcagcagcaagagcagcaaaatggctctacccgggcgcctccgcgccctcatcctcgccgtcgcattgccgctgctcttcctgtccgcttcaggtaacgagagatttggcaatgcaggtggtttagtggagagtagtgtggttgattgttgggttggtttggttacagaggcgggcacggtggggatcaactatgggagggtggcgaacgacctgcccaacccggcggcggtggtgcagctgatgaagcagcagggcatcgcgcaggtgaagctgtacgacaccgagccgaccgtgctgcgggcgctggccaacaccggcatcaaggtggtggtcgcgctgcccaacgagcagctgctcgccgcggcgtcgcgcccgtcgtacgcgctcgcctgggtgcgccgcaacgtcgcagcgtactacccggccacgcagatccagggcatcgccgtcgggaacgaggtgttcgcctcggccaagaacctcacggcgcagctcgtcccggcgatgaccaacgtgcacgccgcgctggcgaggctcagccttgacaagcccgtcaaggtgtcgtcccccatcgcgctcaccgcgctcgccggctcgtacccgccgtcggccggcgtgttccgggaggacctcgcccaggcggtcatgaagcccatgctcgacttcctcgcgcagaccggctcgtacctcatggtgaacgcgtacccgttcttcgcgtactctggcaatgccgacgtcatctccctcgactacgcgctgttccgccccaacgccggcgtgctcgactccgggagcggcctcaagtactacagcctcctcgacgcccagctcgacgccgtgttcaccgcggtgagcaagcttgggaactacaatgccgtgcgcgtcgtggtgtcggagaccgggtggccgtccaagggtgacgccaaggagaccggcgccgcggcggccaacgccgcggcctacaacggcaacctggtgcgccgcgtcctctccggcaacgccggaacgccgcgccgccccgacgccgacatggacgtgtacctcttcgctctcttcaacgagaaccagaagcccggaccgacctccgagcgcaactacggcgtgttctacccgaaccagcagaaggtctacgacgtcgagttcgtcctcggcggcaactccgctggcggcggcggcagcagcggcaaggacaacggcgggctcggctggcaggacaacggcggggtaaacgccggcaatgcgccggccggcgcaggcggcggcgtgaaggcgacgtcgaccggtgaggcgtggtgcgtggcgaacgccatggccggggaggagcggctgcagaaggcgctggactacgcgtgcgggccgggcggcgcggactgcaaggccatccagcccggcgcggcgtgcttcgagccgaacaccatggtcgcccacgcctcctacgccttcaacgactactaccagcgaaagggccgcaccattggcacctgcgacttcgccggcgccgcctacgtcgtcaaccaagcgccaagtgagtagtcttcgcgctcgtttgctcgtacaattacctcattgcattcgtactacttctacatgattccttgcgtttcgtagcgaaatgtacgtgttatacgaacgggtgtagggcttggtacacgctagtacacgttacacaacctggattgggccatcgtgttccggtaaaagtttgcgtaggaactactactacttgtacatggtgattcacagatgggtgggtcacagtacgggtgcaaatgaaaggcgctttgcatcggcatcgtacgggaatgattctcgcttcactgtagtcttcgcagccacacactggcatgtgccacacgattcacacccatggcttcctgcctgggttaaacacaccttggaaagacgcagccggcggttgcaacttgcaaaattgcgactgcaagcagccgctactgtgtctctgtgaccaacaaatcttcactgcggttttgaggtctcgttgcattggattcgagctgtaggtgttctgcttcttctgcattgcactgcggtagttaatgagtggctcagcaagttgtaaacccgcacaagtgcaattatgactgcgatgagatggggtcagcgtggctcgcagctcgacgtgatatgactcgtcctgtattctttactcccttcattcatggtgatgcgtgccgtggctggatgtcgcaggctcgcaacgtgtgactgattgccactatcgtgtcgtgtaccttttgcagttcgtactcctactacctgcatcaatttttttacagtattcctccacttgttattccctcggttaccgccagtatacgcgtctcctcctttggaccagcactacaattggtctcttgttcacatgatagcagcgatttaccagttttttaatcgcgtaataccaccctgttgtatgattctttctttttgaaccgtgatcttactgggtgattgtctattccattgtttgcagagatgggcaagtgtgagctcccgtcgacggtctgaaccgaagcaacagtagcgaaagactgaagaagagcagcggcagcagccatctcgggatgcgaggatttatgaaagaaaatcgaacgccggacagaggaaggagggaaaagaggcagagatgttggaatctttgcttttcttttccagttttcctccctttctttacctgtggtgctgtgcccgctgcttgactcctgctgcatgtttgctgcggcgtagaaacagattactgtagtagctgtacctctttctttttgcagctttggctaatggtgggggatatctttgtttagtccatgtaactacgctggagtatggagtattactatatgattaacctaaatcactactattatagactgatttgtactagccattggttggccatgtgagtgacccactatggcttgtctcgagggccttgttgcctggtttgactcttcctcctccatcgtctggtggatttataccggaaatggtgctttgctttgaagccaattcgaccggcattagagtttcaaacccatgatagcgttgtgccctcgtctcgtctcgtgctttgcaattgtttcgctttcaggctacgcttttgtgaacgtccgtgagtttgttaaaaatcagttagtagtaggttggtttgaaatccgtcgttgggatttctgcgtacttctcctttacaaggagaaatttcgtgccaaactgctctggaaagatccacatagtaacgtccctttttacagtagtatttcctgatcaggcccactcacaaagttgacaggccgttgatcccaacttctcacgacaatcaccagatcaccactagtgtttgtgaccagctaatctaaaatgtcgcgttgacacgcacttgcgacgtacgacgctgatctaactagaaaaggctcgcgttgccaccggctccccacccgaccacggcacacgttgtctcgaggcctttcggcaaccagccaaccacgcgacgtaccggccggggttgtgggcgtcgtgatgtcgtgcacggccacggctgcggcctccgggagtccggatcacatggagcttcgccttcgcgggacgtggcctcccttcggtacaaaaccgatctctgcctcgcctggctgcctcccccgcgacccgcgtgcgcgcgcatgtgagggaagctgccaagcggagccggcaggcgaggttgagctggaccaccgaatggaggaggagacgggagaatatcgggggtttcatcggtggttccccgtgaaaatccgtgccccgccggctggagggccacacgctgatatgcatgcagaggatacagttttttgtgactcgtactcccgtggtggattcgttttgtacctttggttcgttgtctcgtagcatcgcgtaggcggtacaaatcgtctttagcgaggcccggagcttaacatgctcggccgaaagagggcccgtttagttatcaattttttttccaaaaacatcacatcgatctttgaacacatgcatgaagcataaatctatctattatattattaaaacagctcgaaaagaagccaccacgttcgctgtggaagctaaaaattcctacattaatcgaagaaaaagaaaagaagagtccaaatagaaatacaaactaaaaaataactgaaattcggaattaaaaataagcaatactgaaataggagtccatataagaacccaatacgagattaattaaaacctttggtaattctagattttaactgtttacagtagaaaagataagtctatagatctgtactacgttacatactaggagtctttgtccttttctatttctttggcggtgtacacaatacacgtataatctaattcaattacaaacctatacggagaagagttgtgctgccaaataaacaaagcttgcactgctgcacctatatattctgtagatttcaagcatcaacgattgggctggagcggcagaacccaatgatagcgggagccaaccatagtaaaaagacatgatatttacatagacattacaacaaacagatcaatacttgcagccggcaatgcatcaaacaccaaaagtttctttgatgtttatgaaagtacaaatgatatcaacatattgtaattagtgtatatttttcacaggagatgagttagtgcaagccgctataaactgacagtcagattaaacgtttagattatagtggattcataatttaacgttcataatttaacggttgagatataacacctatatataaatataggaattagagttgtagtgctaatacaggtgtacaaagcgccttgctcgatggaataatcgagatccaattctaaaactgttatctaaacctatttgattccagtggaaaaaaaaagcaaaacaggaactaggtaggcagaaagccgtgtatatacgtgtgcacatgtaagtattattttttcagtctaatcacttcaaaactatttagaacatactgtgatatatttgttgccagtaaaaatgaagcgactgcctctttatctattcgatcctttttaatcaccaaatatacaaccagcaattcagatgttttataagtaactaattttgaaataataataataatgaagactatgaaaagaaaaaaccatctacaacacaacatgtgattaattaattttttttaaaaattatgaaattagaaaaataaaaacaaaagtttaagaaagaatacgatttatgaataacaaaagttcaaaacaaaaaaaaaagtattaaaagaacaacccgtaacacaacaatggtaaataacaataaagagggagggataacgggtgagccgtaaataaataaatagggtgtagcggttgatgggacattttaaaacaataaaaatataaatgacgattagattcaattttaaaaatctcaatgacgattaagagaaacagcagcgggcaagccatcaaggagcgcagtcgtgacgtttgaatggacttctaaaaagaaaaaaaaacaacgataatcataatatcatatttgactttttaaattccaatgacaactaagaggagacatcgggtggattgtagaacagtacaatgatgacatttgatgtaacttctaaaaatataaatatgtcaatcgacaagacaatgaattaaaaaactataagatctaaatatgaaagtttcaaagaggatgaataaaagttatgacaggtcgggcaatcaaataaatgagaggtaaaaaagtaaggggtgacgacttattgacttttaaaaactaacccgatgataataagattcaatcttttaagatcggctagatggctatttaacaaatttaaataaaaccatgcttaaaaatatataatcctggatgggtgctagccgcgcaacaaataaaggggttacaaaggagtaagggtagcaacaggtgtgacttttaaaaattataaaattataaacccggggatgataatgttcgatctttgaaagtcataaaacaacgagatagatatttaataaattttaagtagaatcatgtgaaaaattagataattttgtgggtgctagccgcgcaattgcgcgggccacccagctagttatataattaaaggaatagaaaaaggagcctccacgttcgctctcgtggcctagaaattctcacattaatcggagaaaaggaaaaggcatagtacatatagaaatacaatttagaaatagctgaaattcggaattaaaaaataaggaatactagaagaggagactagagtccatatagaaatacaatttagaaatagctgaaattcggaattaaaaaataagaaatattagaagaggagactagagtccatatagaaatacaattaagaaatagttaaaatttggaattaaaaaataagaaatattagaagaggagactagagtccatatagaaatacaattaagaaatagttgaaatttggaattaaaaaataaggaatgttagaagaggagactagagtctatataaaaatataattaggaaataattgaaattcggaattaaaaataaggaatattagaggtagagtatggagtccatatagaaatacaattagaaaataaccgaaattcagaattaaaaataagaaatattagaagtagactatagagtccatatagaaatacaattaagaaaaaaaatagaaatttggaattaaaaaataaggaatattagaagtagagtatagagttcatattggaatttaaatccaactaaaattcagaataaaaaggagcctccatgttcgctctcatggcctagaaattctcacattaatcagagaacaagaaaaagcagagtccatataaaaatacaatctagaaatagctgaaattcagaattaaaaaataaggaatattagaagaggagactagagtagttattacacattagtagttttgaaaagttattgcaaaatttaaaattatgttgtcattgtaatatattttaataatataatgagaaaacatatgtgctattatatgagagaaaatataatgatgctagccgcacaatctgcgcgggcccccatgctagtatagataaaaagaaaaattaattgcacagttatgggggaaatcgcgagatgaatcttttaagcctaattagttcatgattagccataagtgctactgtaacctacatgtgctaatgacggcttaattagtctcaaaaaattcgtctcgcggtttccaggtgagttctgaaattagttttttcattcgtgtccaaaaaccccttccgatattcgatcaaacgttcgatgtgacagccaagaatttcattttccccaactaaacacacccagaaaagcacagatgtgtcgacgagacattatacaacaaggcccatctaaggcgacagcggaagtagcataaaacaacattagcacaaggcccatctaacgtggtagccattgaagcacagaacaatacgattagagcgcccgttacacacacttgagtacttgacgcgatacttacatccccaggttacgtacacacactagtagtagtctagtacgtaaaaacattacgcagaaaaacacgggacggcatgtacagcaccacgtacactaccgtacacatcccatatatctggatcatggcacgcgcagccgtagctagtgaagtctgatccttatcaagcggtggcgatgggcgccgcgtggacgacctcggcggcggacttcatggcctcgaagcgtggctccttggcctcgaacttgtggcgcacgtacaggttcatgtagtcctcgaacacgaacctcgggtaggcggccgccgccgcgtcggcggcggcgagcgcgggcgccgggaagatgacggcgtcggcgccggggttgtagaaggaggcgatggacatgcggttgccgtcggggcgcgtgaggacgcggtgcatgacgctcttgtacctgccgttggtgatcacctccagctggtcgccgatgttggcgacgatggcgtggcgcatgggcggcacgtccacccactccccgtccttgagcagctggaggccgctcacctggtcgtcctggaacagcaggatgatgccaccggcgtcggtgtgggcgcggaggccgtcgacgagatcggggcgcgggcacggcgggtagctgctcaccttggtgccgaacgttgggccgttcgacccggcgaaggccttcttcaggtaacccttctccaggcccagattctcgcacagcaggtccagcaccctctccgagagcttctcgatctccgacgcaaattgcttcatcacctgcctacacaaacgcgacacatgggcttctgttaggcctcgcgaatattcacaagtcacttgccatttgccaaaagcgaatccagttagtgtgagttctgattgattgatagttactgcacgttgtatgatgtatactcctctccgggggaaaacagaaaaaaaatggtgtattcctacacttgttactatctcatagtaggaaagggtgcagagatgcgccactacgtccgttcaagagtaatcgacgctgtggataagccgcagtaaaaaagtaagcatctccttttggtcgataatcctgtcacctttggttgcagtagctgtttacagaagtgggcatttctatagtagagcgcgtcgtgtcaggtgtaactttgttgaggttttggtcaggcctacactctacagtagctaggatactttgtaagcctttgctttgtgagtgtactacttccgattaaaatactgacgatcatttaggcgagtttgcaacttaagcttttctttcagaagcatgcagataaattaacaaagactaaattgagtttgttaatgatgattgatgatgacgcatgcatgcagggtaagtatacctgtagtggtcgtcgacgtcggggaggtcggcgaggttggagacggggcggtggcggacgaagaaggtgctctcccagtcgatgcccttcacgtcggcgcccttctcgccggcctccagcatccgccgcgcgaactccttgaacttctcctcccggcagttggcgtagtgcgccttgctcacccgctccacctcgtccatcagctcgtgcgcgatgccatggttcagcatctgcattcacacatgttaatttcgacatgcaaagttaatactttgacaagcatgacaaatcaaagctaattagtaggcgttctagccggcgagcctactgagatgataagattgaattggtgggtcgactgactaagatggagaataagaatatgtttccatcctttcggccagaaagaacgatgtacgtataggtggctcgatgaacaaaaaaaaatcgaaacatatcaataagttgtgcggccacttaggaattagctagaatcatattaacatttttttgctggttagtacatgctagtgcttggcatgcatatgcacctcgaagaagccccagttctcgcaggcgtcgcggatgacctccattgctgcgcccctctcctcggtctccaggttctccatgttgatcaccgggaaggaggcaacactcgccatctctgtctctctctctcgttcactcgctcgctcgcttaagctgagtgtgtgagtgcgtctgtgtgtctgtgtgtgcactctgaggccggcggcgagcgcccaatttataggcgcgagagcgagaagctagcttgcacagttatctttttcactaggctgactgcctgacccccaggacgtggtgtgcggtatgccttacttcctacatctcaaaataagtgcagccatggttttccgcatctaactttaaccgttcgtcttatttgaaaatttttttaaaaaaattaaaaacataagtcacgagtaaagtactattcatgttttatcatctcataacaacaaaaatactaattataaaaaagtttcaaataagacggacgatcaaagttggacgcggaaacttatggctacacttattatggcacggaggtagtacgagtttacgacaaagtttagtgatttggtccaacggagagtaaagtagtgtggacgtaagcaagctaagctaagctaagctgctaatctgattatctgatctgatcacactgtgtcctgtgcacgccgcaggttgagttcatgccggttacccgacacagtcacaaaaaggttctccacaagatttgctcttactcctaattaatgtctaatgcctttgtgatgtagtagtactatagtgtaatactataatggtagtggtggttactattctatatacctaacctaagtgatcaactctattaagtagagaactacagatcgataagagactgttccttgctttttggatttgatgatgacagaattttgggcatagtacacctggcccagacctgatcaatttgatttgtcaaatgtagacttcacatggctaggtcctatggacacatatcaggttttttaaaaagggtgtggcaatttattatattaaagaagatataacattttaagaaaaaaaatatcaaaccatacattatgcaaaaaaaacatacagtgcttagtttgttaggaaaaaaccgtacattgtgtccggccaataccacctctataaccacctactaaaccgaacaagccaacctcctctaaaggcttccctgcttcacgttgattagtccacgttcaaaacaaaccgaccaacctcatcctatcaaatcagctctctaggcaccaaccgatgcccacatggagcaagagtgtcgtctgtgatggctcgctcttgccgtcagtgtttatggatcgagaaaatatgaattgaattcatagaagaaaaatatctgtattaggcagagagagaaagaaaaagaatgtgagaggagaggagagggcaggcatcggaagtgggtgggtgacgttgccgatggtggcaaggtggtgagctaggaaggtggttcagacctggtggagtcgcctcctggattgctcatgtacatattgtactatgtatttacaagccgtcgctcatcgtcgttgtcaacctgtgcagtagcagctcgacgacggccacctcgacccgtccgcagtggtggcccgacgaaggccgcctcgatccacatctgcctcaacctccttgtcgtgtcgatctggtcgacgttgtccgattcgaggctccaccgaggagaggaccgccggatggggggagaggtgaggccgccagccatcggaggagagaagaggaagaggagctcaagctcgaggccgccggatggggagaggcaggaccgccgactgtgggaggagaggagatgtggagccccggcgaagtgtgggcgaggtgggaggcgaccggatagggtttggataagcatatctatgtggctgtttttcgaaaaaaaaaaattcgtattttttatgtttacagcgctacccctaaaagcgaaattttctcatcttagcgttgtacttgtctgaaacacgaagggttttccgtaagaaacacaacagcatgtttgcgatacgtgaattacaaataaactggaggacatttttgccgattcccactcgaggagtcctgtatactagaaaaacatgtgtcgcctaaagagaagagcaaaaaaaatattgaaaaaacagagaaaaacggagccctacgaactgctaatatctatagatgtaccaactgataccatgaggttgcatgagatttaacaccaaacaggcacacgctttcttgttgattatttgataccaaattattttttggttatccagtgtatttttttcttaaactaattgatatcttccagtaaaattcagttgaaaactcttgaggcttaaacagatctcatttcagtcagtacacaagcattacatgatgcttaattacttgcatcaatggaaccaattactcttttttgctgttgctggactggaccccgagaccccagtcccaacgattggttgattgtcctgtcgttcctgttcatctctgatcatgtcccttcttcctcatctctgctttctccatcatgtaggggccggaagaactcctatatccacccatcgctgcgatctccacttgacttttctggacccatctcattgcctcgctggtgtacatgcatcaatgcatgcatggtgacggtgcgcactgatcggccggcgcccgttcaacttgtcgcgccgcaaggaccaatatgtctcctgcccggccgtgagtgcgctctgctttccttggtcgcgccggttttggggatcgcccgaacaaacgtgccctggcctatactgggctcaccggcactccggtaggttcagtgcattcgtccggaaaagaaaaataaaaacgtgtacatacaaaaagttgtcctcaaaatatagttagtgtttattccctagaaatatagaaaccggttctgatgaaccctaattagttattttccgtaagcacttctacgatatgaatgaatgataatgtcactatttgtttatatggcaaaaactgttgttggccgaagcactcccttcgtcatttctgtttcctactgacgatctccggaccaactgctagcgtatgttctttttctttttcaaaccgtcccactaatcaaaatgtacttagctaatttgatgtatatatatcaccatcctcgtcattagcggcaaaaccaccgtacggacaggttggacggtcgccgagcttcgtcacttcgatttcaatgacgactaacgttgatatcttaaagaagtggtcgaccactataacgccggccctggtttgacaatgccgtcgactctctcactgctcatcatggtttattgggcatacatcttactagattatttggacctgttttaatttcatatttagagggtacaatatccgggccatttctatattcaaggttttaggaaaatcaaccatagtactttagagtttagagtgacggtagtctgtttctaaaaaaaaaagaaagaaaaataaggtgcaagtggtgatgtctaagtggttcaatcattcttgacgtatgacatagggaatgtttggtcggatatgtagaaatctttttcattatcacagtagatcttcaaaaaaagaagactttgtatcgactaaagtatatacttcgactttcatgcgctagaactttagctcgtaaacataaaagtacggtacgagcttttaagcaatggttgggttcggtattttaagaagtttgggatacaatgataaatgtagcggcaatattataggggttttgccgttgtgctgcagtggggagctcatggaacagtatcttttgcaacagtctcgggagaatgatcagtgtagaactgtagatgtgcaagttgccaaatatactcgaattgtgcccgaccgacacaataatagagggcagaataatattcagaacaagtctcctgcatactttggggttttgatctttcacaaattaattttttcataacataaatacgtactaccttataggaaacctcaaaatattctagcttagcagctgtcatacagagacatatctagagtatagttaggggtgttaactttagtcccagccacatcggatatttagatactaatttagagtattaaacatagactatttataaaacaaattacataaataagagctaattcgcgtgacatattttttaagcctaattaatccataattagcacatgtttattgtagcatcacatgggttaattatgaattaattaggctcaataggtttatctcacaaattagtccagggttatggaatgtgttttatcaatagtctacgttcaatacttctaattattgtctaaacattcgatgtgacaggggctaaaaattttatcccatccaaacccctcctaagcagagatcttaaacctcagttaattttatactatctgggggcaaatgactaccttacaatttttacttttttaatctttctacgtggtagtagatattttgctcctactcatgctacggattgagatcctctgagttactgacatgtgggccttctttgctatggacccacatgttagtgactgttaagtcacttgacttaagtagaggatctcaatcgagctacttcttaccttcatccttgttgtcatggcttttaatcgtactagtaggttacgcgtctaggagtaccatgtattatgtactactaacatacttcttcttttcatattataagatgctttaacttttttttcctaaattaaatttatctaagtttaactaagtttatatgaaaaaatttcaaaccataccaatatactattaaactatatttaatgttagatttaatgtgactaatttagtgttgtagaagttgctatatattttcataaaaaaattggaataatatattttcataaattcgacccaatctattcaaatttaactaataaaattaaagcatcttgtaatataaacggaggacatgatatagggcatgtttagtttgcgaaatgaaaatttttgggtgtcacattggatgtttgaccgaatgtcggaaggggttttcggacacaaatgaaaaaactaatttcataactcgcatggaaaccgcgagacgaatcttttgagcctaattaatccgtcattagcacatatgggttactgtagcacttatggctaatcatggactaattaggctcagaagattcgtctcgcgatttcccccttaactgtgtaactagtttctcttttaatctatatttaatgctctatacatacatccaaaaaattcgatgtgatatttttgggaaaaatttttggggaactaaacagagcagaaagggatcctctgacttaactgctgtgcagttgagtcacagttaagtcagaggatctgcttccaaacggggccataatatgaaacggaggaactatagtatttgggaccccggctggccaaggcagtaatcataagagcaccgtcacgtcgcgctccgccacgacagtacgacggatcacctgtgcagcggccctacgaaatgaacgggagctaattagctagctaggcacgggtgatgggtcgccggcctccatcgcaatcgcgacggggtcgcgtgaccggcggcccccgtgaagacgacgtgggcgcgcgcgcgcgcgcgtccgtctcgcgtgcaccagctagcagctgcgcgcgaccaagatcgggttacaacagtcgaccagaaactggtggacgacaactcggcaactggcttgcatgcgccgttgcgtcggcgtctgcgtccaaaagagaaatcgctgtaggatgatttgtatatatataaacgagttgtagctagatgatatgatccataagttgccattggtgattggtcacactcttccggaatatgatatatcattatatttactgtcacgaagagtacgtacgtaccaccgaactctatcacatccactttctgaactacaaaacggcgtagttttttttttaaaaaaaaatctatgcatgaatattttgtaatactattttaaatatgtttttaactttataataagttaatggagaggtatacctatagccctaccaaacggtctgagcttcaccttaaaaacagaaagttgagctagttcccgctctacaattctacttaagattttaaaaatggagatgagattaggctgctccacaattctacttaagttttaaaaattatggtcacttttattatcccttggatgatagacaatgtttctcataactattatatcacttatcgctttccaatgattcaacaataaattatgataacatacaaaaaaaattgtaaaattatatgtaataagcttatatatggttaaaataaacagaaacttacaaattttaagacctcgatatctaggagaacctctatgttttaggcggaacactagtagtcctttgggtgggacgttgcgaaacccataggggctagttttcttttaaatttcactatggttgtgttctcttaagtcctggatcaccgaacagatttagatttcttataattattcgaggatagaaatgaatgaattaactagaaagtatctacatactatatttaaggtaattatttttttataagaaaacagtcattttttcctgatagcaattaatttaatggttttcatatctctcactattccttatccaaaataaagttgccgcattcttagctaggtaaaaggatgacaacggattactctaagctacacataaagtaaatttaccatccataattattttataaaattagatgcaaaaatattcagacttataaaaaaaggtaaaccatatataataagaaaaacaatgaaattgcagttaaaatgaactaaaacaacatattgcacatattataactctagacatagcaatatataaattttacgtgactaagatctatcaattcccttttgttacatcaggaaaacatatatatatagttagtacccactaattcgtaaagctcaacataaagtatgctacatcatcatccactagcaattattatctacagtattttagatctcatacaaacatgatatatcatttgtaatttagttttatttttagaacttagcatgcaagcaatataaaattaccatcttcacattatttaaacatatacacctatcatttttataatgtataacatacattcatccacatatcccgcagcaaagcgcggggtatcaactagtatcaaggaaaaggtggaccataggattattcgcgcgtacacccatccaagtaacagtgtttggctttgcaaagccaccggccggcaaaaagatcacaggcatgcatggcttctgttattgatatttgtccgagtgtctggaatctaattctaggtgtgtttagttcacgttaaaattggaagtttggttgaaattggaacgatgtgatggagaagttaaaagtttatgtgtaaaaaagttttgatgtgatggaaaagttggaagtttaaagaaaaaatttagatctaaactcggcctctatgtacgcgcacgaagtgcagtaaaaaaaacacatagctagtggctatggagattttattccgttatacccgctatatatgatatggagaattgcgcaagtcaagattcagagaattacgaagtgcaccaaaatgcttcaacgaagcggcagacattgaaaacgttctcaagctgcagtcactgaaaactcagaatatataattgcgagagtgcgagactttcatgcaatggacaagatcaagaacggggtgcctggatatataccgatcatcgttcgctgtagcctatccagatgccgtgtgatcgtgccaagacgtttctctgctttcgcaactttcaaacttcagtaccggcctagatttcgatcttgcatatagccatgcaactccagtgcgaaaaacaaaaagggagatctaattgcgacgccggaaagatcctctcccatcgaggccacggcaccgagagcgtttgcaagatcgcgggtgaaagagatggagatcgatcggtgacgcgcgacgcgccgtccatccccgctgactgaccagtcggccgatcgctcgcgccgctgcgcttcgtcatcctgtcgctgctgtgaaacagagacgacctgaagctacgtgccgtcgccattaattccacgatagcgatacgactacgaggcggcgaaagacccagcaaaattttacactccggtagctgaatcctcagcaaaattccacgatagctgaacacgtttggccggaatcaccattcaccagtaggcagtaattaactagctagagtaccaattttttggaagcatgagccgacctccattgctccacgcgtgggacgctcgaaacactgctgctttccagctcgcacgctgcggtgttgcgtgcatttcatggcgtatcagcgtggtgtatagcctagggaatctggggatgttaacgtcaccggacgagccgtagaaacgagatctgtttttgtttggtgcgttgtcggcaatgcgtagctgatggaatgttggattaaagtaaagtctctcaccttacatggactctgcttgttcaagtggacctccctgttagctgcatactagtgttgttttttcatcttattatactttgtctcatcaaaattggtcagtgtcaacaagtggacagttaatgacatttgcatatatactagagttctatgtttatcactagtgtgtagagactatagtagcccataaactaatcaaggacttctttcagagaccaagtcagaatttagactctcgtttcaaagaaatatttcaaataaatttcacaaaacaacatatatatttgaactaaattattacaaaatggaagatttaagacggtagatcacaattataaatttactagtaaagttatcactaaaactacaaatttcagacggagtatcacaaaactataaatttaatgaaaaagttgtcataaacctatatattctagaattcagatccatagaactattggattttagttacaaaagatatagtttgtgatgaaacttgatgtttaatcgatacaataccttaaacacatagtttcatgataaattaggtttgaatttatagtttttttatatatctttttaaaattttaataaactagcatggtggcccgcacagattgtgtggctagcatcattatatttttctctcatataatagtatatatatttttctaatttattgttaaaatatattaaaatgataatataattttaagagtatagtgtaccagcggttcttaaacttgtaggggtgtgtcatctaggtctttaaaatctcaaaatgcatatccaaatcccaaaatttgtcatagtgtgtcatctaggtcccaaatcgtcacaacctcttcaggatcctacgtggcgttgatgtggcatcattttaattgacaaataggacccatttaaaattgttcctttttatttttttttcttctcttttttccctttcttctcctttctctctgacccacgcggacgaacggatacctagaggattgagctgggaaccaagtacaaagggaatggtacacggaagggatgaatgcctggatgacacgtcacgtccatgtggcatgccacattagtgccacgtagatcctataggggatgtgtcgatttgggacctagatgatatactttgacaagttctggaatctggatatgcattttgagagtttaaggacctatatgacacaaccctacaagtttaagtaccgccaatgcactttactctaattttaaattttgtactaactttaccaaattaccagtttgtaatattcatattgtattgtatatatgtgatagttattaatttttttaatatcaaattttagttatttctaaattatattcttatatggactctagagtcgtcttctaatattcattttttaattccgaattttcgttatttgtaaattgtatttctatatagactctaggctcttcttccaatattatttattttcaattctaaattttgaaaatttctttattgtatttatatgtggactctaaaatcatctttcaatattctttatttttatattttgaatttcagttacttctaaattgtatatctgtatggactttagattcttcttcctatttttaaaattttgaattttagttatttgtaaattatatttctatatggactccaaactctacttttaattttattatttttattccgaattttagctaattctaaattcctatatggactctatactatttttctaatattaaattcctatatggactctatgctatttttctaatttcagctatttaatatttaatcgatacaataccttaaacacatgttttcatgataaatttggtttaaatttatagttttgtaatatatcttttaaaattttaactgaattttgatctaagtatcagttgtttgtgaaattaatcaaacatttcagacccaggcaatgcagtcaatctgcctccaaaaacatgaattgcttttatttttacagccagccagatggtccacagacttgaaaacacatcgtaccttcagttgcagggcttgccggctatgaaagtagtactatgaaataagcacgtgagatacttgggattgtgatctcgggacatgctttcgtctagctgcttttccgaaaaaaaaaaattttgcccaacacgggaatctcaatctaatccgtcctgcagccaatgtttttccagatcacacacgacacgaccttaattagccaacgttggtagacgcgaattttccttcctctttccgaagcaaagcgctttacaaaagctacgaaatactgcgattccatcgggataaaattgttctctttcatgaacatgttgggcagcttcatctatgcagttcgagtgagaattggatgttgccacttgttacttgttagtgcacgaatatatttgcatatgtgctcctagctgttaacctctaatgcggaattccagacaggaagaaagattgctgctcgatgaagacatgcaaactttcgatcggaatcaggttaactatactatcacgaagaaagtctagcatctgttctgttgcttgccaatctgtatttaaggtgacagggacgagggctaagcacttgagacctcatatctttaccactttagccacacaatttcttcagcatttcctgcatatctgcatcctttctctaccactgacgaactaattaagcaaattagaagccagaatctgaactctgtcgtgtcaactgcaacatcacaaaagaaaagtaactaatactattccatttcatcgtaacattagttgtttttgacttctttttctaatcaaatctttttatgtttaattatgtttatattaaatatatttaatattatgcttgtctcgtgttagaattgttgttatattttctataaactttatcaaacttagataagtttgactagggcaaaagttaaaacgatttatgataaaaacaaaagcagcagtagctactgcaccagtacacacaactaggcgtaggaaggtggccaatcttattgtcctatccttgcacgaaccagcctaacttgcgatatctgaactgggcagatcgaaaatattcgatgtttcatccggttctccgggaaagctggaaaaaggacgaaaggaggagtgaacgataagggatagatagcgaatctgcggcccatgcggctgtttacgtgcagtaggcccgagccatcgcgtatccggggcatatgggcatggctcgcctgatccaaatatccagtgaatgatggatgaaattatatgcattatgggctctgcaaacgaaaccatagccatagcgatacatatttctgatgagttattccaaaagaatcaagatggtgcttaattaatttcaaatgtccttgcatggtaacatacactagggcagaactggcatccactagcttaggcactttgatacgaagtagagtatatcgtacagtacatataatgatatactccatataaactggccagtggcaggctcaggccgatgaggagaatgtcgacatggtactattcccaggagtacttcccatacttttgtgtgtgcatgcgaagtgaaagaaaagatcaatccgcactttgctctcctatcatagaaagcccatatggctttcactagtcacgcacgctcgcttcctgcaaatagcagccgcatgcgtatatagtactagctgccattggcaaagtccaccaccggtgcactatcgcgctgtctactcctgtgtcgtgacgacgaggagaccctaccactgattcacgagtagaggagagtgtggtaaattattggcctcgctcgccggcatccccgtggcgtttcgcgaagcggcggacttggctctttggctggcaccctgaacagataagcggataacgcgacgggactcttgatagttgatacggagtacgtcacgtctcgatcgatcgatcgatcgatcggtcgattccccggtgtactgttgttgcaaacagctgtgcttgtgcggtacagatcggagacgagacggcacgtcgtagcaggccggaacacactagttagccgagaccgcgacgtgattggacttggacacgatcgacgcgaacgcacgcacgccgcgctcgcccggggagtgcacggcagacgggctgagcaccacgcacgcacgaacgcacgcagcggcgtcgacgagaacacgagattcacccggccgcgctcgtgaagggccgagccaacggacgacgtcccctgactaccaggccgcaccgctgcacgggccgctgctgtttccgcgtttcggttttgcagggaataagttcacttttggtctctctatttgtcgtccagtctgattttcgtccctgaaccacaaaaccgggtacaacccgtcccccaacttacgaaagaggtccctcagcgattttgatagcggttttggttgacgtggcgcttacgtggctcatttgactcagtctttatctgacatggtactgacgtggcgcttacgtggcaatttgatctggaaaacaaactcgtgggacccacatatcagttgcacatacaaaataataaaaataatgatgggccccatatgtcaccctatttctcccctcttactgtatctgttatctctatcctctctctcagtccctggtgggagaggaccacgtgaggtccgccgtgccaaggctcgggaaggccgaaggctgacggcgctcaggaggcggacctcgccgtcgacgccgccgcatgctccgtgcactgccacgcctacgccggggatggtcgccgccggcagcaaggagctcctccgcaacgaggactgattcaccacggaggacgccgtggccatggacttccccaacatcgtcgccctcgctgagacgccgacggccaggacatcgccgccgccgccgctgccgaccacctcaaggccatctgagcgagctagctgctctcctcaaggccatccgtgcagcgccggcgtgccgcccagagatccttggcgtcgaggcggctgcagcggagacggcttcccgctcccgctgccgccgcggctccttgtggtgctcggtggcgtacgcttgcgggtgaaggtggcagagcagcaccccggacgtgtccgcctccaccctggccgacagctgcctcaaccgcgactccacccagccctgtgagctttggcccagagaaacaacaaaacacacgcgaggtcacacacgcacgaaggaatacacaagtgatgcaaatacttcaggggacaaacacgagcttgcggcgaactagctacacttccactcttatttctcagactcagtgatttgttagtcaagctacaacacatgcagttaccgatcattaagactaagcagtacttaactaatcaccacccacatggcgccggccttgacgatctcctggcagacgtcgtcgccgacggcgagctgctcggtggtgacgcgcagggtggcgtctgaggccgagctcgccgtcgtcgtgctcgatggcgcgcagcatcaccgggctgggccacttctaccgcgcaaagacgcggaagaagcgcgggagcagcatgctggggaggtgttggggtagagctggcacacgcgcgccacgaggatagcccagccgatgccgccgaggaagcctgcgacgttggagtagacgccccgcgccttagcccagtgcttcacgcaccgcagcatggtgcggaacgccgcggtgtccgggacaagccgcaggatctcgtcggccacgcggatgccgtgaggctgcgcgccgtggcgaggtcgtcaaggccgcggagcaccgaccggtcgcgctgaggtccactccaggttgtcgggcaccacgggaggcacacgccggcgtacacgagatccacctgtacaccgcggaacctcatctggatcaccggcaagggatgtggcggtggcgggagcggcggcggagtccgtggtggtggcgctgctggagagaggagagagagaggaaatgggatagagatgaagatgccgagagaagaggaggaaatgaggagtgaggatgacatgtgggacccatgtgggtcccactattttttatattattttatgtgtgcaactgacatgtgggtcccacgggttttattatttacccggatcaaattgccacataagcgccacgtcagtgccacgtcatatgaagaccaagtcaaattagccacgtcagccaaaaccgctatcaaaaccgtcgagggatctcgtttgccggttttcgtaagttgggggacgggtcgtacccggttttgcggttagggacgaaaatcagactggtcaacaaatagagagacctaaagtgaacttattccgttttgcagcgggggccgcgtccgtaggagtcgcggtgcccacggcccacagcttcgtaatgccatccagagttttgccatgtgggcctcggtgaatacgggctttatttcgactgttccacggccgatcgaatgaacttttcggttttcaaccttgcgagttgcgaagttgcgatacaccagcttttgtgtgatgaaatgaaacccggatcagccgaaagtgaccgacaaatttatgaacaagtgtgttgctttattatcagctaggagaaggccatatatatgtagcaaaagcaaccaaacatctcgatcggggccctgcagctttgcgatccgaacaggacactggatgcggatggatttggtaatcaaaaggaaaaggggtacctgaccggcgccaatcttggagaggatgttcgtttcgtgcgtgcaccgtgcgcctttgtaaagtgcccgaggttgctgtaccattggaggatgaaggatgaggtttgttggaaatgccgtggcagtcgtcagataatatataagataacgaacggacgggccactctgacagtgcatttgcttgttcatttgggagtttattaggagtagtccgaatgtttggttgctcgagcgtctatttttggaaattgaatttcatgttcttcgtcccggtatgtttcgtaatctcttttaccaatcattatattctctcatggactagccttcataatttgctctgtagcctttgcatatcgtgacatttttttcccaacccaaacgcgcccgatttgccccgtccggccacttgggagtagtatatcgaatcgctttcgcaaaggagacaactctgcagcaacgtcgcgtcccatccattggcccgcccggcattttgcatgctgtagatcgcctgtagctgagcgattgggcaacggcatgctattcaccggcaattaccactttacaaccaactcaaagtcttttttgctaaaattaaagtaaaaaggttgcaaacggataaacgatactctgaaaatgcacggttagtctgaaacttttgtgtttctgaatataaatcagggttggatacagtatcttttacccccaataagaagctagagttcatacgcaatgggacttcgtgttttttatcgtcaaaaggaaccatggtttctctgttcgacgactttgtgtaacgaacgccgcatgcatttctagttttcagaaccttgttaattgtgttcttttgtccaaaattgtaccagcatttggagtctatacggagcaaaccacttgataacttgcacttgcagcttacggcgatgatgactagtgaagccttctgcggcaaagcggcagtagtgactgttacagtgtgcccttcattgtctggagtgcagaaaatgatatctgcagggttccaaagtactgaaaatagttcagaacattgcacccaaatttgatttgttttctctttccggtaatccacagccaccgttttaggtaggatgatccactgttaaatgagagccacacacattgcaaaagcaaaacactacgacaggaggacaaatcgggtttcagagaatcggggggggggggggggggatccctttcccctttgtttattagtggcctgatgatgcagccttgcgcccttgcatatatagtttgcatgttgcatgcaggttttatctgatctgatctgctgcactatactggaatgcgactggagagccacgcgcgcgataatgcatcctgactaggcttgcagatggggagttttcgttggtcgtgcgagagcttaagggctaagggtgcgctcgtttcagtagttaggataggctgattagccgtacgtaaaacgagaaatatgattaacatataattaattaagtattaatatataaatttttgatgaataaatttcttggatttttttaaataacttctttatagaaagttttcgtacgaaatataccgtttagcagtttgaaaaacgtgctaacggaaaacgaggagaatctaatcctataagctgaaatgagcgtaccctaaggcctgtgtattgtgtaaataatgctgccttttgccattttggaatttcaaaatccccttttttttaaaaaagtgtttgtaaatacagtaagaaaacacaaactaaccgtgccttgtagactttgtagtggattctgtgctcagacaactttggtcaaaatccatacttacctataatcttctaggacgtctgaatttcttgacatggatctagatctgtcgcgacaatgaaactgatcaagattctaacattgaccttctgatccaatacggattatctggttgggtccaaatgtgtactgtaacttcttttccagattcaaagaggatggcgcttgctgccgtcgaccaagccacctggctgcggacttgcatgtggctcgatcaatcgttcacagcgtcaacgaacgatcaaaccacaatgcaattcgtagcgtgcacaccacgaacaccaagatagaagattgacctgacccgatcgatcgattgattgaccatgtttgctgctgctctttgatgctctgctcccgcttgtggtgttatctccacgagggttgctttcttgtcggtaccaaaccgcagatcagtggtcaaggacgggttaggaaaataagaactgtacaatgaaatggcccatagtccagtgaactgggcagtccttcagacgagtcatgctacgacagcaatacaatatgctgatggttttatgcatttctgctggattttacggttagagagctcagaccaaaagtcacctttcatggaagacaaaattttctaagagtagatgcagcttgtctgactttgtgtaacttataatcgtgctactgatatatgtatcatagtaaagtataatctgtatattagtaatttaattatagactgcacaaagtcatatgatctaagtttcgaaaacaattgcacataagagcgcgtattgaatttgcaggaattggtaaatcttccatatatgtgtctcatgaaactctcacgtgaccttggtccttgtacaagaggtcaagagcatgcggcgttaggctttgagcacggataaaacgccgcacttcgccagagctatcacatgaccaaacctgcgcatttacaagctaagtgtttcaacactaggtgaaatggatcgtcgcatcactctcgcctaaaaatttcctctctcagagccgtgccaacccacatcggtcacgctcatccacgaatttacaacttacaacgggacgcgtactgtcacgtacttgacgtacatagtgcccctctttatcctcccccaacttccgcctcccctctataagtaaccgtcactctcgccgagagtctctcatcccaccacacgacacgacacgagcgcgcgcgaacaccgtttctactaagcacaaacgcgacgaacacgcgcccaagaggaggatatgcagctggagatttcgccgagacagaggagccagcagcagaaggaggaggaaggcgagcaccagcagcgcgccggcgaggaggcggtgggcgccgtcttcagcattgagccgtgggtggacgccgcggcggtgctggtgccgccgcttaacttcgccgaggtgaacgacggcatcttccgctccgggttccccgccgccgacaacttcgcgttcctcctctccctcaagctacgctcgatcgtgtgagtcctatacctaggatctctttctcggccacggcgaccgtggcggcgagctcgtcgattacgtgttctgacggcggcggcgacgccttggcgtggttgatcggtgcaggtacctgtgcccggagccgtacccggaggagaacacgcggtttctggagcagaacggcatcaagcttcaccagttcggtattgacggcagcaaggtaaatgaacaagtcaaaaatcatatgcgttgagtcctttgattttctgctttattttccacggatggcaaagtcgatcttcgcatcgaattgttttttggtttttcggtcgatttggtgcgttctgcttgtggagataaataatttgcacacataatttgcaccgagaaatagcaactggtatcgcattacagtggatgcgagggttactttaggtagaacgcgctgtttacctgtttgacatgagcacgcacttgcgttttctgcgcgttgcctcgtgtcgtatggccatgagctcgttcgactactttccgttaaaaaaacatgggaactgacaactgatattgctgcttgcttcggcaaaacacttgggggcaacgcaactagggcaaacaacaactcaactagaacaaacaaaagtccctttcttgctttatctttgcccctttcagttagggcatttgcttgagtctttcaggctgaaaatgtttatcgtttttgggttttgttaacctaaattgacaaggttacgtggtgcatggtgactataaaacaccctgtttgagcaaaatgcatctagtgcgctactatttttatgttcttatttcactaattcgttttcccttctcacaaaatagtgtagaaaatctcattatggtaggagttattttttttacaatgcaaaacaacagtgtcagttaagcgggttcttgcgtcagcccagcacccatagaagattagaagttgtttacaatgctgcaaaagcgtatcttgctactggcctactgccattagcaacagtaaagcttatctttgttatgattattctggtagcgttgtgctacttttctagaagctagttcaaactgattggtagactcatggctaaggaaaatattttctatttcagcatcacgcatttcagggttaggagatttttgtctgcattatgccagtctggttctgagttttactgaatactgcaagctttaagggtaaaaaaaaaaaaagaaaacaccttaagcttaagtgatcagtgatgcagtacagcacaagttctactccctctatcaaaaaaaaaactaatcctaaatttgaatctagaaagacggagggagtagctgagaaatgatgggcttgtggagtctcctctgtgaattgggtgcctaaacaaagatcaagttgacttatgcccattattttttttaagagaacttatgtgaaaaaaaaagaggatcaagttgacttatagtataatcgcacctgtcttttaactgtcgagtgacgtctgaccagcgtaattctttcataaatttgttggccatgactttaattccgttattaaccagccacccaagattaccatttctctgtgtgccatgccatatttattctcattttactagtccttcactgaaagccattagtacggttttgtcaagctgtccatattaaaagttcatttaggcatagacgcatagtagccttggagtatgtcggtatattactccatctcgcaactttagtactcgtgtcatcgcgtggtagcatccaccgcaagtctgcaacaatgagaacatattccactgtcagttctgggttcatgaaggcatgaactgccacggcaaatggtcaaagttggtcagcgtcggcgacttaaggctgaggtcgttgcttgggttaggtattcatccctagttcatgcaaaatgacataactcattaacgtatgattaattaagttttagtttttttaaaaaaataaaattaatatgaatataaaatttaaattaactttcatatagatttcatatagatttttgttaaaaaaaacaccgttcagtaattaaaaaaatgtgcatgtgaaaatcgagtgagttaagttgggaccttcaaacaaaaaaaaactttcatcgttcattggcgattgttgctgtcgatgataaacaacacagatgtgctgaccaactttagcattcccagcaaaaaagaaatatatcgctgagtgaaaagacactgatcaggtggctgaccttactacaagtgtgtgaatggaaattagtgctcactttgacattgtctggagatgatgcttctttttcgccggactcaagctaggtgtctgaaaccactgaattacgagggtcaccggtaataattgtgtcactgctagatggattctaggatggtcactgctagatggattgtacggtggtgtttggatcaaggactaaactttagctcctgtcatatcggatgaatttagagtattaaacatagactacttataaaactaattacataaatgagagctaattcgcgtgacaaaatttttaagcctaattaatccataattagcgcatgtttactgtagcatcacataggctaattatgaattaattaggtttaatagattcgtctcgcgaattagtccggggtcatataataggttttattaatagtctatgtttaatatttataattagtgtccaaacatacgatgtgatatggactaaaaagttttagtcccatctaaacagggtctaagcttgtttctttgttaactagaaccaataatgtagtacatacttgagtggcatgacgatatctttgcatctgaactttcgataaaggtgaaccttatcagttaccgcattagcctgaaactgtgaaacaaattaaaacatccttctattgctataccatatcatcagtaattcagtatgcatccaactgaccattctcttcaatcctgttgactcttaaagttgatgcatagcctgacaataatctgaaccttgctgttacaggagctgcttgtaaacatccctgaagaaaaaatccgagaagcactcaaagttattcttggtatctgcctctacaaagatatatccaatgtctcaaaatttcatcacactatctgtatctaactcttatcgttttgatcaattcagacgtaaggaatcaaccggtgctcatccactgcaagagaggcaaggtagctatatctatttagcattgcacatccctgatatcccattttcttgaaaccttttgctacatgggaattcgacggtttcctgatattccacatgtttcagcaccggactggctgcgtcgttgggtgcctgagaaagttgcagaaatggtgcctaacttcagttttcgacgagtaccagcattttgcagcggcgaaggcgagaagtactgatcagagattcatggagctgtttgacacatccagcttgatgcacctgacggcctcacagtgttaaccgaaccgaatgttttttcatatccggtcccgatctgtaaccatgctgtctacctagcaacatattgtaatgttgctattgaaacaattcatcagagaataatgttagaaccatcattatcctcataaaagtatccatcaaaatacaaggccttcctcttttttttttgtactgcagagatacagtagtcgcagtctcgcagattctgacaaaatttggaagctggatacgtgaaattactgcatcgctaacatattacttcctagatgctgaaatttaggatcttgtactcgttttgaaatctgacaggaatgtgcttatgtgcaacaacaaaagatcttcttttggtgcaaaaattacctgttaacaggatggattgcactgaatactcgctaccccagtctcctgtgtcctgacttctgagccctagccaaaaggagcatcaaatttaggaggagaaaaaaggaaaaattatccatcgagtccagatgaatcctggggaaatcttaacaagaaggaataaaaacatgaagtgaagggcatcattggactgcatcctcagacttcaagataagatcttcatggagttcaagtcgatagggcgacaaacaattcagattcaaatttgcagattatttggatcaaagcctgaacagagaataggcccaacggccacctgtctggttcgcgcgttctcccgtcggatcccgcgatcgtccacgccagggtttacgattccgatgaaatcctgtcggatttcgcgaaattgtgacgtttcgatgaggctcaaaagtagaaaccgtctgagatttcgaagagtttcatccaaatttaaatttgaattgataaaaaaggaaaaaatcaaataaaatcttataaataatatgatattcatagaacctattgggatataatttttttgaaaaaaaatgatatattgtgtgtatttactgaaacttacatcaggaaagaaaagaataaagaattaaaaaaggaaaacacttagatgggccggattacttatcgaaattttgatgatttcgatcggaatttcaccaaaaccgatcggttttcaagaacttgtcggcaaactcagggaatttgtattcaaattttggtttatgaaatttgttcggaatttaccagttttccaccggatttcgcgaaattccgaattccaccggtgcccgaaacggaagcgtctgtcggaattgtaaaccctggtccacacactcccagctcagaccatgtttagatgggctttaatcccggcccacgtacatgtgtaggcctcgattttgaactaaaatgccggcccataaaatctttagcccaataagccatccgatcacgatcaaaaaatggacgatcggaaaatgaacggtggatgcgggctacgcaccgaaatccaacggtcgatgtaacccccaagaccccaacaagccctacaagctaatccaatatcacgccgcacggagaagtcccgagaccggcgccgccaggaccgccacccacctctgcctccgccctccaaaccctagctccggcgatggccccgaagcgccccactccgccgccgccgccgcctccggttgcctcctcagaggaaaccgcctccggctcggactcggacgagtcggaggaggaggaggaggagagtccccttgctcagcccgcacccgtggtctctaacaagggcgcggagtccgattcttccggggaggaggaatcggaggaggaggaggaggaggacttggtgcgctcctccgctaccaagagcagggatccaccgcaggagaatcgcgaggaggatgattcgtccgatgaggaagaggacgagtcgtccgaatccgagaaggcggaggcgccgccgccgccgccgccgaatccggctccgaagcagggggcggaggggaatggcccgaaggtctcgtcgcccaagaggcaggccttccaccgcatctggtcgaccgaggacgaggtgcgcatcctcgaggcgctcgcggcgcaccgccgggagcacgggtcgctgccacagaccgacgcgctcatcgccaccctcgccggcagcctcgacaacactggctacggccgcaaggagctccaggggaaggtcagcactctcaagcgccgttacgaatccaccgctaagaagaagggcgatctcccaagcaagggccatgaccgccggctctatgacctctccaagagcgtctggggcagcgaggcggcagcggcggcggtgaacggcaccaccaccgcgccgagggagttcggcgagatgtgcgagctgtacccgcacctcgctgaggaggtcaagttgctggaggcggcacaccctggcttgttcaagagggacttcgggaagctcgatgacgacaaggcgcatgcgctggacatgaagatcaagaagcagaggattgccgagatttcggtggtgctgcgccgtggcgacctgaccaaggaggtgaccaaggtgctcgctgagctggtcgagtgactaggtgagctgaactgaagtgaacagtagtagctcggcgttccttaccatggcataagaaagtgtacctggtcattacctgcaaactatatcgtgaacaggcattacctgcaaaattttgcttcttagtgatggagttggatgttctatgttcttgtctaggcaattcagtcagcgtctcttctcagttcagatagatcgataggatgtagtataaaacattgaaatttcgtttttggtttgtcttatcattccagacagtgatagaatgtagcaagactgaaatcggtcatcgaatcagtcctgaactcttgactcctttataaactgaaccccagtcctcgttaagtatgggttagtgctggcagtgtgttgccctagcctgaggtctctgatatggcaacttgtcgcgtgatcagtgatcgtctctgtctagctgacatctctcctggatgaaatcaatccaaaaaaaaagaaggctttgatcagatagattagggttcacacttcacaactctgacgtttcaacgcagcgcgaaagcaaattctgttggaatttttgaatcgtttcagaatttttcaaatttgaattgaaaatttatgaagaatattttaaaaataacttgtaaatagtcctacatttgtagtaaatacatgcatatgaaatgtcaaaaaatataggcgtagaatgaaaatgctctttggacaacaactgaattggtaaattgaaaaaagacatctagaagggtttacaatatgtgttgattgtgtatgcactttatattatggactttgtattgttgttatactatgttgtttatgcactttacagtatgtattgattgtgggtgtactttgtattgtgttgatgtactttatattatgcgtgttgatgttaatggcgtaacatatatttggttatgcatatttaattgtcaatgatatggacttcaaattatcttgtatttgtgttcatgaatatacattgcgcttattctcaatgtgaggttgtcaaattgtaggaaaggtcatgctgaatttctttattaatttcttacattttcccacgtttccacggtttccccattttgatatccttttagtttgcaatgttcctatcatctccatgaattttctcatatttcaaacattttcccctattatccaaatattcagaaaacacaattaattcccacgctactctttggcttttcagcaaatccaatgagttttagatgcttttgtttggtttccaaaacactggaacggtggtttcctgttcgaatcaactgaaatcctggtagttccggttggaattcggtgattttgatcatttttcattgacgggcaaatggaacttgagaatttggcttcttaattttgtttgaaatttgacggttttcgtgaaaaccgttatactgacagggtcaggagcgggacctcgattggaaatataaacccttgcctgtaatacggtacagccgtacagaattcgtgtggtggccacgggctcacgcaccgggtcagtgatagcatccagtggccaatttggccatggagatgatgcattttttacacggagaatgatcccagaaacacgcatgatcttctcttacaagaattttctaacagaacatccatttcaccacacccacttgttcaatgcagcgctgttttgtaacccacataacaaccggacccagcacgtctgaaactaaggttactcatcggttacctaaattaaagtactccctccgtattgtattttaatgtatggtgccgttgactttttttatcaatatttgactattcgttttattcaaattttttgtgataatgtgaaaatatttatgtcatgcttaaaaaacatttgatgatggatcaagtcacaataaaataaacgataattacataaactttgtgaataagacgaatgatcaaacgttagataaaaagtcaacagcgtcatatattaaaatatgaaggtagtagtaatttacagagatgttttagcgacctaaaattctcaagtttgaaattttaatttttggttttcatttatgaggacaattgggactctaaccactcccccggtcgcttcgcgacgcgtccgtcccgacctgccaaattcctcgcacggattaagcaaaccaaactactcggattaaatgcgcaaatcgaaagcacgcgttccattgggagaccggcaaacttcgttttttccttcgagaggaacggagacggagtttgccgtcgtcgtgtgcgtgcctcctcgcgtacgcacatttgcccgcagcgccgcggcgcgcgaggctaccccgaccccgacgtggtctcctcccacccatacacccttccgcttccacgcccacacacagaacccaattcccctccctcctcctccacccgcccctccctcccacacacaccacaccaccaccaccaccacccacccctcgtatgcaattattcacgcccagtcgccgcctccaccgccgccgcctgctcgactcaccaccgcagggcggcctcctcctgccgcatgggtgactcgacggtggccggcgcgctggtgccatcggtgccgaagcaggagcaggcgccgtcgggggacgcgtccacggcggcgttggcggtggcgggggagggggaggaggatgcgggggcgcgcgcctccgcggggggcaacggggaggccgcggccgacagggacctcctctgcccgatctgcatggcggtcatcaaggacgccttcctcaccgcctgcggccacagcttctgctacatgtgcatcgtcacgcatctcagccacaagagcgactgcccctgctgcggcaactacctcaccaaggcgcagctctaccccaacttcctcctcgacaaggtttgcttgctcgttctgcttacacagccgagatggataatggattggccgtggcttccatattccgccgatcgattgggaattttggatgcctatcctaatttcaaacgcagggctttgtaattgaaatgtcactgccccgcaaaaaaaaaaaattgaaatgtcactgaatgtacctttggatgtggcttgggataggtatccggtataaccaattttaacaaatgtagcaactattcaacagtatgcctttcgattcgtttgtagcaactattcaacagtattcagcgcttgagctgcgatttattgtactactgtttgtggtagcttctgaagtagtagcaggtgttctgattggatagctcagttttatttgacttgcacggtacattacagtttgttgttaatgtaagttttgtttagaatcaccagcagtggacagtattagttctatgtctgctctggttatcagtacctattatataatttgttcatcactagagttcttctctagttctgttaaaacttaaaacaagctgtaattactggttacttgatactgggattgtataaatgtatctctaagcatgtttatcacatttatgtctgcataggtcttgaagaaaatgtcagctcgccaaattgcgaagacagcatcaccgatagaccaatttcgatatgcactgcaacaggtcagtcacttcacatgttttacttttgaaaatgtctactttcaatagctccttaaacatagtggtatgttcctaaatggttttatgtactgtgaaaattttgcttccgtaccttagctgtgcttgtgatcttcagttcagaactaagtagtacagagtagtaattaagttctacactgaacatgcttatctcttgcatcaattgtagaatctaagctactgtgaccgatatcaaagtatcttttgttccttcgctcttacagccacatgatctctatcgtcctcttaactgttacaaggattgtccatatgataaaccaagtataccacagaagatagatttgcactaccttgctgactttatatctgtttcaaaattcaaacataaaactgacgttctctaaataagtaatagatgaatgatgaccaaacactatcatatgttttagtttaattcttctttctttttctagggaaacgatatggcggttaaagaactagatagtcttatgactttgatcgcggagaagaagcggcatatggaacagcaagagtcagaaacaaatatgcaaatattgctggtcttcttgcattgcctcagaaagcaaaagttggaagagctgaatgaggtttgtctatatgtatttttcagtatgcaggttttttttcttgctacctacaacaataaataatcttttactgatgtctattgttgttaatcatgttaacctcttttttacacagattcaaactgacctacagtacatcaaagaagatataagtgctgtggagagacataggttagaattatatcgaacaaaagaaaggtactcaatgaagctccgcatgcttttggatgaacctgctgcatcaaagatgtggccctcacctatggataaacctagtggtctctttcctcccaactctcggggaccacttagtacatcaaatccagggggtttacagaataagaagcttgacttgaaaggtcaaattagtcatcaaggatttcaaaggagagatgttctcacttgctcggatcctcctagtgcccctattcaatcaggcaacgttattgctcggaagaggcgagttcaagctcaggtttgtttctcccattgcgcgcttgatagtttggtactatcatattgcaagcatgtagacagcttagattaggaacttatatgtttattttgttttgatgtaagatgaaatgctaatgtgctatggggcatattgcagtttaacgagcttcaagaatactatcttcaaagacggcgtaccggagcacaatcacgtaggctggaggaaagagacatagtaacaataaataaagaaggttatcatgcaggacttgaggatttccagtctgtgctaacaacattcacacgatataggtccgctgattatttgtcctttttagcacattatgatcatggtagtggttatgcctattcatttggcttatcattcttttgttctctgtcatttatgcttcagtcgcttgcgtgtaattgcggagctaagacatggagatctgtttcactctgcaaatatcgtatcaaggttagtgcttttacaaaatatgtgccttatttcatgtgcatcaacatgctattggcaatgtggatgttgtcatagctgaatcctcaagccagcagtgagctgaggagaggttttggttggaggggggatggtctattgctcctatgagtcaaacttcaactatgttcaattagcaaacaaatccactaatcttgaatgctgatgtttatcatgtattataaggaacaaaatatgactataagtttgtgcctgtttttttggtgcataattttcatttccatgtctatctgtaatctcatatgtttttcagtcgcctaccttacatgagaatagggaatcacattgatatttcttaaatgcagtatcgaatttgaccgtgatgatgagctatttgctactgctggagtctcaaagcgcatcaaagtcttcgagttttctacagtaagttttttttcaggaatcttatgttggccatagctatatgcctgtatagtatttgaaaatactcaaatttggcctatcttatgtcgtaggttgttaatgaaccatcagatgtgcattgtccagttgttgaaatggctactagatctaaactcagctgccttagctggaacaagtactcaaaaaatgttatagcaagcagcgactatgagggtatagtaactgtttgggatgtccaaacccgccaggtatttcttgctctgttccacagttcattttgcacacttgtgttattttctgaacttggattcatgatatttatgtattcaatcttctttagagtgtgatggagtatgaagaacatgaaaagagagcatggagtgttgatttttctcgaacagaaccctcgatgctagtatctgggagtgatgattgcaaggtatttgcaaatttcaatggtacaactacttttgttattcccgaaagcaagaaaactttgcgtagttctcaaaatacagtaaaacataacttggatatatcgcatgttatgcaacatactaggattttattttatttatcagtttttcatgtccctttttctataatggtgcatttttctacctaggctatcccaacctcattgaatgcatagatggaagtatctgtattgcagtataccttatggaacctactgctgtttgtgctaggtcaaagtgtggtgcacaaagcaagaagcaagtgccatcaatattgatatgaaggccaatatttgctctgtcaaatataatcctgggtcgagccactatgttgcagtatgttcctttgattttcttggctcatatcaaatataagtttttttttccttaccagatgttacattattgcaggtgggttctgctgatcaccatattcattattttgatttgcgaaatccaagtgcgcctgtccatgtttttggtgggcacaagaaagctgtttcttatgtgaagttcctgtccaccaatgagcttgcgtctgcatcaactgatagcacattacggttatgggatgtcaaagaaaattgccctgtatgtgtcattgagatttttcttgcactgcaattatgaaattatgtttttgccttttaagcagctatgacttattagtaaaaagtgatgttttaggatatactctatttcatatcgataaaaattggagctatagtgtttctttatttcctgggaaaaaactatttgagaagcttcgcttttttttcgaagaattctggtccttgaaaaacctttggttaggtccgaaattcttggataagcatttgttttcacctttgtttcttttttagctcatctattagtctggcttggtttagtagttacgtcatgctaggcttctcagaaaacagattgttgaccttttgtttaaaatggttacctttttcaggtaaggacattcagagggcacaagaatgaaaagaactttgttgggctgtctgtaaataacgagtacattgcctgcgggagtgaaacgaatgaggtttttgtttaccacaaggtaattgcaagcttattgcctgctcttgtttccgtatctgtgattcagcattatgtgccatgcttaactgtacaggttggtctcctgtggcaccatataccattctaacttcaagtaactctgtaccaattgcaggctatctcaaaacctgctgccaaccacagatttgtatcatctgatctcgatgatgcagatgatgatcctggctcttattttattagcgcagtctgctggaagagcgatagccctaccatgttaactgctaacagtcagggcaccattaaagttcttgtacttgctccttgatgaaatcagtggttttcatgagatccctagatagcttgtatatttgatgtatacagttgtttccttttcgtgccattataccccaaatgggagtggaggtattactgatctccaacatagggcgcaaagttttgaaggtaatcagctgacatagggtttcgagggctcgaaatgtgcatagtccagaattctcatgtataggtttaaagcagtcaagtaattgattatacatatgtaacgtgagaattgagaaatgaacatcaaataagcttgtttggttgcatatattggattggattttgggaactgggaagacaagctgtactgggctgatttcagcaacacaagccagtttgtcacacatctgctacctaacagaaatagttaacttatatatctcattgatcttacgcagggctaaaagtacagtatattacacccccaagccttcttattgtttttactgatttaaaattttccaggatacgcaattgccgtttcatcgcttaaatttcaaacccaataccttcatttctttttttctcttttactgaaaagaacagttttttgaactctcgcagtgaaaatgttggtcgctgcctgtaaaccctgttaccacgttcacagtgcatgaaaatatctattactaccggccaagccactatctttgtcacagtgcataaaacatactccctatgtcccataatataagggattaatattttgttacattttatttttactgtttgatcattcgttttgttcaaaaaaaatttagagttattatttatttatttattgatttactttattatctaaaatactttaagcataactttttgttttttatatttgtacaaattttttttaataagacgagtggttaaacagtgtaaaatgttaatatattatgggatggagggagtagcctagttctcgctctctgcttccacccacagatctgatcatctgaatcgctctctgcgaagcacccacagacgccgcggcttggctaggccggctgccgcatcgcagcttttgtatcggctgccgagtcgcgggagagaaaaaaggagcaaaactgcaagaggcgggtggcctttcgaacgcgcaaggggtttgcgcttgcgcgcccgaaccaacggagctgcaagccaagccaccaccaccccaccccacccacccaccagcgtccagccagaccaccgccccgcgccgcctgcgctgcgtcgccgtgggccgctggtttcagcgacaccgcgccgctgcacgtgcccccgccggcgcctctccttccaacattggctaatggctagccccatgccgttcaggttcacggctctctttgatcctgctcgaagaagaactgagtggataccaaagttaccaacgtcaaaatctacccatagctgttcagcttcatgttatactctagcagatttaggcgcattcggccgactcaagcgacggtaacgtcgtagtctagtgtctctagtgtctaggtggagagggactgaagagcatgtgctgcgctgtggctttcacggcgccctgccacaggaatcagcggtgaatccgccgaacaaggggggcagcacaagaatatctctggacaagagtagattgtcatctactcgatttggccggtcgtgttccatttccagccatgggttggctggtttacaattcccaaatttaactacccagaattgcacttgtgctctgaccttattcgtgcatctcattttcttactttgacacaaggatatatcaacacatgaaagatccactgaagaaagatctaaacaagccaggtgatgtcacgaaaaaggtccccaaaatatatcatgttgtttgaatccccattattaaagctgcacttttatcactttttatgttctctttgtgggttgcattagagtgtagccattagctcttccaaagagccgactgaattcgatacggcgctttcgctgcactacagttccatctcgcgattcgttttggatgtgatcgtatccttaattccttattcatcatatattttctattctgaattgtgaaaaagcgcagaatattctagctctttctcggagtaaaagatcggcaacttgcgcaagtttttggcatgtactaaagttttctttctttatgagatgaatccggtatagatgctatcatgctatgcatacggttgcagctttgatcttgattgaatcattgaatggattcttattggaagacatttttcttaagcagctcttgctttctcggagctagctggtattctgatggggatctttctcttattctggttcaagtggagtaacctagttcgtattagacattcatgtatacaagcagtgatgtatcctgcacaaaacaagaatatcatcgagtgcagtggttgattgaattatcttgcgatcaatgtccttagtgtgtttgctctgcgtggtgcacgcactgtgagtctgtgaaatggtcatctccttgtctggaatcgatcgatgttgagcatgaaaacagcttgaaccgtaacaagcaagagatggtacactaaaaaatgcagagagatgttctaattctacagaatgaatatactgttcaaaatgcagaaggaaaaataatatctgaacagacaggccaccactctgtaaactgttctaatgatctgcttcgaactaaacagaattaatagaggtgagcatttccctcactgacagtagtatgctcttttcttagaaaaggacttctgggtcgttctttttctctgtgggggatactgaatccacaagaatcagcatgattgtgtcaaaaaagaggaaatatcacaatttgtcgtttcagaaacagttaatctgaattctgaaaagtaccctggaggaaacatgaggtgcatgcgagtgttaaaaatactttcccggtgtagcagcttagtacgattgagctagggataaataacacattaaaactcagtttgtgttcacttcttttttattttcaaagagaaaatatgcacttgtagcgcccgttccgtcgtggcgccttgcgggaaaattatctcttaaaaaccctaattgcgatattgtttctttgtttgtcgtctagtgtccgtgccatctcaagatctcaatccccgatctatcgtcgagttcatttccgaatccaaatccttccaaatcaatttcctccgcaaaagtctattttgcctccccggggtcgatgggccgaatccctctcggcccatctcccccggggtggccggcgagcccttctctgtggctctctctccctccggtccctgcccctgcgctgcgcccgtgcgctgcgcgtgcgtgcgcgggaaccgcgccgggcgcccctccccctccgctctgcccccgcgcgtgcgcgtgggccgcccgcgccggccgggccctcctctccggtccctcgctgccgctccccgcgcgtcgttcgcgcgcgcgcgcccg

SEQ ID NO: 5426 - DNA, 152062 bp, Oryza sativa
  unsure (1)..(152062): unsure at all n locations
cccttatattatgggacgaagggagtagagcctaatgctgcattaacacctgaacacaacagaacatacacagcagtaagatacagcacaatgcagatgcaagtattccttacgcattttcgtgacgcttgtaatagttgagtaaatgagagcagctaaagcaggaatcaggaacatgggcagcacccgggttgctctcatctgccagctgaggtccggtgatcttgtagtcataatcgcatatccaacagccgcaatctgttccaaaaaggagaaataagcatttccttacacatacaaccctgtgaaaaaacacagttcgccctgatctaatctaacaacaggcatatgcctaatggtgtcactagaactagagcaatgcaatgcatcatacaatctctgacacgacatgaaaattgcagaataatacggcataatttatcttagcaggctgtatgtcatgataatcgatgcctaattagcttcccaaagctgtatcacatcaggattttcatatggaactggattttatcaatcctcgattttatcgacccaacctacaagcgatcgattcgtctggacgaacatgacatttatatttgctacaataaaggaagcagagcggaatgggattagccggatggggaacggcgggggagttgggaactagggatacctcgagcgcggcggcgatggcgaggacgttgtgggcggactggcgggaggcgcgggcgcggcggcggaggcgggagcgcacggcctcctcctccttggagagcgcctggagcagcttctcgacgtcctcgcgccgcccgaatatccccttccacacccgcgacacgagcccgcgctgcctcctcttctgcgtcgacggcgtctccggcggcgcgggggtccgcggcgacgccgcggaggccgcggccgaggcggcgtaggcgtcgccttctgccatggcagctcccgcgatcgggggcaggggaatccgatcggatcggagaagaagaaaacgctaagctgccctgcggatttcgtacgtgtttcttcgtggcgaattttcggaaacaaggaaggaaggatcgcttcgtgccgcgtttttggggaggaaaggcgagcggaaaggcgtcgtggtgaggtggtcggcgggcgtgcggacgtgttgcctttgcctctctctctccccccgtttttattctctttctcctcaccatctgcaaatgcaaatgttacgcgttcgtgtgtgttaccctatggctccacgacgacctggcccccggcagcctagttttgaattgcaatgggcggccagctcgtcggagttgacggccgcggtgccgcctacgacgttcgaatacggtgatggcgcctgaatttgcttactgcaaaagggttagcttagcttgtaagcaaaaatgttagcttggcttggaaccattcaacatgagagcagtttagggtgtgttattttcggatcaggatcctctgcaatcaactgcatcacgcctttgtgagatatagatcagatctggacccacatgtcatgcagcggatcttaatcctcacctcctctttaccgacttctatggttctaaagataaaacaatatagccctcatatgtattctatggagtacataccccgttagagagttgacataatacattagaaaacaacacaatagatttttcgacatttacaacaaatttctataagttgctttaaagtttaaaattttatattaatactttatcaagtttttgctaataattaattagtcatatgctaatccaccacttcattgcgttaaggattagttcctaacccacaataacaaaacacagcacaacttaatttcctcagcttgaggagcaatttccatccagcattcagtcgaaagtaaaccggattaccggaatcatcagctacagttgcttctattgcgatagaggtactagttcgctcgtcatggaatgaaagctacagaaactaataaacccaaaaaaaaaaagacttgtggcattcaatttacattttacaacaccattagatggccatgaactgcactcatccaacttatagttctcgctatctatgaggctaagatacagctatgagaaagatgggaacaacaggcacaacatagcacacaacatatgtgccaaccgcatatgcctccattatgtacctgaggattctactactagattggtgtcacagaatcacatgacaccttcaaagcttgaaacacgtgctgctgtagtcgccacgtttagatacgaacccccattatgctctggtttcatgagaagaactgctcaaggcttggagagttaaatacattacccgcaagttgtcctccttctattgaggaaacaaagagttggcaccgaatgaaccgctggtagcaaagaaacgaagataaacatgtagaacatgactatcagaaggcacctggtccaagaaaaaagaaatgaagatgcaagagtacatacagatagttgggaaattatatcgaggcttgtgtcaatgtgaaaatctgcctctaactgtcgaacaaatgaagttcgcccaacttcagagctgcagaagagtacctgcaatacccacctttttcactcaattatagatgtaggtgacagaagtaaataaattatttaacacctagatatttcagggttctgaatatacaggagaaatacttcttttctcagccagaacttggactgaaactcagctgggtatgcagaactgatatgagtgccagacaaagtcagctccatatgcagaactgatatgcaagcgccaatagcatttccatgcacatgtatcaattagtatcagttgcctctaccaaaagttcaatcatgtgaaacgtttactgtaactgctaacatctgtatcctcctatgaatttggtgaaaacaggccattcatgttctaccatccataaataaaatgagaataattactcaatgcagcattgaaatgacgtggggaatggagggaacatgagaggaacaaaaaaacaaacgcagtacaataactaaaagtaacgcaaacatttcaccttttctttcatcaagccaccagtcttgaaaagtccagcactctccagggccaatagagcattctcctactcaaaatcaaattccagaactattaatacggtatatatcaatatttccctcgataattctcataaaaaatctcacatgataaaactgcaaagaaatgaaaggatgcactatgaaattcatacctcactcttatcatcaagtacagtttccatcagatacaaatcacagtatttggctatttcgagtagtagttccaccactgaaggtctaacagtggcatgtgtctgcatcaagaagagtgcagatgattttagcatttcagcaattattggaggggcacataaccattggaagaggcattgctaaacaaacctgaagctcctgaggagttatctcctcaaagacaacaccaagcagttggcaagtcacctggataaaaaaaaaattatgaacttctgcaaattttaagaaaccaaatatgtatttcatttatttcaagtctgccagtatttatgattacaatttacagtgtcaagttaaatcactaaagcatttgctctttgtaactaagagtattatgtcagatcactatagccagaaagcacctaacagtttgatcttcgctctctagtggtaaacttatatcacaataaaattgtcctcattttttaattccttataccatttgctatggtcatcctcaaacaaagagaaactgacttgtttaggagtatatgtaagcctacaggcttaaatttcaaataaggtctgctctagatccttaaaatcaatcatggaaacacaggataaaattatgtttagggaattatttggtacagacaaagcatttaaaaaaacaaaataacccatcaaatcaccattcttcgtagctagagcagtttgagtgaacaattgaccccggggttacagtagaggctctacaagtttctttgtatcccggcaatttacaaatatttcaaagaaaataaaataataagcctcagatatttcaggtcagtgctttcttaataccacccagctgcagggaccgaccaccttctgaacatgccactaggctgaacttttctgcatgcatgcgataaccttagactcaacagccttaccttttgtcccgtcatagtacaggtagtaatgcatcataagttaatgcggctttctgtagtaattagtgatcaataggtggaaccagtgcattttaagccattgtcttctcattgatccaagattttacacgtgtggttgtacatttatggaagctaaattccaaaagttctcaaatataatttatctcaacattagacaatcaggcatgccaaacccaagcaatgagctgccacataggcaaattaaacatttatttcttaaacgcgtaattgatatcacatcatcgaagtttcatcaacccgctgatgacaaggcgcaaggagaaaccatacctttctacacccgcccagtcgcttcaccacgatttgccgtgtcgtcagctgccatacacacaaaccccaatccaatcaagggttgaaaaacccacaaacaaatagaacctagaataaatattatccaaaaatcatcacaccaatcagaggatcagaccaaccttcccaggattggcaggctcggccgcatcgcgagcggcggaatcgggggcagcagggccgacgagcggccgcttcggtccgggggggcggcgcggcctggccggcgacgaccgcaggaacttccacgcgaacacgacagcgatggcgaacccggcgacggccccgagggatccggcgctctggtgggggcacacacacgatacgagacgagacggggaagcccatctagggttagggttcgcgcgacgcgcgtgtaaaaccgaaactacgacgcgatgtttaccttgtggtggaagaggaggccgacgaggtcggtgaggcggcggttgagggcgcgggagacgcggcgcaccagcgagacggtgtcctggtcggcggcgaggcccggcattgcgcggggtgggggtggggtgccgtacggcttggcttgacttgcttctgccgcgtggttgggcgaggtgggggaggtggtcgtcgggggggtgggtgaggaggtggtggaggattggggaatcgccggattgggaggtggagacgaggggaggaggaggaggaggagaccgcgaaattgcgggggcgacgagaggaagcgaggcggggcgtgatgagactgatgtgcttatcttcttggcacaggaagccacgaaaggactaatccaagaatttcttttttgtttatttggccttggccgtatttagatccaaacttcagtcctttttcatcatatcaacatatcatgcacacacaactttttagtcacatcatctctaattttaactaaaatccaaactttacgctgaactaaacacagcctagatccaaagtttttcttcaaactttcaactttttcatcacatcaaaactttcctacacacataaacttccaactttccatcacatcgttccaattccatttttgatatgaactaaacacactcgttccatgatgtttctttaataaatgttactttaaaagaaactattttcttcgttaatattatagcatcctatactacgtgtctacgtagaacacatcatactacaatctgaacggccgagtattagtttttttatattttgtgtcgggatagtattatttttttttctttggaaattcagaataaataaatacggtattgttttcatgatcaataagtgccgattcagatttttttttagtttgataaatattagctgtgtgctctgaagttgcatcaatgatgtagactttccggtttaactctgccctcttttagttgctggccaaaaacaaatctacattttagtgctcgtcagatcgaaactacgacgtatttgctgtacaaaaccagcttcagctgctttgaataaagtaagctgattgcttgacaatacctccaactcaagtgtggagttagcgtagaccacctggtagagtgtatgcaaataacatgaccattacaagctaagcacccaggctgaactgaaccaaccaacgaattgacctgtttttcattttaaaccagagctaccgatgggtttctgaacctgaatactcgctatgggtgactgaaatgagtgaaaacaaaacaatttatatttgttcatcagaaaagaaaatcattcccaaacaaaaaaaatccaactagaagaatgaaaacagtaacgtactacattaactgcgtaggcatatccgtcgaaacatgaaagtgaaactcagattgtaatacaatttcatttttttagataatgtgtaatcaattttctatttcacaaacatgataaacatccgattttaaactcaccaatcagtagaggactagaggaactgaactgaaacctttattaataccataccagcaggctcaatagtgtgactaataaacaagatgaacaagaacgtcttcagttttgcagtctctaaaatgaaactgggtcaagcatgtacgacagaacgatattgttgttagcagaggttactgctagttgcatcagtatagcacattcctctctgatcgtttgttcaattatttgataagataagccctaagaaaattaaccaaagcaaccaaatttaatatataagtaacatttttatatttgatttattaaagaactaaaagacacgtccaagtctagaaaccataggtttattttaaggatgaaataaatagtgctgaaaaataagctatgataaaaacaatcatcataatttatttaaaattgaattccgttgagcgagcaattgttgggaggcttgaaccatggtttaccaaaccattaagggtggtatatcatgattttaaaaactaaaatgtttaccacacgtgacaaccacgataaccctgtggttttgtaaatactgctcagccattagcaaagcgttcaagagggagagaggagcgtacactggttcgttgcatgcgagcgtgatcacgaatgccaccggactggtcgcgcctcggactggaggaggcgctcgccgcggcggcgctgctgctccgatcgtgctcccctcgccgcgctgtcctccgccgcgcgcgcgcggtccacgcgctcctcgtggtctcctccacgccctcgtcgcccgcgctgaccaccttcctcgccaaccagctgctctccctctacgcccgcctctccgccgtccccgacgccctcgcgctcctccgctccacgccgcgcccctccgtcgtctcctacaacaccgtcctctccgcgctctcccgcgccccgcgccacgcgcccgagggtctccgcctcttccgccgcctgcacgcgtcgggcctccgccccaccgcacctagcctctgcgccctcctgcgcaccgccggcgaactgcgcgaccgtcgcgcgggggccgccgcgcactcgcaggccgcgacgctcggcttcctcgcgagcgacatcgtgcccactgcgctgctgcagatgtactcccagtgcggcgcgccgagggacgccaaccaggtgttcgacgaaatggcgacgcgggatggggtggcgtggaactgcgtgatgcactgcaatgtgcggtatggctaccttgaccgcgctctaggtcagttttgccggatggtgaggggtggattgccacccaccgagagcacgctctcgtcagtgctgagtggttgtggacgagctggggattgcctccgagggcgtgtgctccatggatgggtggtgaagttggaggagcttgatcctgacatgccactacagaacgcgctgctcgacatgtactcaagctgtggtgatctggatactgcactgcgcgtgtttgagagaattgagacgccggacttggtgtcatggaatactctgattgctgggttttctggagttggggatgggtgcagcgctgtgcatgcctttgtgcagctgaaggctgtacagttcgatgaacgagttgtccctgatgagtacacgcttgcagctgtggtgtctgcttctgctactttgcctgcaatgtttggtgggaagccgcttcatgccgaagtgatcaaagctggactggagaacagcgtgtttgtagggaacacactgctcaacatgtattttacaaacgatgatccccattctgcacggattttgtttgattccattacccaggaggatgtaatcatgtggactgagatggttgcaggccactcctcattgggtgagggagaattggccttaaggtactttgttagcatgcttcaggaaggttacaaggtcgacagcttctctttgagcagtgctttaaactccacgaccgagcttgcaggccttaaacaaggagagatgctccatgctcaagtggtaaaaagtggttatgaaggcaatatttgtgcctccggaagcctagttgacatgtatgcaaaaaatggtgctctcccaggggcttatttggtgtttcgtaacatacaaagaccagatttgaagtgctggaattctataattggaggatacggtaaccatgggaattctgaaatggcatttaagttatttggtgagatgattcgggatgggctgcaacctgaccatgtaacttacatctccatcctctctgcatgtagccactgcggactagttgagaaaggaaaattctattggttctgtatgatgactgatggtattgtgcctgggttcaagcactacactagcatggtcagtttgttgggtagggcaggtttgttggatgaagcagttgatttaatgatgaaatcccctttcgccaagaaatgccctgaactatggagaattctgctaagctcctgtataacatttagaaatttatccattggtgttcatgctgctgaacaggcgctagagcaggacccagatgatatttcaacacacatattgctttcaaacctttacgcctctttaggtaaatgggactttgttgctgaaattaggaaaagaatgagagggctaatggctgataaggagcctgggctgagctgggtcgagatgaaaaatgtggttcatgtcttctctgcagacgatgaatgccactctcatatagatgattgccacagcgaattgcttagacttaaaggaaacatggaattattggatacttgtgaaaatgagttcatgtcaagtggctaagttgcatgaacagattagaggatttcatttgcttcctttggtcctatgacttatggcaacaaaatagacttatacaagattttgagcataagaaaggtattatctgtgaagggacaacctatcgatttaatggttccaactttcaaattagcgctcccggcagcattggaggcaggaaagagacactaaaggtatcaagctccatcaaacaagatatagatgtgcaaataacccaaaaaagggacagaattctgggtcagtgctctagtgtctttctccgttacatcaatgcaactgcttgctccttttttgtgtatatatgtgatcagcagcagcatttcttgctatggatatgttttgagtaaatttcagaaaaccctctgttttatggtcacagttacagaaaaccacaggtattatgacatgcggcacctaaccatataggtataacagttctaaagtttgacaaaaccctacccttatgcattttgagcacagattacttacaattctaaatcatagtgtgtacatgaaaattttaatttttaagttcttgactaaggttgataattaaaatttttactaattcaaaagaattgttcaagatatgcaaaattaggcctagttctatttttcaacttcaaacttcaactttctcgttttccgttagcacgcttttcaaaccgttaaatggtgcgttttttaaaaaagtttttatacataagttgtttaaaaaagcaaataaattcatttttgaaatttataatacttaatacttaattaatcatgtgctaatgagatttctcgttttgcgtcaaaaatctatctgccaaacggatgatcaaacggggccttaatcaagatttcaataaatgtggggttttatgaaatatttagaccataatacatgtggttgtgtgccacacatcataatatatgtggttttctgcaactttgatcataaaatgtgagattttctgagttagctaaatttccatgttgccctttttaatggtctcaataattttgttgttgcttgttgagtactatctgatattgtttctgacaagagcttcctcagtatatgggttacacatttttcagtcttgatatttgcttctatgggacattatgtcaaagttatctcggtaaatgttcagttttaactaacggcataaggaccccggacttcagagcaacctgtctcaatcaagccgttcataccatgcaaggtgcctgaaatctgaatcaatacttcctttgttggtgaagcatagcactttagagtttgatttattaattcattttcttttgtttcagaactttagacagctgatactccatcaatctgaagtttgaatatctcaagtttctctgattcggcaatcatccagatccatcattaatctcttaatatgcatagttaacttcgtctgctgctcatttttcaccatcaaattcctagccagtgcttcgtaaagatagtaagatggacagtgaagttcagggcatattgcttcttattaaaagcttgttttagtgtgatatggcaaatgaactaccctgaattctggtttcatgaatagattttacacaattatttttcttctagcctgcatatagtagttgtagcttcattaggcggttaaaagaaattttagaagcttgaactctgggtccttcacgtttatgatttgttcagatttagttattgcagtatatctctttttaaacttcgttagctaacgcctgtctaaattgcactgttcagtgtaccagttcagggttctgccgaaatcattctagggccgtgtttagttccaaaataattcttcaaacttcaacttttccatcatatcaaaactttcctacacacaaacttccaacttttctatcacatcattctaatttcaaccaaattttcaattttgatgtgaactaaacacatgcaagtcttacagtagcttctgggtgtattatagaaaactgtattgtttgatactagcacaatagctcaagtaaagtaacggctgtgcgaaagtgcgaaaccaaaaatccagtccacgctgcaaaacaggtcaatgccacctactagtacttatttttcccatgcaaccaccgtgattcaagaataggcagacaacccacgctgcgaccggcaaggttgtactagaatttaggctactcaacattcatcatgactactcgccgttgtttgtgcggtgccctgcaggaaatgagcctcctttcccatttctgcctctgcctccagcggaaggcgggaagctgctgccgttgcatccgcttcttacatgtgttcgtcttcgtgctccacatccatggcggccactcccagatgtgcgaccccgccgacctggcgtcgcttctggccttctccgatggcttggacaggatgggcgccgggctggtcggatggggtcccaacgacacctcctgctgctcgtggacgggcatttcatgcgatctcgggagggtggtggagctggatctctccaaccggagcctctcccggaactcttttcggggcgtggcggtggcgcagctcggccgcctgccgtgcctgcggcgcctcgacctcagcacgaacggcctcgttggcgcgttcccggcgagcggcttcccggcgatcgaggtggtgaacgtctcctccaacggattcaccgggccgcaccccgcgttccccggtgcgccgaacctgacggttcttgatatcaccggcaacgccttctccggcggcatcaacgtcaccgcgctctgcgcttcgccggtcaaggtcctgcggttctcggcgaatgccttctctggtgatgtgccggccggctttggtcagtgcaagctgctcaacgacctcttccttgatggcaatggccttactgggagcctccccaaggacttgtacacgattccagagttgaggtggctaagcttacaggaaaatcagctctctggcagcctcgataaggccctcggtaacctctccaagcttaccctgattgacttgtcatataacatgttcaatggcaatatccctgatgtgtttgggaaattgaggagcttggagtccttaaacttggcttccaaccaattgaatggcacattgcctctatccctgtcgagctgcccgatgcttagagtggtcagcctgaggaacaattcgctgtccggtgagattaccattgactgcagattgctcacgaggctgaacaactttgatgctgggaccaacacgctgcgtggtgctataccgcctcgccttgcctcgtgcactgagttgaggacgctgaaccttgcaaggaacaagcttcagggggagctaccggagagcttcaagaatttgacatcactgtcatacctttctcttacggggaatggttttaccaacttgtcatcagcattgcaagtcttgcagcacctgcccaacttaactagcttggtgctcaccaataacttccgtggtggtgaaaccatgccaatggacggcatcgaagggttcaagagaatgcaggttcttgtcctggcgaactgtgcactcttgggcacggttccaccttggctgcagagcttgaagagcctcagtgtgctggatatttcatggaacaatttgcatggggagatcccgccatggttaggcaacctcgacagtcttttctacatcgatctgtccaacaactcattcagtggggagcttcctgcaacctttacacagatgaagagtttaatttcaagtaatggctcaagtgggcaggcgtcaacaggagacctcccattatccttcgtcaagaagaattcgacttccactggtaaaggcttgcagtacaaccaactcagtagcttcccgtcatcactgatcctctcaaataacaagcttgttgggtcaatattgccatcctttggccgtctagtgaagcttcatgtgctggacttgggctttaacaatttttctgggccaattcctgatgagttatcaaatatgtcgagcttggaagtactggatttagctcacaatgatctcagtgggagcataccatcatctctaacgaagctgaactttctgtccaagtttgatgtttcgtacaacaatttgtctggagatgtcccggcaggaggccaattctccacgttcacagaagaggagttcgcgggcaatcctgcgctgtgtcgtagtcagagccagtcatgctacaagcgggcggtcacgactgaaatgagttctgagacacgttttacttttgggctttttttgaccgtggaagctggatttgcctttggactgttaaccgtctggaacgtactgttctttgcaagttcttggagggccgcgtattttcagatggttgataatttctttgataggttttatgtgataacaatggtgaacttgaacagactcagaaggaaatgggaacataaagatcatccttaaaacaaagtcagacggggttctccactagttctaactaggctcttcaatcgaattatgtactctgtatattgtatttctccagcttttggtgtcttgattgttttcaactcaggtgtcatttagcagtgctgctttcacatcgtattgtagacatgatttccatttggtacagatgtgccagtgttgatagctgcgtggtggatacttaagcttcaagttgttctctctctctgtaataactgtagctgaacaaagccgttttgttaatagagatgggagagctcttcttctcttttatatgactagtataatgtcggtgcgctgtaacggaattgaaattatgatgttcagttttttttgtctatgcgttttgtaggttcattttcatgttgaaatactggttttttggtggggtggtctactactctactcttggggatgctcttttagtaggaggacgacgactccgttggctctccgcaggcttgggccgtaaccttcaggcctcgttttgggcagttcttttctcggcctatctacgcctatgggccaatgagggccctattcaaacgaagtctgaaatggcctaataattctttgcttggttgggctgggacctggggagtctaggagtggactacttgaagccaggtgagtgaacggtaagcccgtgagaacgaaacacatgctcaagtatggttgcagctctggacggagaaggcacatgcgaatgcgattatacaggagtcaaaacctcatcaacttgcaggattattctgtccaatctttatttaatcatcacgacaggccagctgtagattagtgctgctaagtgctaactaaccgatcagcttgtactctagctcagcttcacatgaaaatatacacagactgcatgcaaatcaggcgaggtacgcacgcgacagataaacaatcagagaaacacatgcatataaatagccgcaagttgggacttcggctgcaacaatccaacgcagctgtttttatactagtatttctgtgtgccatcacagtagacaacaacctttgctttctgctccgccgaatttttccagttcacatgaacatactacttcgactgcagcagcatcgatacactgcacaagaaatttcctgcgtctataagcggtgcatgcatgatcagaaattcagaattcagagatgcagagaagaccaaaatggagcaggcccgtgagtgggagactggagagtacgagtaatgggcgtagctcaatcagccggaaatttaggttaggtcccactataatgaaccgactcattgagacaaaaacagaataatagaatggattattatactagtacagaacaattattcacatcggaagcaattatgcaatgcattttgtgatcttaagttcttaagttatgttgatttcggcgatttcagtgacccatctcacagctgagacagtgagcagcaaggtgattactgtagataacaggcagcttcatatctcgatcggttggctggctggttggctccagatcgacggcgatctcattaaagaaagtaatggtcacgcgttgctccaaactccatggctggcacgtacaggtgcacgaaaactgcaaacacacctacctgctacagtacgtacgcggtggacacacaagtgcagtacagacgatcgacgtgagctgagctctcccaagtccccaactataatcttttttataccgacaaattaaagcgtcggattagcggcgagtttgaacgtggtagccgcatgtagtagtagaatccaggcaaggacaacgccatctgatgggaggacccggaggagttggtgacgcgcacgcggctggagtcggacagccggagccggtggccattttttgctcggttggcgccgcgagcgcgcaaggcggatgcgtatgcgcggcgcgcgggaggagacgggacgggatgtggtggtaggggtaggtggatgaggtcggttggtggggcgcagacggctcggccatctcgtgcccgtggaagactgcagtgtgcaaccagtagggggtcgatagctacttaggccatccctaacctagaaaccatctgttagatttcatacttgtagaaactatctatcaaatggatggtgtcttcaaattaaattctcatccaatcatctatattctctctccttttatgcatctatcatcttgtttttattcttggttcctgtgtatagatgttttcttgtatgagaaatggtttcttcatctttttacatctctcctcattaactcttttgccacatcacatttttgcttatgtggcaatgtattaaatgctatggacactagatgatatagagggttggggatagccttaaccggaggcgactacgatccgaacatccgacaaaagacaaaacatcggacgacgtttttaccatctgtaatgtaaagaaatgttgttttattgttaggcaaaacatgttttgacaaaaaaaatgttaatatattgtatcacccagtcgaaaacatttcatcgttccataaaaaaatgtttcaatcaaatgcaacactaaaaaacaatgacgttaacacaaaaaatcaaataatgtaacgtctaaggaaaaatgactgctccattaagaactcatcgtaccatttacagaacaaaagagactgtgtttgtaatattgtaaacattatgtgtaacatcgaagaccatggtgtgatgtgcaacatcctcgcatatctagttgctcccatcggcctcacctttatctacatcagtgtcgctttttcaccttcttcttggtgacggtgagggacatgttagctataagaagtctcctacgcgaaaccatctctactgccttcctttgtctctccatggtagcctcattagggaaaatgagggatggtagaggatatagagggctagaaaagtagaaggatagagaggagccttgggaggagggggcgatagcggtggcttgatgacgaggggaaagcagatgttgactagacataagcttcattgcagtaagaatgagttcatcatggaggagagttagtgaaatatatggatgagtaatttacagatttttttactctcgtattggacgaccggttcgaagcatttttcgtaactaaccttattaatactcaactcatttgaacttattttcctaattgttgagttgtgatccaaattcatttgcacttaataaaggccagcttctgccgtagtggagcggaggtccgtcgccgggaggcccttttagggttccaccatatatatacctcttgtaaaccaccgtgcggcgttgtaaccttacctcagatataatgaagatattttgctggctggtgcccgtggttttttctctcctgttttgggagggttttctacgttaaatctcgtgtctttgatgattgatctattgttttttatcgtttgttcgcctatcgttttctaacactaataagccaacttggctcggctcgtgagcttgatcgataacaaagctatatttcattcactaaccaccaaagaattcaataaatacatataatttgaatataattaaatatcacatgctacctatatatacgatgatcttttgtactaaggctgactgacttgggaagctcaccaactaaaacctcagtatacataactcgactcgagtccgagttgaaatgagccaagtttgatgcgagcctttgtttttctcccccacaccctactgtgcaatgcaagtgcaaccgacgatcgctgtagttgtacgtgccagagggatctaaagcaaagatccatgcatgatacacgtacgacatggccgcttttctcgcgcacctttaccgtgcacccccagcaaacaccggtcacatccattccatgattctagcgctttagattgaatagaggtcaatggggtcatcctaacgtactccctccctcccaaaaagagacaaacactaatttatttgcccaacgtttgaccgttcgtcttatttgaaaaaaatatgaaaaaaattaaaaaaacaagtcacgcataaaatattaattatattttatcatctaacaacaatgaaaatacgaattataaactcagggtttgactttttttttgggacggatggagtagtatgaactgtcaaatccatgatcccccgttgttgggtaattccactgtagcctgtgacccggaccgacgcaaatttactccacaacaacggaggcgaccgagcgcgacgcggccgtgagccgtgacgagcttgttcccccacacggccacggctgccgctccccgtgacgacaacgagtgtagcggccgcgagagcgagagcgagaccgtggcgcggccgcgtcgtggcgctctcggcttgcagacgagacgacgtggggcgcgcagcgcaggtggtggacggacgcagccgcggaccatggactacgctgccgcggccacagcccacaggagaaagccgagcgctcctcgtctgaccgttcgtcaccgtctcggttaccgcgcacgcttggccccacctgtcaggcacacaccagttaccgatggctggacgctgtccatggcagtatgtaccaccggccgaggcaactggggtttctggctctgtggaccaggttcacgcctcttttggcttcaactgtggtgaggtacaggacaggtgggtcccggatcccccaaagcgcaacgacgcctcgtgaactaaacccacggaaaccaaaccagattaccagaaccgcttcttcttcttttgcttcctccggtatcattccagttttgctacctcctcacttcactcctctcatctcatcacatctcatctcaatcttttgcgccattccatcggagctagcacccagcaactcacgagcaagcaaatcaggtaataaagcagcatcctcattctctctctctctctctctcttgtgctttgttgtttgattgcatcttcttttgggggcggagaatcatacgcattccacgggccctttgattccagggctcggatccggctgttgtgcatggccaagctgggggcttgtgttcgtcgtgtgtgattgggctgcttgggttgtttgctgcaaaatctgtcactcgttttgtttgggttcttggcaatgtagctgctggttttctatgactggtctcaagttccgagtttaatgcaatgcgggagggatttgtgaaattacagcaatttcttaagctttttttccttcttggtaggcggtacatgccgtggttaacattcttgttagctgcaggctgcggctgatcggtgaggcgagcactaagagtatttttgacgtgtttaccggaatgtatttccgctattgctccgaaatggttggggttttcagtgttatctgtgagaaaagattagtcttttcttttatattttctaaaaaaaaggatcagtattttattgctcgcgtgaactgcatttgcatcagttctgctttttatttaaaaaatcgttgttagtcctgctctgccaaactaaagttttagttgctttgtacagagtattggtccaaattgcattgagcattttcagcacaaattgatactgataaactgctgcgacctacttctgcaggtttagatagcaaggaggccgcagagaagtggagaggactcacgaatcacgatccatttctatcttgagggaattggggatagcaaaagtcagtgaaaaggtactttttagttctgacccatttcttacatcgtcacttttattaagtgtgtgcttcagattcctagtggtaggaatgacccaacaaagaccatttccaactaggttatgcactgctttagttttagcattatgtgtggtgtagcttgagagcatgtgggccaattgggatgcatttgctgttgttaattttacctatccgtttgtcttatctgctttgcaacattgcatacatatggggatcttgcacggttggaaaagacttcacaatcttggcacggccctctcagatcctacttattggctgcaatattcgtatgaaatgctagcttgatgcttgttcttgtgtttcttactcctacctatctgttttttcccctttagtttgcatcagttagtcagtttcattcatttcatttgtcatttgcttgttttcctgtctgtagttggcgtgttgcacgtttcacattcgctgtggggtaagcttttcttatggaagaaggtttactgcaggttagtagcgctattgtatctgtgcatttttctttttggaagtatggctactttacttaatcgtattgcttagacattgaaaggttggattagcttgaggagattgtataagaaactaatgatagtgcgatactgaattgtgcgtgtactgcatcatgattgctgcagtaagataggtgcagcctttataattagttggtttggtctcaaagcttacaaatgaaagcttgtaagaaatcattatgttccgtacaattgttctggtgctttaataatgttgttttgttgtgctttgccaaatgatggtttgcttaccgttactaatagagagtatggagacgtcctactagtggttggtaaagcatgttagcacacttttccatttggtgctgtataagatgatagtacaataatataatcatattggcagatggggcatgttattagtactttgagatcttatggctactaaacgtgattttgcacatggcattgaagtgagagatttcttgcagggccagatgacaagcatggacaaggcagcaaatgtggtattggatattgaagggctgcctcagcaacctgataaatgctgcactggaagtccaaaaatgactgtatgttcaatgactcacataagaccaaaaagaaaaggatagtggttatctcactctcccacccttccattttttatgtgcagagagccctatctcgcaagggctcaaatcgcatggaaaggaggagcggtgaagagcaggaacaagatgacttggtgaagaaacttattattaagggtaacaagctactgttcttctctgaattctttttttcttaaaaaagttgtagtctctgtaattctaaatttttcattttgcatacttaaaaccaaacagcttatattttgtttggatcaactcaaaccataatctttgtgaagttccatttgatcttagccatcatcacattgtgtccgtgagctgtatgtagatgagaaaaaggtcaaaagcggctagctttcttttgtgtgattgcttgtatttccatccagcggattttttctatcatgttcctacgatatgtggcctgcagatcgaggagccttgtttctccaattccaactttacatttagctaaataagtattggcttggtattctcggactttagtagcttgtacttctgtttacatccaagcctaataatcttaattttagcatcatttttataagtaaggatatttgttttccttttttattgtactacactcatctggtatgccacagcatcaacactgacagctgtttttttttttgcccttttgttggatatttatctccacagttgtgccatctcagttggagcagcttagatgcccctggtgcagaacaaagccttggtcactccacaatcacaatgtgctgcctgtgcacctattctaactgactctggggaaggaaggaacaagaagtttaatcgacttacttcggttcacccccggaaatcctactgttctttgcaactctgtaagtcacttgcctttctgaaattgtaatatgtctatgctgttgaagcaactggtctgagacactgagtttggtttccaattggtaccatgccccccacaagtggtccatgttctggtgtgtgcttctctgtactgttcaactgcacttgaatagtgtggcgtggttttcttgtcagtcattatcatagtaatctgctacacaatttcctgaacatactgtactctatcccttgcttgcccatttgtctaggtttgaggccctagtcagtatgcacgttcacacattaactgtattgcatgctccaagagattatttgtgtattcatagcagaaacactgattgatggtacgcatttatgccattgatggtacaaatatcatttgcttgtgtttttagctgcttgttttctaagccacatcttccttctcttttacaaacctattatacccattttgatttctcttccttgtttctcgtcgcaggtcgagcgtgggcacaatgatactgatatacttcacgctcgcaatcaacggtggcaaagcggaggcgtagtcgtcaccggagcgaaacacgacaacggtttcagaagtgcatttcatagctggaattttcgcttctcgttatcagattttggtttgtttgggaggagagaactggaggaggaagcaacagtagcagcagcaatgatgcagccaggctctcatgcctgacacacaatgctgggagtgttgctcgatcagtgctccattgtcacctttgcctgacctgatctccctgaattcttttgatctgtacatgtaaattgctgtgaggcctttgttgagaggtagagagagagagaaagagagatccatggattgttgttggtgtaaatgagctggggcgaagctatccatttctgccatgcgagtcccagcttagctgtaaaagatctgaagcgaataattatgcctttgtggagttgcagtgcatctggggttcggttcttgaatgctcgttttctgctagtggcactggcaccgccaacgactcccatttacgatatgcgcgcaggctctgcattttctctgcactctgcattacacacgtgctatttgtcagtcagctatagcataaacctgtggaatactctgtatattgcaaattcaaggtaattagtttacatttatatttgcgtagtttcagccagatactgttttttttttctcctctgaactacccctccgtttcaggatataagactttctagcattgtccacatccatatatatatatatatatatatatatatatatatatatatatatatatatatatatatatatatatatattaatgaatctagacatacatgtgtgcctgaattcattaacatctatatgaatatgggcaatgctagaaagtcttataatatgaaagagaaagtagtatataattttgttcatatcaataggatgcatcaaacacattttaggttggtttcgtgaactgagcggctcagacggaattgaaagttttagagttggcataggaaattgtattttttttcctgggatttttaatgtggatgcgctcagcatggtttgataaacaaggactacaatgttttatagtaactctaaaattaagttttaaaatttaaattctggctgcagctcataagctcaagagcgaactatggagctttgggattagggagttggcacagcctatttttcactttcatttgtcatttgctcgttttcactgctttcatgcaccattcttcccttggttttcaggattagcatgaacttattttatgttactagccaaacaatacctatgagttacaacaggttattcaaaatagctaaaataatatttcattcttattggaaaaaaaatattagcttctacttgagaaacaagattcttcatcttaaaaaataaaaagaaaatcaatggctccatctgctttaacaaaatgcccttttcatacttcttaccgtaaaaaatcgtcggtggtgtttccttttcacaaaccgaaatcgcaatgtaggccgaaattatctcgaggccgaggcccaacaaaagtttgtgtccgtggccgtggccgtggcctgcttcatccgggcggcgtgcggcgcgtgcagttgcgggcctcgcgagcgagcgagcgagcgatctccatccccaacctcaacaatccccttcccttcccccatcgcgcgatgctggtggagtgtggcgtcgcgacctagccctagccctagcgccaccgccaccgccaccgccaccgcctgctcgctcgctcgattccccggctccccgtcgctacctcgctacctcgccgcgccgccacagccgccggcgccgtctctcaccgggatcgggacaacaagcgccgcgccgttcagtcaggcgacgggggcgtgcgtctccgctctctggggggcctcgacgtcgcctcgccggtgtttcggaagaccgtcggcctggttggtatctctgattgcttgattactgctagggaatggatgggtggatgtcgtcgacggggtgggtttagctttagcggattagcgcgtatcacatcccctgattccagtcgagtagacaggataatagcaggtggagggtttgaattttttagttatataaaaggataccttacgttggtgctgtttgatggattggtagaggtggtgctattcttcccttcatcagaatgtcaagcggcttgcttcgtgtgtagattactactagtatttttagggtttgggtgcctgctaatgtcaccgaataggtttcgttagcttcttattaatgtttttaatgcactttgtcgcgatatggatagcgagaactgctatttgtgccgttttgagatggtgtgtgtaatttactatgtcgttatgggatgtttttttttttgtctattcctttggctcacgtgtccctcctgctgcaatactcatttttgtttgttggatgatcagttgtttgaaccgcttaccttttttataggcgcatataaaagtgatttggtggtcctggagtattcatttggtcatgtattctatattttggaaacttaagttttaatggattaatctagtggaggatgtagtcaagaattttcttttgttggttcctaagagatttcttggctcgcaagttgcaacgcgaattgggctctcatgtattttactattttagaaagcttttaattatcacagatatagtagccgaacagattggatatagctgtgtattcgagacatctgtttgttatcttatacagggcatgctccgccactgaagtcaaaatgtagggagatctgttaagttgtataccatattaggcttagtttattcttttatctttctccatttgttctgctaggaactgagctatcccatggcatcaccacaagaatccaattccttgtgcttgaagcgcaagcttgttgatgactgcctgtcaaaagagtgcaagtctcgtcgcatcaaaactgagaagggaccatcatctgattcatctgccaagcgctgcaaatgctgttgcactcgacctaaccttgccagtgattgtgtcaattacctaaaaagtggagtgcccagccgtgttatgttttacaaacagggttcttggcacaattttcctgagcagataatgaagtctctcattgaagaatttagaagcaataaatctagtgttgttgctgtgatggacgatgagcctgttcttgttgatttcttgtcgatgaccctggtcaacctaaaatctagaaagcagcggtctgtggcatggtttgatgacactgggaagtgcttttatccttctctattctttgatgaggaagctgatgaagtggctaaagtaggcggtgattttgagggcgccacacagggaataatgttggataaggttgcaaattctccaccagaagtggtgaagcaagttgtccttgaatctagtcctccagttccacagaagcctgccactgcagacatattacgcaaaaagatcgcatctgtggaacgaggcagtgaaggctttctttttgcgcaggaccttttcctctctggcatgggtccatttgcaacgccaaataatatactgcacatccaccgctactctccgaatgatatcactgcacagtgtagacttcaagcttttgaaaaacaaatgatgtccaccaaggaagaacgtggtgatgcaaatgtaaggtatggatggctgggatctaggaagaatgacatagttaggatcctaattaatggttttggtaacaatggaaaacctgctgagaaggcaggcttgagtgctggtgtttatctttcaccagaagaccgagcattttccaggtactttttataaacttaaaaaaatgtattgaccattccattttaattgtttatgtatttacattatatcttgcttgacagtgttggtctttgtgatgttgacgaaaaaggagtgcaatatatgttgctctgccggttgattttggggaacatggaggctgtcatgcctggatcacaagattcttttccaagcagtgacatatatgattctggtgttgatgattgctcaaatccaaagtgctacgtcatgtggccatctcatcttagcacccatattcgtttagaatatcttgttagtttcaggctttcctcgaaagttcgaagtaagatgataaataatagttaaaggtttttatcatgttttgttgatataggtggagtgatatattttttggttcacttgttttcagattatttacttggtttgaagggtttatggtttcacccatcaccaaaggaagttgcggtggatatttctactcttgtacctgtgaggcaacctagttttcttcgtttcttcttttccattgacactctggttttccagctagatgtgcatgtactgctaacagtggtagaatagaagtctgatctgagagcaatccaatttcactacagattgttcctcccttctttaaatgacaaatgatcttggctttgttgtacatttttatgcagataatgagtggaaatgctgagggaccaacttccccttggatatccttcagagttctttttgccatgattcaagaaaatatatcatcggtagcaagggaattgctcttccatcattatgaagagctgaaggtactaactaaccaacaagttacactgtgtttatttattagcattggctgtgtggttggttggtgtgatgggtactaaaatgttttaattgtttatttgacaggaaaacaaaataactcgtgaggagatggtaaagcaaatgataatattagttggagagaagttgcttttggaaaccttgaagaggcttcattactgtgtaagtcggctgtcccctgctgttatccttcgaaacaatttctggtgacatatgcttgttttctcagttcacatccatactaaggatacttttaatgctcatatacttttaatacattatggacaagtttgcatacgacaacaggcacaattttaggaagtttttgttcaggtgttgcaatttttataagatggtttattatcacattgtttatcaaatcacacatatttgtcaaataaagaaatatctgctaaattttttaaacgagtaataagaaaattggtaggggctaggaaactagcaaggccttgaaaaaaatatagggaactctcaaagcagccaaacatgcctaaaacaggcacaggccttttgaattcatgtttggataaattatttggaaattttcctcacttgtttcaggcatcctcttatttttactgtaccagtttatctgtactcatatttcacatagctgttgctgcatctgtactggtgtgattaactgcacctttcttctgatgccattgtgtccttggcttctgttgcagccatcattatggtataaatctgctggcaaaatagcatcttctgatcctgcgaggacagctgcagaagacaggtctttggatcaaactgggaattgttcattaattgttagtgttgcgcatggtgattctcatgccccaaatgcagtagctgaaaacagcaccagtctttgcaccaaaggatgtgatactcctgcaacaggcatgatttccaagggctatgattctctggcaccaaaaggtgtgccggaaacttctacttctgtcggccccgtacatggggcttctccaagtgtggaacccaaagtgagggattctcctatacaaaccgttttatcaggaaacattgctactgattgtgccaaaaggcaagatccattggtatcaagagtggcacctgtagctcataatggccttttaaggatgccatctggaaaatcagcatctctcgcagcgcaagtttgcaattctgttagaccaagcacaggaccttcaggtcgtgcttctacagaaccaaataatgcctctaaaagttgtgggatttttgctccgggtatcaggccaaagggtggtgaatctcttgttcctagtttggcattaggaaattccaaatatgcaggtgtagaaggtctcaattctgcaccaagagcgacacctccgggtattaggccaaagggcggtgaatctcttgttcatggtttggcattgggaaattccaaatgtgcaggagcagaaggtatcaattctgcaccaagagtgactccactgggtatcaggccaaagggcggtgaatctattgctcctagtttggcattgggaaattccaaatgtgcaggtgcagaaggtatcaattctgcaccaagagtgactcctccgggtatcaggccaaagggcggtgaatctattgctcctagtttggcactggggaattccaaatgtgcaggtgcagaaggtctcaattctgcaccaagagtgacacctcccggtatcaggccaaagggcggtgaatcttttgttcctagtttggcattgggaaattccaaatgtgcaggtgcagaaggtctcaattctgcaccaagagtgacacctaaagacaaggagtttctttcattgagtatttcatcacaacaaagcccagttcttaattcaggtaaaggccatgatgggacatcaggtgccgcacgtccagtacatgcaccaggtttaccctcttccaactgcagatcatctgtagcacttcaagggttattcttgtgtacaaaatgtagataatcaatgctttcattaacgtgcagggcatggaaatcctaaagctttggccactgaggcccgtggttctctatctctgagtattgcaccgaatgtccatgaccctccagcatcaagtaaggagcctaaggacgatgcatctccaatagcaggcatggtctcagaaagccagcactctcaagcacctaatgcagtcaccaaggggtataatgctcccacacccagtacggtgcttggaaactcttgccatggaacaacattgttggtaacatcacttgtttttttgctaactctcatgcttccttggtgactgcagtacctaaggagtcaaaaggccagcatttacagagtggagtgcacagtcaatcgtctgggccagacgatgctagcagcagcaatgtcgctcgggcagctgataccatcgtcgccctatcaactcttcgagagaagggcaggtagatgttgcagccccttgtgctgatcgctctttgctttttgctgggccgttctctagtgctgtacatgtgatgtgaatgttatacaccgtcctgcccaaaaagcgtttaccgtcgtaccatggtccatgggtcggtccgtttaacttataggtggtgtaaaccggttggatggattcgtttgttgtaggttacctgtcaccttgtcgacttgaacgtgaatcgttgcacatccctggcagtaaactttgtcatggctggtatcttcggtgtccgtatgggttgtgttgcctcggtgtccgtatgggttgtgttgcttcggtgtccatatgggttgtgttgccggttttccagttagctatacatacctgcctagttcccatgtcaaatttaatctttcgtttactctagtgtacatttagtgttcctggaatatatgggtagtgctagatagtagttttgagatgccaatatgcaagcttggttggcatagattgatagataggcttgtgttgggctgtttttgcctgggatccagtctattctctatgtagactatgggcaggatttccatctaaatttcggcccaagtactatttttcacagttttagcggagggcattctctatagtctatacatacccatccagaatttaatcatataaaagcctagtagtttgagaaatgattcgattgagcaaaaggctagtcgagcctagcaacaaatggaatggacaaaaggcttgagcatttagcatgtagccattatataccatctcgtgctgcttgccacgtcggatcatgatggcttgcactggaaaggccagtctagcctttaggccatttgagtgccaagcagcacacacacatggcactttgatgagtctttcctcctttcgctgcctggcaatcgtggcactttgaggtgatgtctcccttgcttaattagtaggcacactgacctgcctgtcaaagaatgatatgattactcgatcgtagtagactttttttgttaactaggatgcctgcaccattaacctccactaatcggggtgtaaagattcatcagacatctgagtcccagttcagatagcattaacctccactgatgatgctagtggtgtcgcctcatgtcagtgtatgtcaccctgcaatttggtcttccctggataaaagctttgtggaagatgaatggataaaataagcataaaaaaatgaaacaagaggagcaccagatgaaaactcaaaactatactgtcagtctgtcatgattgatcagcattgattaaagatttttttctggaaaatgtctatcataataaccaacagaaatactttgtgatgaattgagcagtcacaatgtgcactatagattcttttgtgataagccccaaaaaagaaaaaaaaaggagaacgatgctatcaggagaaccatgtcgtggtctgcactccaacaaagtagaaatgctgtgttctttcagaaagaagtagaaatgctgtgcaagtggaggaacagaatcacatactccattttctccccggcatttctagtccaaagtcaaaacaagaacaagaacctttggatggtccaactaaaactttcttggaaacgtacggttgattttgatcgatggcccagcacccagaatctgaacttctgaagcttgaaagaacacgcataattttcagctggaattggtttgcatcattatttcaaaccttgaacagctgcaactgtaaaacattgaccagcggcttaattacagtttgaacatatagcaaatcactaaacagtaaaaaaaaagaaacacttgcctgtggcaaattaaagaaaattagcaacgaatcaaggaacccacgtgaagtgaaagtgaaatgcaggcatgaataaatgcacggcactagaagtggaaatggcacaatttggaatcaacacacaagtggtaacctatgcttgcattagcagtggtggtcgcctgggcatgcacgtcaaaattaatccctggcgattaagcgatcctaatgatgatcattgacgcgaaaacagtcgccatggccggccggtttctcgtgttcatcgaacaggatcatcactggtactgtgctactaggcaccacaccaaggcaggcatgcatgcttagctttgcgaaaaagttgaaaggctgacacttaaccaccaccaccacctgcagctaatagctagtacgccaaatgcagaggcccatctcattcatgctcctagctatatatatccatccagttctttttttttcatggacccatatctaaaatcactctggtttccttcttttcccttgtgagattcggtctcgaatcaacaaattaggagggtagattcgtcatatattccgcgcaatattaggcttcctttggaatggagaaattttagagattccttttatgaaaattgaagtaattcgtgtaaaaatcctgaaatttttgtatatgttctgaaggagccctgctgctagctaggcccttaactgtgcaatttgtgaaatatgtttcttcccaaacatgctttaaattgagagatgaacctaatgtaatacatgattccaccttgaatttgataagttcaaaaaatggacggctttaatttttcacctaagtaatatatttagtttctaaatttcatgcgatttaaattagaggtagttaaatgcagttaaatttgcacggagttggtttaaaaaatatcactccatgtccattgataaaaaaaaaacttgtgttaagaaatgacctatggtgaacaacatcatatatgagacagggagctcaaagcacgagttagagcggattctgcatgtcgagaggctaggcttcgtgacctttttttttttaactgaatttggtcgaggtctttcttactacccatcaaaaaacataaaaacctggaactggataggactgtcgagtggtctactccttcttgttttcttttttctttaaagaaatacatccctttaaaaaaacaaatatgttttattataataatagaagcttcacttatctcagtcaagtatacatcgaggtgatccaattacaccgagagcactcccaaactcggcatcactaaaatgcacacagccaaacacacactcaaacgctaaaagagagatcatagagagtattaaggaccatcaatcataaattgcataaacattattctttctccaaacctataattaacaaatttcttagataatgttttgacagaagagagcttaggtacggacatataggtgagcggctcaacgcgtttcaagccttcaacgtacagccggtccaacgtacgattctcatatataccttccttgaaataaactcagaccttattaatcaaattttcttctttccctctcaacatcaagttcaaaatccagctaaatttgcaatactaaaacctgtacttgttcgacaatgactggtattttaatgaacgattaagcagcagctgtctgatcgatctggtgatctcatcattttttccccctaattaagactcgctggagaccacaacatcgttagatcgccgactacgactgctgccactgaccagctgccaagtgcatatgcagatcagacaaacaagttttggtcaaaattttcgcgtaagcttccgtttgtccgagagattattctcctaatcttgatgcgtacgtacgtggctacgttagctccagcggcagtgtggctggcgatcgaaatgacgagcaaattaaccatccatcgcatgcagcgtgcgacgactgtccacgtgcgccgccggcatgtgttgactgaacttgctgccgtcttgcagatctaaacttaaattcatctcgctttcagatgtaaacgtttcaatgtagcgtttacttcaagctcttcttgcttctagattatttataacctgttcgtaataggagaatgcaaatggcagcatgctttttctgagcttctaaatggtatgttatttttttaaaggggcaattgcaaatttaccactactttaaatcattattgcaagactgtcactagaaaattgcaaaaatgccactagaactatcattcgagtggcatccttgtaatattgaaaaaaccggtggcaaatttgcaaattccccttttttaaaagaacttttaatatatgttcttttatacttatatgttttaaatccacctttcagtttcataacagttaatttatttatttatattctcgaataattatcacatatcattcatgtattggccgttccagtccattcattaaaaaaataaatattattagaaagcaagttgaaccgctttaaataatttagggtgtaaaataagctgaaaaaaattgcttaggggttaagtgttcaacagaaatagtttggaagtaaaatgaacctttttttcaaaaagagaaaaaaagacgctttcaactgtatgatactgcaagcaacagaaattaatgatgtagtattatgcatatatatatatatatggagtaaattaaagattccatgtatgaaaaatgcaggtttaactaactggcgctgaagtcaaagttatctgatttttttgtcgtcctgttttcttggttagagtcctatgggcatatagaaacctaagttttgtatgaatcgaatcttgttttggttttgacaattttgtgggtttgcacctaacggatcaacctaccctaattgttaatgggtgagaactgagcttaaatattagctgtaaccagttctacttagttttaataagttattaattagcagctaatgtctcatctagctagctcaaagtgcctgccttggcgtcacatactcacatgcaatgcaaagcttaattcagctagcatgcattggcatgtttctctgcatagactggcttagtgcgtacgtgatcgatccacccatatgaattaatttcttaccgtaatcaagggcatgatttaggggatttaattaatcgatctcttctgccactgttacactctgaactgatgaattccttgcaagcctcgtccttagttaatcttgcctctttatttgttcttgacaaattaaggaaaatcgaaaaatgtaatagccttttccatcctatattgatttgcaatatatcatgccataataattggattcctgctcatcaacaaaacaagttgggaagttgacttgtattgtgtgggggcagaacaaggtgactaggtgaggagttggtggtcatgtgtgtcgaccaaaacttggataatctattcggtttctttttcaggatcaacgcttgcactatcttcttggcatgcagttctggtctgacatgatctagcaactccactgaccactgtatgatcccagcccttttctcactgtcatcaccatatgggaacaggacacgatctgcatgcaaatcgacagccaggttgttcttcgaatcgatactattggggtagtagtagaagaagaaggttaattaattaaattaatcaactgcatgtgattctgcatttctgaactttctgaaccgtgatcccaggcaaagctagtcgattatattagtaatgtagtatagtattatcggagctagcacaacggttacaccacgttcgagatattgacttggcgacgtcaacgcagcagcagcaccaagctgccatttttaacacaccatccagtgagcttagagatagctaactgcgattgattatactaatactagtagctagatagtgcagtaattaacctttcgtggaaagctgaaggaaacatgcttgccatggaagcaatgcagcaatgcacatatatctctcttttctgcaattggagaatgcaaagttctctgtacttgttcagtctatatgatctatactccatattctagtatcagatgcataaacgttaaacacacgtctcgttcccagcaaccagtaggctcttgcttttggctgaattctgcagattttctgggtcaaaattgcagaaaatgtcatgatcatgtgtccccgacgtggccgtcacggacgccgcggatgttaagctgcgtcaacgtgttattaatattcacctcggtgtaagaaacacctagcttgattacctatgtataacttgagcagtaagcatggctttgcttcaattcttcaatgtttcagcatttgaggcatagtagcatatatgttcagactgcagttcagttcagttgttcatagaaaaaggggcatagatgtttgcttacacagcaagcacagcatataggatgttggctgctatagctactagtaggacacaactttaatttgaggtgtcacttgtgactcgctacacaattggttactactaatattgagacactagttagtatactttggcacaaagcgataacaaagtttaatggtcaaattgccatctaattggctttgaaaaatgccacacaagctttttttttaacgaaccaaggtaagagtcaaacagaaacgatggccttttctgggctacactcaagatatcaagggccccaaatataactttccaaaagtgtgaacaaagctaccttgccaaccgcattgaggactctactgctctttcatatatagccacttggccaaattctaatgctttgctctctttttaaaaaagaagaggaaggattttctctaaaaaaaataagaagaggaagaaaaaccaaaaatgcatgctcaccattgatcctccctatagctagctgtttgattagattattaggtaaattattgctacgaattatatatctactcgattatagtgataaattaaatatattaaatattttaagaaataaatttaatagatagttaaaataaatggtctaagctaaagggaagtttttaaagaaaacataatatttgaaatatgagcaaacaatccgtttcaatattctggtgaataagatgcaaagaaatgaagaaccgggtcgaccctgagtcctcactaatttaatcgctttcatatacagtcgtcttaatttgttgtgaatatatagtgtcaaaccgtgtaatactaaatattagtattagctagcaacgtcgtccatgcatgtgtttcttagtttcagaccgagtaaaaataggacggcccgaatcgcagtcgccgtttctagagaaattcgctgaaaataacggacgagagaatcggtccaaaaacgggtcgcgaaaacgtgcccggtctagtggaaacagatgcatgagcaatttgcgtaggagaaggtccagtggaaacggatgcatgggcaatttgagaagccgctttgcttgcagggcggagcaaagaatataggcggaaaaagcaaagccaagccagccaccgaggtaggtgtggacaaaaaaaaacttaaaagctcgtgattcggattgatttgaactcatagtcttcatatatacttagaggtatagctcgatagcctaacgaatttatctagctactctctctgttttatattataagttatttgactttttcatagtcaatattctttatgtttcatcaaatttataaaaaaaatagtaacatgtataataccaaattagttttattaaagttaatattaaatatattgataatatgtttcttttgaattgaaaatattagtatattttttataaacttgatcaaacttaaaaaaaattgatcaaaagatgtaaaataatttataatgtgaaaaaaaagagtagcttccaaaccaacctaatcttttatagcttgttagcgctaacgaaccgagcagagtcgttaagataatgagctcaaacaaccgagccctatgggttgagctgactcatgtaaaaccctagaagatgaatataggactcgagaggaggagtatgaaaccctagaaaatgaatatgggattccagagaacgaatatgaaaccctagaagatgaatatggaatcctagaggacgaatataggactcgagaggaggaatccgaggacgaatatgggagtcagagaacaaatataggccccgagatccacccctccaccgaggcgagctgcgagcggtggcgcggaaagaaaccgacgaggtggcgtgcgcgcgcgcaacgcgcgcgtcgaactgaacatacgtagcatacgcgcccgcgacgcgcgacgcgcgccggctgctcgctcgcctcgcctcggcgcgcggcgcggcggccgcggcgcacgagcgagcgtttcgttcgcacgcggaaaacgccctccacgcgtcggcacgcgcacgccacgccacggcgtctcgcgccatgcgtacgtccaactgttcaccacagcgaaggcgtttaagcccatgcgccaagtagacgagcgtgcttgaccaaagtaggaatgcgttttttccccttttttttttctccaaaggaaaaaaaaatgattatcaacgaactgttgccacaaagatggttgagaaaatccaacaaccggtagagtaacaaccaagtctgtctccgtgactgacagagtgatcacctagcagcatcggttaggtctacagttcgtttgttgcacggacagctagctagccaaatgcagatgataatttgtcctccgcttatcgtccacaacaacatcgacaaacacacaacctgaataggctgttgctgtttttgtttccacgttacaacaagttgaatagtggagtagcatatgttttcaggacaatttttcgcgtactgtaccagaatctacaactttgatactcctatctagcgttgttacctggagtaccagctggagtaaaatctttgcatcgccagcaaggtaattggtaggcctaaccagcgtttacattaccgttggtaaccgcccttaccgcgaggtacggtaatagaaatatcatggtaacctccttaaatttaaataaatttaaaaaataatttaaatttttgataaattttacacggttttatacggttaccgcgcggtaaccgtgcttaatcccggtttcggtggtttggaaaaccctgagcctaacactgcctagcttggaccttcccgctttactttccttttgccatttcattccttctcatcttttcaatttcacgacccgtcttttaatcttttttttttcgctggacacagctctgactttgcctttggatgctttactcttggatgtcccaagcagctgaactagccagccattcacctaaaattctgcacattcataaagacgagcattacctacacgcagacaaaattcagcggatggaaaagagaattcagtgatgcatgcaaaggtccatatcaaaaccaaaagaggagcagcagtacgtaccaggggtactagaagtgtacccctccataaaaaaaaaaccaatactagcagcgaacctagacacatatgtgttcagattcattactaggattggattctttttaggatagagtagtaggagtattctgcaaatgaccatagcgtttaacgtagtactagtatctcatcaattcgtcaatgtaggattaatctggcagccattaactaagacagcgtgaaacaggttagattgtgtttagtttcacaccaaaattggaagtatgaagagattagaacgatgtgactctaaagttgaaaatttgtgtgtaggaaagttcgatgtgacggaaaagttgaaagtttatatgtagaaaattttgatatgacggaaaagttggaagtttgaaaaaaaagttggaatctaaacatggccttattcgtcatagtgataaattaaatattttaaaaatatacttagtatatggaatattccctccatcataaaatataaaaagttttggttggattggacacatactagcactacgaatttggacatattacttgtcgagattcatagtatcaggatatatctcatccaacaaaaacttttagtaatattttggaacggaaggagtagcttagaacatgtagtccaaacatacagcattaggaaaaaattatccagtgaagaaaatgaaaagaactagcacaattgtcaatccaaaaaaaaaaatacgattcccccaaaagaagaaaaactgatcggaagtgtggcaaaatttagcatcaaaccaggtctaaaaccacagtaaattttgtgcatacatgtagtgaacattttcagcaactacataaaaaattgcatattttccaacaacaatggtggtcttctttaaaacacaggaatttgtatcatgacattttcttaaaaaaaaaagatggacattatactccactgttcttggttctcccagcgtaagcaaaagctcatattaatactgagcaagtgaacagttactaccacttagttcatcgcttcatagtaaattcatttttctcccatttatccaaaaataagtttatttttaaatagttattacattggagtctatgaaaacagagaataattacattgaaaatagataaataaagaatagttacaatataatttgataaagagtgtgttgagttcacgtcaaaattagaaatttgattgaaattggaacgatgtgacggaaaagttgaaagtttgtgtttgtaagaaagttttgatgtaatggaaaaattgaaagtttgaagaaataattgggaactaaaccaggccaaaatacatatattgtagtctttttattactatgtattaatatgtgtgaaatgatcggggaaaaataatcctctactgtctccacagttctaccaccaccagcagcagcatcggatccatccatccacgcattgatgttgcagcgcagacccgtcgttactcgtagcttagtggtaacagtaacccgtccaccaattgctccacccgttgcagtcgccatcgacttgactctgacctgcccctttctctttctcttattcttcaagagtgtgtttaggtacttccaaagttactagtttggattaaaattgatacgatgtgactaaaaagttatgtatgatagattaacgtgatggaaaaagttggaagtttggatctaaacacggcccaagagagggtgtttagatcaaggtgtaaagtttaacgtgtcatataaggtattatataaggtgttatatggggagttcatacactacaaagaaaaccaattacataattcgtcagtaaaccatgagataaatttattaaacataattaatccatcattagtaaaattgtcaaaacatgaaacaagtagacttaaaatattcgtctcgtaaattagtcgcattctgtacaactagttattttttaacctatatttaatattttatacgggtgttgacatgaagcaagtagacttaaaatattcgtctcataaattagtcgtattttatacaactagttattttttaacctatatttaatattttatactggtgttgaaacgtttcgatgtaaggccagtcacaatggctagtgtcattgcacggctacccaaaatattataccatcttctctcaaatgaaatcttttatgaaacaatccccacagtggaggggtttcactttgacgtttccaagactaagcaaagcatttaattgatacaagttgctgggatcatttgtacccaaaatccggcgcggcgcgggagaatgcggaggtcgcacggcggaggcggacgcaagagatccggtgaatgaaacgaatcggcctcaacgggggtttcactctgttaccgaggacttggaaacgacgctgacgagtttcaccaggatgaaactctttccttctctctcatccccatttcatgcaaataatcattttttattcagtcttacccctattaaatgtgcatgacacaccagtgaaacccccattgtgactggcctaacaccccctcagtctatctctcttcaaagtccaagcagcccacgaagtacccggcatttattttcctcacccattttctccactaaaatacgcgccgcttattaaatttcccccgcctttgctttgcgtcaccatatcaaatgcgcaactagcactggtgcggcctaccagtgagcgagtctgcgagtgagagaaaagaggacacgagaaagctttagagagagagagagaggaaattgattttttttaagtttgcgatgaatgaataaacaaatctggtgaagaggttgggaggaagaagaacggctgctgatgagagccgcattggagtcaaaaccaaccgtctctttctctcctctgactttcccccactctcctcctcttcttcttcttcctcctgtgatgccatcctcctctttcggcgcctcacaatcttgcgatccagctcatgtggcggacggaatgagagggaatttcccgttcttgcgctcctggatttcttgcccagaggaggagtcttgactcttgcgagcgtgttcgttcttggtgattagattcatgctgcctcgttgcaaggtggtgtgagttgttttcctggattcttgaagttgttcatgccctgcaggaagaaggggttcattttctgattccgtcgacggcggagatgagaggttactactgcttcttccatttcttggtggtgtccgttctgctccacgtccatggcggccgctccgagagccagacgtgcgaccccaccgacctggcggcgctcctggccttctccgatggcctggacacgaaggccgccgggatggtcgggtggggccccggcgacgccgcctgctgctcgtggacgggcgtgtcctgtgatctcgggagggtggtggcgctggatctctccaaccggagcctctcccggaactcgcttcgcggcggcgaggcggtggcgcggctcggccggctgccgagcctgcggcgcctcgacctcagcgcgaacggcctcgccggcgcgttcccggcgggcggcttcccggcgatcgaggtggtgaacgtctcctccaacgggttcaccgggccgcaccccgcgttccccggcgcgccgaacctgacggttcttgatatcaccggcaacgccttctccggcggcatcaacgtcaccgcgctctgcgcttcgccggtcaaggtcctgcggttctcggcgaatgccttctctggtgatgtgccggccggctttggtcagtgcaagctgctcaacgacctcttccttgatggcaatggccttactgggagcctccccaaagatctgtacatgatgccagcgctgagaaaactaagtttgcaggagaataagctctccggcagcctcgacgacgacctcggtaacctcactgagattacgcagattgacttgtcatataacatgttcaatggcaatatccctgatgtgtttgggaaattgaggagcttggagtccttaaacttggcttccaaccaattgaatggcacattgcctctatccctgtcgagctgcccgatgcttagagtggtcagcctgaggaacaattcgctgtccggtgagattaccattgactgcagattgctcacgaggctgaacaactttgatgctgggaccaacaagctgcgtggtgctataccgcctcgccttgcctcgtgcactgagttgaggacgctgaaccttgcaaggaacaagcttcagggggagctaccggagagcttcaagaatttgacatcactgtcatacctttctcttacggggaatggttttaccaacttgtcatcagcattgcaagtcttgcagcacctgcccaacttaactagcttggtgctcaccaataacttccgtggtggtgaaaccatgccaatggacggcatcgaagggttcaagagaatgcaggttcttgtcctggcgaactgtgcactcttgggcacggttccaccttggctgcagagcttgaagagcctcagtgtgctggatatttcatggaacaatttgcatggggagatcccgccatggttaggcaacctcgacagtcttttctacatcgatctgtccaacaactcattcagtggggagcttcctgcaacctttacacagatgaagagtttaatttcaagtaatggctcaagtgggcaggcgtcaacaggagacctcccattatccttcgtcaagaagaattcgacttccactggtaaaggcttgcagtacaaccaactcagtagcttcccgtcatcactgatcctctcaaataacaagcttgttgggccaatattgccagcctttggccgtctagtgaagcttcatgtgctggacttgagctttaacaatttttctgggccaattcctgatgagttatcaaatatgtcgagcttggaaatattggatttagcccacaatgatctcagtgggagcataccatcatctctaacgaagctgaactttctgtccaagtttgatgtttcgtacaacaatttgtctggagatatcccggcaggaggccaattctccacgttcactagtgaggattttgcaggcaatcacgcactacactttcctcggaattcctccagcacaaagaattctcctgatacggaagcaccacatcgtaagaagaacaaagcaacccttgtggcccttggacttggtactgcagtgggggttatttttgtcttgtgtattgcttctgtggttatatcaaggattattcattcaagaatgcaggagcataatccaaaggcagtagcgaatgctgatgactgctcagagtctccgaactcaagcttggtgctgcttttccagaacaacaaggatcttggtattgaagatatattgaagtcaaccaacaactttgatcaagcctatatagttggttgtggtggttttggacttgtttacaagtcaacactaccagatgggaggagagttgcaatcaagcggctttcaggcgattactctcagattgagcgggagtttcaagctgaagtggaaacactatcacgtgcccagcatgacaaccttgttctgctagaaggctattgcaagataggcaatgacagactactgatctatgcatacatggagaatggcagcttggattactggcttcatgagagggctgatggtggtgccctgctggattggcagaagaggctacggattgcacagggatcggcaagggggctggcatacttgcacctgtcgtgtgagccccatatattgcaccgagatatcaagtcaagcaatatcctcttggatgagaactttgaagctcatttggctgatttcgggttggcaaggctcatatgcgcatacgagacgcatgtcacaacagatgtagtgggaaccttgggctacattccacctgaatatgggcagtcacctgtggctacttacaagggtgatgtgtacagctttggaattgttcttctggagctactcactgggcggcggcctgtggacatgtgcaggccaaaagggagcagagatgtagtgtcctgggtgcttcagatgaagaaggaagacagggaaactgaagtatttgatccaaccatatatgacaaggagaatgaaagccagttgatcagaatcctggagatagcactgctttgtgtgactgctgctcctaagtcaagaccaacatcgcagcagctagtcgaatggcttgaccatatcgctgaaggttaaggttcagtcaagttcttaaatggtttcagtttgatcgatcaagatccatcctgatagtttcttaagatgattagttctgtaaataatatttacatagcgtgaaatgccaagagttcaatttccttctcatgccacccttcaagtaatagttcatatcatcctctttcctttcttcataaggtggttgcaagatcaccacaatgtaaaaaatgcattgtaggtttaaaccctcaggataacaccctagcagttacataaccggcttttctacagatttattgtatgttctgtaatttcagctactgctatggtatgaatgaacttttgtggggcatttgttttcagtgatttgctccagctagtgctatcttatatgtccattttccatttttcacatctgatccttctcactgcatgtaaaatatgagaaatcaaggtcttatgcagcgctgcagaatgcgagcaccgccatatcagagtcagatacagatggtatggccagttacattgttctggaattcattcagcctatactggtaaattgctgtatggttttatcttttatgatcttgtagtagctccattgtcttcatttggctgatggtttgaccttgccagcattcagtactggcactgcagtgctttggcaggggtgatttcttccacgttgcatgctgttctctcatatttgttcgaaagatttaggttgggaactctttttcgtgtaggtaaaacaggatacttattagaacaggaataaataagtattatagctaaaataaatttgaaaaatggattaatttgatttttgaaacaattttcctataggtttttttttaaaaaaaatatttttgaagcgagtagaagtttagaagggaacttgtagtacccaagcctttttttttctttttttaaaaaaagctatgacctattctggataggcctctcctttgctcatgcacaaaattgtcgaccgttctacagtgcagaggaaaaacacggaaggagcagagaacggcgtggtacagcgtaccagatcaaccaccacccgtgaatcgacggcgcgtgcaggggattagccggcgaggccgcccgtcgcgcgcgcggctccatggttaatggtttcttccggcctcgctccctcaagttgaacccgagcacatcacaggcaaaggcaagccctcggcgtaggcggcgtaaagagggggagaggagatagagccggacgaatccgaacggcaaagcccgcgtggctggctggcggcctttcggcctattctcacgcgagcggctcggcccaaaataagcctattcgcattctcttctcttggtattttccactggttgggccaaaaaacgggaactacaagcagatgcagataagctcaacaacagcaacacctgaccaatgctggtcgtacgactacagctgctcgctgtagcctgctgccctgctgtttcgagtatcacacgacacttcttcacttgtgtagtgtacgtatatatggttgctttttttgataactatatatatgtgcttggttggaccgctaaatcttaatcttagcaacgggcatccttacctacgtggagtggattaggcctgtaaagttattagatctcgatccagcactgtggagcctatttagccaaagctcttctctcctgtcccataaaacttaagcagtgcagactctcgctcctctctcctctttttcacctctgcaatctgtacagactgtacttgcccccacgtagtctgaatccatcggtttacacacaaactcctagttgtacaagatggtggtggtcgcacctcataaaaatcaaccagaacacagcgtgcagtaagccaaacagaggcaataacacgcactaaacactgacagcgtggggtttcgccttcgaggcttcgagctagtcgatcgtgtaaggccctgtttacttcccaaaagaaaaaaaattccacccatcacatcgaatgttcaggtacatgcattaagtactaaatgtagaaaaaaaaacaattacacagttcacgtgtaaattacgagatgaatcgattaagcctaattgcgccatgatttaataatgtagtgctacagtaaacatttgctagtgatggattaattagacttaataaattcttctcgcagttttctgacgaattctgtaatttattttgttattagactacgtttaatacttcaaatgtgtgttcgtatatctaatgtgacaatcaaacctaaatttttttcccaactaaacaaggcctaaggccaagtttagatccaaagtttttcttcaaacttctaacttttccatcacatcaaaactttcctacgcacataaactttcaacttttccgtcacattgttccaatttaaaccaagggtgtgtttagttcatgaaaaaagttaaaagtttgaagaaagttgggagtttaaaaaaaaagttagaagtttatgtatgtaggaaagtttttgatgtgatatgatgtgatagaaagttgagaatagggagaaactaaacacggcccaaacttctaattttaatgtgaactaaacacaccctaagtaaatttctctatatcgagtaaatcggaaaaagggagccatgggaataatttcatctcccatccacataggagaaggcaatgcaacacggaagcaggggcaggctgcaggctggctgggtgggggaccccggtagcagcagcagcagcagcagcagcagcagtagcagtagtacttggcggcaatggcattggcattgcattgtcatctcacgatgcagggggccagaggggatgcagtgcaacatctctctctggtcctctccggccaccattattaccaccaaggactctcgaccgcaacaatggtggtggtgcccctcggcccggctacgcgcacgcacagcgcaagcggcaagcggaagccgatcgccgccacgccagcgggtgacccacacctcgatcacgttggtacaacatttggtccgctgatagtatgtgctcggggcacatccgacggtgccctggaatccaaagcttggacgatccatcatccatgtatagagttgtactacttctactatagtagtagtgatatgaaaaaaaaattgatttgttctttctttttgagaggtaaatgatttgttctttagccaccatttccatctctccttctctctctacaaggaccagcatgtagttgcgacttgcaagttgcaaacgcagtgcgtcattggatggactgcattgcggtgcagacgagggagcagatctcagagggcgggtttatagtgatggtggattggtgggtggctacttttgctttctacttactccgtctcatgatactcgtcgctttgaatttttatttataaattttgatcatttgtcttattaaaaatattttaaaattattatttattttatttgtgacttactttattataaaaagtattctaagtatgatttatcattttttatatttacactaattttttaaataagacgaatggtcaaacgttacaattaaaaagtcaaagcgacatctacgatatgacggaggtagcgctaatcccaaaactcaagccaaggcgaagccaaggcaagtcctctcctcccccaggcaagccaagcagcagcagtgggcgcagtggcgcagcgcaggcgagaggaggcccatgcacccatgcatgcgatgcgttgccatgttggggtctcacactcgcagcagccaaagcctgtgtgtgcctgcagcccgcggtgccgcttccccccactgcgccgcgcacctggccaaaagttggccgatcgatcaccacgccgcccccaccgcaccaccaccatactacacatactccagttgcacgcacgcacgcacgcacgcacgcacgcacggcatcgacccatcagccaccactgatcgatttgagagcgttttcttttcggttttcccccatcccccctcttctttttctcaaagacaaccacactgatcaatggcgtgcctgcccaagcacgcagtaggcggtgcatgtggttcaacacacacccccaaaaggaaaaaaaaatccataaattaagagaaaaacatttgtaaaattctagttttgatgcacttttaactgagtgtaaatgtgctgtaactaagcgtaattgctatgtaggagtaattaagtgtaagtgtaagtgcatcatacgaaatataaaaacctaaaagtctatcgtaagtgaaatagcaaaaccgaagaaaaaagaaagaaggaaaaatcgagagagatataaaaagtgttatcgttgattcgtttgttgcttattggcttataaaccgcagcaaaattttaaattttcaaactttattttaaattttttaggtgttttttcatcgcattttttcttggttttctagatcaaccacgaagagccgacgccaaccaatgccactgcattatcaaatcatgttcatgttcgggaaggcaaggaaagggacaccaggagggagaggaaacggaagatgccccgagcacagatcaggtttgcaaagcgatcgagtctacgagatagttgtggttttggacgggttaacgggacatctccactgaacttgccctttcctttcccttggggatgctggctgactcgcttgttgggtggtgtgtgacgagcactttctgggattgcataaggtgttggttctcaagtatgcagcaattatttagcgaggctattgctgtagatccacaattcgtgatcgtgcctcttcatggggatgccatgttattggctcattgcatcttaagctcccaagcacaaaagttgtcctcagccattcctagtaggatcaaggatgcatacatgcatgctcggtaagtattaattatccccttcaaacttaaattatcaagacctcgaattttttttaatagaagacatgtgaccaaaacagctaaacatatatggtagtaatatttaggcaaaaactttacaccctttttagtggtccaaatgttaaagctaagtcatgaaacttcaaaattaagttctaaactttaaatttatcatcttaaaagtggccagtaaacatgcatttttttcccctttgaaggactattacatgtcatatcatctaggagtagtagcaaactaatcacttgtattgatctaactcctagactaccaatactgctactgtagaagtagtgctagtatataggagtactccgtatactcctgtactacttgtacaatcaatacaaaggctactggggcttgcgtcaccgagcaaactaggcttacgttccctgttgggcagatcctagtactagcagaccaacgcaagctactccctccgtcccataatagatgacgtttttgactttttatttgtaacgtttgaccatttattttatttaaaaaattagtacaaatataaaaaaataagtcatatgtaaagtacttttgataataaagcaaatgacaaacaaaataaataataattttaaaactttttaaataaaacgaatgatcaaacattgacaaacaaaaacttaaaaagtaatatggaatggaggtagtacaccaacaatgttattgagacgtactccttcctgggagtagtaatggcgatccacaggagattcctgggatagctcgaattattgttttcgctgctcctaaatcagagcaacgcgagcggaaacattgttatttggtgactgggagttattccctctgttccaaattataatacttcatctgtcccaaaatataataacatatccgttaacattccattcccaaccaatcacaaccctccaccatcactactggagaagtgatctttgctgggtcggccgatttccacaatagccccggttgcttgaaaagccgggactaaaaatgatctctggtccaggtttatttgtgcaaggggactatgtgatctttaatccaggttcacctcgtgtcagaggctatcaggtcctcaaagatctttagtcctagttggtagatcttaactttagtcctggttgttgttcctaaccggaactaaagtttatagagatctttaatcccgattggtattcggttggtaaaaccaacctggagtaaaaatcaatataccgtatataatccctttgcacgtatcctcaaaaatttctatctactcttcctcctcgctcttatcctctccttatcttcctattcctcctcctcctcccctctctctctctctcacagttttatcctcttttctcatagagccggcgaggagctggcgacagcggaggcggcggcccgcgcgcgcggaggaggccgggagggcggcaggcggcgggtcagcgattttttctatataatttgtgattggagatctgagatgcatttgatttgtgtgtgatgtattcatgtgatgtatttgtgatgatttttgtagaacttgtgatgtaattttttagaatttgtgttgtatttggagatgatcgatttgaggatttggagataatttttgttatgtgatttggatttgtaatctgtgatgatttatttggggtgatttggggatggagtgaaatcaatattcaatgttaaaggcaataaaaaaaagtagcgatcgatgctggcctggcatctttagtcccggttatttgaacagggattaaaaaccgacatctttagtcccggattctccctcccggttcgctacccgggagtaaagggggttgcgaaccgggagatatgaggagttctccagtagtgcattcacttttcccacctacctccactactcatccaatcataaccctccactattcacttctaactactttattaataattgtgtccaactctaaaacttcttatattttaggacggagggagtaacttatagacttcaacatttatctaaaaaatataacaacttattttttttctcacccaataacaaacttccacctcttaatatccccacctaccttctcttttaaccaatcacaacaattacacgtttagttttacctacttttttaatacctagtatgtcaaatctaaaactcatattttgggtattttggggcggaggttgtaagaagaaagagaccaacagccgtatgtgttgtggcaataggagaattttgactattattattattctggaggatgcatggctagctggagtagctaggatcagtaccactaatgttgcagctgctgcctccaggagcaaaagagcaaaacgggacgtagacggagatctatgctgcctcctggagcagcaggctaagctatagcttctcactgatgtgtgctgggtgaattatggacgaatcattcagagttttgccgctaaagttgggggatggtgcacggcaacttgcctcgaccgccccggggggggggggggtggggggggggggttcaacaatacggggaccatactaaaaaaccacacaagcttttccctctcatctcatcgatggatcaccattttgtgatctgttggtgttggtgtttgcgactgcgcgagtggccggtggggcctcgtgggctctcgatgagtagtgatcgatcgatctttttttttttcaattttttttcttggagacacgggccgactgctgatctgatccagtgtgccgcccaacattgtgggtagctttttccagatcgtgcttctcccttttgtggctgtgaacctgcccaactttgggctgccaactttcttcgccctttgctcgaaaacattatctactggcatatatttgctcgatctatcatgcatcggcttggacttgagaaacccgggatcgatcaattgtggggttactacaagctttcttcataagataatcaaactgaatttgatgccactccgtgtagacaaccaaacaggaggctactatgtgctccgtgcagcagacacgtgcatgtaacagttaacgccgtggccggaagtagtagtagcactagtacgtgtggtaccaccggttacaaaggcacaggtaaattcaaggcgatcctccacagaaaccctgatgattggccatccgaatccctagctttgtgaggacacgctcgggggtatgtgcaccgcaaacagatcgcacacgtgcacgggcgccccagtcgcacatgccgcccacgtatgcacgcacgcacgcgcgagtgcggcatggaacgaaccgatcgaacgggaggaataaggctgtagctgtaggagacggacgcgacgagatgagcatgactcgtcgtcagtcatgcccctgcacgcgcgggtacagaaggaacagaagcgagtggtagctagtctagtcaagcaatagctaagaggcttgccgctccgctgctgtgtgcctgtgcgtgctgcgaattcatcagccacgccagcgcgcggtggccagccatgggcggcgagttgaagttgaacgggtgcaagctggtggcttggcgcagcgcaggggatggccaggaggggcgcacgtacggtggtcgtcggcagagagcgagagggtggagaggaggaggagcccgcagcttttggcgcagcggggtgggccagcgcgctgctcccccggctctgttgagcgtggaaaattcagaagggggtggtgctgttcctgcgctgtcccgcccgccggcgccgggttccttcctggacgccgtccaccgcctccacctgatggaccgccacctagctacatataccattgatctgttcagaaaaaataatttttttggatgatttcgatcgtatgaaaatctttgtaacaaatgatttaatcatatcttattctttaaaatttttatgaaataagtaatcctataaagattttgaacaaaagttagcaggaggttcaaccacttaaaaaaaattctttgagtctatccctcttatctgattcatacatttttcatgtggtttaatcaaacgatcattcctatattttttccatgtttttcatttctttattttacacttacattcatgttagaatcccgtgttttttctattactttgtttttcaatcatgctattcaactggaacctaaacgataatttccttggcacgtttcacatgcatcttgctaaatgatatattttctaaatatttctatatagaatttattttaaattttaaataaattatttttttagtttatatagttgttaatacttaattaatcatatgttaatgagttttcatgggtgtcttaccaaactcagaaacgaataagcccttagtattagaggtagaaaaatatggattttgaaataataactacagtagtcttgtacaaaactcctattatacgttctcagtgagccatatgcatgtagcagacatgtgactcggattttggtgttataaaactgatgttaattatattaactcatctaccaaaatttgacatgagatggtcaatctgtcttcggctacaaatatttgatgtttgacctatcaaaaagaaaaaaaaggggtacaggacaagatttaatttaacttttattgttaattttatattagttatagtgtataaattcttataatttcttaatattgtgtggtggtagtttttaagacgaatctacacatcattttttaaaactaaatatttaagagattattaatagttaaaagttgaaagagtttgattaaattttatcaaaaacatcaaatactatctgtgattaaaaagagtactatcgcaaatagtaaagagtaaagaggactaatcaaacgtataccatggcacgacatgcatgccatgctataaccgtgaaacacgtcgagacacaaatagtcaagcttgtctaaagtttagttcggctaagtgtgacaggaaaccacattttcaagcccatgttccccgtttaagctcggtccacgcgacaggaatcgtggacgcaggccagtgatgggaaacagaaaatcatcctctgatagtaggcgctggatatgtttgctagctgatgaaatccagctaccatgctccatgtcttaggatatttgttgcaactgtacttactcattaaaatagggagattccatctaaacaacttccttctgtccctaatctcagtcttgatcctccaaatttttaataagaaaaatacggctacacaacaaaatatagctgtatagagtgtacacagactggtccatatcttaattagtagaacttctgctgataatttactgttcatctgcacttctgggaacaaacataggagtattgatcaatagagcagctagctggtacaaagtctactatcctaataaacccaaggtaaataaaagcatatactcccactctttatcattctcaacaaataaacccaacttgctcgcgtacagtacatacagtacataggagtactgtagtgcaggccggagcaccagtacactgaactgctgcacccaattcatactagtactccttgtcaagctcatttaagttgatacgcacggtcaaaagctcatttgtacggatggctccggagcctctcgtttggcagctgagatgatcttttctcttttaatttttgggttaacataacacaaaagattaacctgaatatgccataaactttaccagtttggacccaggtaagtaggatataaagcatgagcctcacttgtcatcaacttttcaggtcacatttcctttggaaggttaatttacactttacacccccccattaccaccataattaacatgactcatcttttttgcagacgttggaagctatagctagcacaacaacatcaagaaattaagactcccatccatatatattgacgtcaatctacagatatagggatgtcgacagtcttggcaatgaagactatgatcacgtcgaagcaatttcagtgttactatcggtacagcgatcgaacaggcttgtacagctatggagaaagcgagagatcatcaagagggccaatccgaaattcttagaaagtacttatgcactaatccgatgcacagcacgagtacgaaactacgggcaaaatattcactcgatcagtagataggggcaaatgcatgcaacgtacactggtcgactagtaccattcttctttttttttttaaaaaaaaggtttttacccaacacatagaatgttttaacatatgcattgagtattaaacgtgaaaaaaaatcaattacatattttacgtgtaaattgcaagacaaatcttttaaacataattgcgctatgatttgataatgtggtgttacattaaacattttctaaatatggattcattaggcttaataaatttgtctcacagttttctggcaaaatctttaatttattttgttattagataatatatatttaatactttaaatgtgtttctgtattccacttgtgttttttcttacgacgagttaaaagattttttttcccctcctgcgacgtaacgtcaagtcatccatgtagtacgagtcaaacgtgttttccatgtctatgtcgcgtcttctttttttaatcggcgaaagaggacgaggacgccatggacatggcatgcagtggtcgacaagagcaaaaaaataaaaaaattaaaaaatctcgagttctttttttttctttttctttcacggttggattggtcacgtcacggtacgaccggcatgtcgcgcacactagggttgggttgatgtgacaagattgctccgtacgtacacacccccatccctttcctccttttttaaaaaatgaccccctgtttgtgcgctgtcacgtaggggacgttacgttgctgttgttggggatggtaaaaaccggccggactcgtggaatcaaaggctctaggacaggttgcccgtttggggtgtggatgatgatgatgatgatgacgacgacgacatgggttaaggaggcaaggttagctgtaatcaaacatatgtgtacgtaggaggacaagcatacaaggactgattatataagcatcacaagtggctcccagttaattaagtactactagtcgctaatccgcaggcagctctttaagtggaaaaaaaaagatagtacttgattagtcttgtcatgattatggtatttttgactaattgtgatttccaactcataaaatagaagcatcaagtacataattttttatacctataatatatgtctcttattaacatagaaagtaatgtctcgagatatttatgtactaactcgatggacccgttcctacttttaccatggcttttattagacagactgtaagcactatagtcagcgcatcgagaaagtatgtcccaagatacctaatgctcccctctctgttcaccggagctctacgtatataaaatattgcctacacctggttgaatatattctgttgagcgattaacattctatgtagtaggagtactccctccgtcccacataaaacccattcctatcatgctaaggtgagactagtgaagagtaaaaatgactaaaatacccttttattattgaaaaaaatagtaatgttgaaaggtaggtaaagggtttttaagggagaaaacttttcgttttatgtgccaaggttaggtaggatggtagaagttgattttttatgggacaaaatttaaactatagaagttgattttatttaggacgaagggaacatataacaaaattagcaccataagaccatattgttaacccaaataatgaaatcaatacttcatgataccggtagaatctggaggacgggactggacaaacacgtaggaggagcagtactagctgtaacacagacggggaggagttcacaaaccaacacgggctacaggttacaaggaacggtagtagtactccagtgatacaacagtggtgccccacgggaacaccagtctgcgctgcgtgcgatggagagctgcatatgccgggatggtggatggatctctctcatcaccattagagcatatataatagcagactattagccagatataaacatattttaataagataagtgatcgcgggctatagatatgtagccagctgcagcacgaacttcaagacacaatatatgtaatatgtgagaccatatattaataatatattaaataattattgtacgaattagctattaaattggttatagatgaattaaagctagtagtgaactatactattatactattaaacttgctcttacggccgtggttacaccgacccgacagccgcttacatgagcccataaaatacggctttttcaaaaccccctcgcttcccaactttttaaaaactcttcagacactgtgcgggagctcacgctactgtacggccccctgcgctgcgccccccctcgtcgcgcacacgcacacacgcactcgcactactcgaaccacgcgaacccctctctttctctctctctctctctctcgcttaaatgccacaaacctaatcatttccacccctcttgcgctctctctctctctctccaaccccaccctttctccccaccatggtggcgatctccgagctcgggtgagcggaagagaaaggttggttggtcccttgccggcggggtgggggttggattgattttgctttgctttgctctgtggtttgttgatgcttgttgttggtgttggtgttggtggtggtggtgcagaatgcggccgatttgaggagggggatggggttttcgggtggatttgtgaggggatagattaagagtttgtgcttctctggtttggtcggaggaggaggagatgagctcgtcgtcggcggccagcatcgggccgccgcagccgccgccgccccccgcgccgcccgaggaaggtgggtggctaggtttgtttccgccgcttcgcttcgcggttcgctttacttcccttctcgtttggttgatgactcgatctgctgctgctgctgctgctgcagagaagaagtgcctcaactcggagctatggcacgcctgcgccggcccgctcgtctgcctccccaccgtcggcacgcgcgtcgtctacttcccgcaaggccacagcgagcaggtgaggctgagctcacctcctcagccgtctcgtgggcgcgcttgctttgcttctctctctctatctctgctggtttctcttgtttctgacgcgggtgagctttgcatacgtgaaggtggcggcgtcgacgaacaaggaggtggagggtcacatcccgaactaccccaacctgccggcgcagctgatctgccagctccacgatgtcacaatgcatgtacgtggttccttgccctaatttctcggggcatttctcagatcgatgcggcgtcacctccactccactcctccggtttatctccatggctgtcggtgctgacttgggctggcaatttttttgcaggcggatgtggagactgacgaggtgtacgcgcagatgacgctccagccactgaacccagtaaggcgcctggggtttttgcatgatgtttgcagtgctgaggttttgatggtttgaaggcgtgaaatattctaagcggttaatttgatggtttttttggatgtgttcattcgtgcagcaggagcagaacgatgcgtaccttcccgcggagatggggataatgagcaagcagccgacgaattacttctgcaagacattgacggcgagcgacaccagcacgcacggggggttctccgtgccccgccgtgctgctgagcgcgtcttccctcctttggtgtgatgagtggtgtaatttggggctgtgctcctttcttgtacttcttgggtggttgggttttgctgttgccaataacaggtggtatagtgtggtttgtaggatttcacacagcagcctccagcccaggagctaattgcacgggatattcatgacatcgagtggaagttcaggcacatctttcgaggtaacttcttaaaaatctgtagagcttatggcagtcttgaattcttcataacggtgaattatgatattcttaaagggaatttcctaataatcatctctgccccttttccattcgataagttcaccctttgtaatcatggcttaaaaccttcctaataaaaacgttttcaagtgttctgagaaaaacttcaaccattctcacacaatgtgatgtaagcgtctttttcacttaaaaatcagttggtgtgaatggagcaagagatacttgattgaattagggttatgcatagaaatgaagttacgagatcattaattggataagcacataaaaaatatcaaattttaatatgttaggatagttagcagtggatcaagttacaattgacatatgaatacatgatactttcagaggcgtactgaaatatttactagagttcgcaggtcttacaaaattgcacaatgagcaatcactgtactggacagtataattctcggtgtaggcttctttttgtatgccttgaattcccatctttctgcagggttgaacttattgttagtgtgttttctgacacagaatgtactttgtattgatcacaataactaaaaaaatgttgtcttaacataaatgttgatagtacatatgcttgaggtacttgtgctgtattgattatgaaatgggatctgctcaacactaatgatgttgttagtaattgtgtttagtagttttatatttttgaacatgccatgttactatcttttgtagtaatatgctgtttttgacaggccaacccaaacgacacctgctaaccactggctggagcgtttttgtcagtgctaagagacttgttgctggagattctgtgcttttcatatggtttgttttccatctctcttgcatttgtgattttcttttttacctgtgctaatgagtagggcgcattgttgattctctgactcaggaacgagaaaaaccagcttttacttggaataagacgtgccagtcggccacagactgtgatgccttcctctgttctttcaagcgatagcatgcacataggtctccttgcagcagcagctcatgctgctgctacaaacagccgtttcactattttctacaacccccggtaagttggacttttaaattagtatatatgcattgttgtttttcctccccatgtacaccgttaatagaaagagtgtttgtagggcaagtccatcagaatttgtcataccactgtcaaaatacatcaaggctgtttttcacacccggatatcggttgggatgcggttcaggatgttgtttgagactgaggaatcaagcgttcgcaggtgacctagcaaatgtcaatgctcagtccttattctataatctaggccaaatatataaatgatggtactttttttagataatacttggttacctagcaccaggagatcctatacatgtttgtaggatgtatgtgactatgccagtggctgaaattgccattatctgtactttttatgctttcacgcgttgatgttcttgaaaaatctgcgcatctgtcaggacatcaccccattatttatgggaattttataattgggcctctataaaaatccataatatactaatgcgcccaatgcacactttaatgaaacacaggtatatggggactataactgaagttagtgatgcagacccagtccgttggcctagttcctattggagatctgtgaaggtaatttttatattacttgaggttgttctaaagagctgtgggggtttaaacgtgatttgtgttgtctttcctgattatcttcatcttctttagttgcattttcttatgatctgtacctctggttttcattataacaatcatggaactgccttcagatgttattgcactagtgcttgcttccacagttccactaactagtgtgatattttcaggttggttgggatgaatcaactgcaggggaaagaccaccaagagtttctttatgggaaattgaaccattgacaacctttccaatgtatccatctctgttcccactgagagttaagcatccttggtattcaggagttgcttccctgcatggtacgcttaagattcttgttactgtgtgtcaggcataaactagttttgaagctattttgctgtatgcttgctatgtgtgtgcgcctatcatgtggaagtttatttggtgcatttacatagtgttttagccatcacactcaaattactgaagccacagccttaataaatttctgaacctgccacatcaaccagctgatgattctaactaaaataacctgaagttgagattgtggtgcaagagcaagaggctatagttcaagtcagtgttctctactgtgaacaatatgcctcaaatgatggttctggatacagagattgatcagggaactttataaaatgctcatataggctaaaagtaaaacaagttatggtgtaagtgaaaagttgatctcttccttccatttcttaagcacccaaggtggatcaatgttatttgataaggctcttccgtagcaaatgtaacgttctataatatgcattctttttattcattgtctttctgtgcattcttgttatggagaatgcattgatctgcctgacataattccattttctagtatctctcattcatatttctgttcttttattaactgctgtatcacacttaagatgacagcaatgctttaatgtggctgagaggagttgctggtgagggaggttttcagtctctgaactttcagtcacctggtattggctcctggggacaacagaggctccatccatccttactgagcagcgatcacgatcagtaccaagcagtagttgctgctgctgctgcttcccaatctggtggttacttaaaacagcaattcttgcaccttcagcaacctatgcagtcccctcaagaacactgcaacctcaacccattattgcagcaacaaattctgcagcaagcaagccagcaacagataattaatcctgatgcccaaaatatccaaacgatgttgagcccaagtgctatacaacagcaactccagcaactacagcaaatgcagcaagttcagaatgatcagaagcagaagattcaaccagatcaaagctaccaagttcctacaagtgcagttctcccaagtccaacatcattaccgagtcatttgcgagaaaaatttggcttctctgatcctaatgcgaattcttcaagcttcatcacctctagcagtagtgataacatgttggattcgagcttccttcagggaagttcgaaagctgtggacttatctcgatttaatcagcctgtagctagtgagcagcagcagcagcagcaacaggcatggaagcagaagtttatgggttcacagtcagtgtcttttgggggctcggttttgcataactcacccacaagcaaagatggttctgttgaaaacaaaattggtcgtgatgtgcaaaaccagtccctttttagtccacaagttgactcttcatccctcctgtacaacatggttcctaatctgacttcgaatgtttcggatggcaacttatcaacgatcccttctggatcaacttatctgcagaatgcaatgtatggttgcttggacgactcttctggtttattgcaaaatacaggagagaacgatccagcaaccagaacatttgtgaaggtaactagtataatttgcattgttgctaggtcaaatatgagctcctctttttcctccaaaaaatatatattcttcttttcatggaaccattgtaaaattgcaggtttacaagtcaggttcggttgggaggtcgttggacataacccggttctctaattatgctgaacttcgagaagaactgggtcagatgttcggcattaagggtcaattggacgaccctgatagatcaggctggcagcttgtattcgtcgacagggagaatgatgtgcttctccttggagacgacccttgggagtaagaaatattctcagaattctgatttatttattagttttagtaatcaatatccatgcatgcgcactacaaattcaagttttagtaagcaatataaatttaagtttcatcttaccgttctatgatttggttgcaaaaaaatctgcttaaattttagtactacacttggcataccctgtccatgtgtgcacactacaaactgaatctcttaattgatgttggcctcaaaacggccaagttaacatgctaagtaaaaatttcaaatctacatcaggcattgtaacttcattgtatatctaaataatttaaagatattaaacgtgcctaagatcaacaaaatttggcttgactagcaagtgcaaaagtggctgtcttatacttcctccgtttcataatgtaagactttctagcattgcccacattcatatagatgttaatgaatctagaaatatatgtgtgtctagattcattaacatctatatgaatgtgagcaatgctaaaaagtcttacattatgaaacggagggagtacaatactttggtttcctggtttccacaactaatagcttatcgaggaaaggtatgtacaatgtgaatggatatcccttcttcattcactgaaagacatgttgacagctcatggacagtatctaatgaatatgtttaaaagtactagtgttatatggagtatatttttgcaatgttcggtgcctaattgtgatctcaaacagaattcatgtgcattcagtcatacatctttaatgtgtattaatatgttaaatttttttactagactgttcttccttcaataatatgtgttggtcagtcactatatgttgatgctcagttacccaagacccttcgtgagagtaaacatcagacatgattcttcttgaaactgaccttcctcatatgatgtaggtcctttgtgaatagtgtatggtacatcaagatactttcacctgaggatgtgcataagatgggaaagcaaggaaatgatccacggtatctgtcctgaagtgagagaacatggtgccatttctggtaagatgtcataattatatttattgtaacgattaccaaatcccacactaatccttaaaaacctatgactggatagagatgttcttttctgagtaaatctgttatcatgttgtgtacttcgatagttgttgacatattggcatcatgtgttttttgtcccttattgaatgtaaaatggtctcattgtgcgggttgaagaatgtctgtttgctctaatttttattgctcggaataactcacatcttaattgacgactcaaatttaatttagagtctttttatgcatattcatctctgcatactaacatgtcctggtatactatcacagggcttccaggaggattctgcagtgcatggtggcactcttgctctcgacaatgcacgtcgtcagaagtcccaaatttgtatcttgcatgtacgccgtacatgtttccagaactctctgttacctattcggtgcaggccaccggaaccacgaaacctgatattttgtaggttccacttaggaatcagtatcggtttaactcttatcctagatgatttgtaactcgcacggcagtccactgttttcatgtttcatcgagtcttcctagacattaaacttagttgatattgtatcaggatttatgtgtattgagattcctctacatgctttcaaccaaaaaaaactgcaataatcgaagcgcacgaggattgtttcaattcgtgttgtaggatctggattttcaccgattgtccggttatgtcagtttcgagaggagctgtcaatctgaagttttttctgtagtgcctaatattttgcttttattattaatgctaatcatatactgttgtgatattttctgttgttgaatatccaaatctaaagaacagaattcccgatggttcactctacagaatacatagatcgacgaactggcaagagagtaagatttgaggcagagtgagcaaataccgttttgcgtgggctcgtttgtgtttgcctttctccttgcgccgcctgccaccgtcgtgtgcgccgagtttcttatccgggacgacggcgagggaatcaactggtggtggaggaagctgtaatttgtgggagctttcgcgtggagtgagatgggatccatgatccaacacaggctccatggcggcgtatgccgttataaaggattggaatgtacgatctgtcgcagttgttttcgcacctcctttctgacgaggaaacctggattgcccccgattgggattatgtgatattcccccgtgacacgagaatgtcatggggaatgtcaccgaatcccaatccgattgcccccccctccttatttttcctgaccacatagtactaaactgttcccgatcaaaaaaggagaaaaaaaagagggagcaatttctttttcaccaaagccgtttaaaaaactttttgatcccgacaaaatctgattaatttttatataaaaaaataaaaatctactttgaactttttttgaatttgattgttaaactaagcggtttatgtcctcgaaccagcccgagaaatcgagtttttgtcaccatccggttttcactagttttgtaaatcctagttctttggggcaattctatcagaagagtgatgtggctcgagcctctactattgatgcgaggattatggacaactcacataatctctacaattttttttttgccatacatagatggaaatggagctgctgttcctttgtctaatttcttagacatcctgctatttttttctggatacgtcattgctggccctgttatagttggagacaataacatcacattaggcaagggctaccataaaagatgtttgagaagtgtagataataaattcttttacaagggtgttgtgatgagttaacggatttgttcggtagacttttgctacagcgttttaagctgtgttgcacagcttagccgttcggctgcacaaacacatggcgcaggaagctgctgcttgctgctagatgcctggttgtagtgcaaccacagctaggccgtatgaacaaatccaataattgaacaagtgaattcaaatgtaaaacgtattccctagagagaaaaaaaggaaaatgtaaaatagagttgttctactagtagtggtgtactactcccctcttctcaaaataaatttatatttcactcattatgcacgtacgaacaaaaataaaaatagtataatatcccactttattaaatcctaatataattattgttgtttttatctattttcaatgtatttatgtcttactatacaaactttgatatgatgaataaataattaaataaaaaattattttgagttaaatagatggaaaaagtcactaacatcaccgagcagtgagtcaaagacatcacagaggtactcaaaccggagtagcactgtgctattcaacggtcaacctattgcatagacagagaggcgcaagcgcaacccaaatcggatttacagaaaaaccctcccgttgccgttgcctataataccgaccttttcccaattattttatctatttatttatttttttaaaaaaaacctgcggcgtccaccaacccaaccctttttccccaagtcgacacgcgcagccaagagaggcgaagggcgcaacgcaacgcgaacccctccttcccccgtcgcgcccaaccctaacccgcctcccctccacgtagatccaatcccgccgccaccgccgaaccctagcccgccccacctccctccccgccgccgccggaggcgcgcgcgcgcgcgatcggcgtcctcccgccgccgcgttcgtgcggggtggggttgggaggaggaggaggaggaggagggcccgacggcggctcctctcgagacgggggccatggaggcggacggtgccgcggctgcggcggcggcgggggaggcgagcacggaggccggcgcgaggcccctggcgccagaggaggaggcgctgcggcgcaacaccgactgcgtctacttcctcgcctcgcccctcacatgcaagaaggtgtgtgctcgttctctctcgacgattcgtcgtctcttttccctcgtatataagctggtttggtttttggggcggggtggtaattcgtcttttctcgattggagcttagaatttgaattccgcacctcgtttcgggaatcttgatttctgagctaagtaaacacgaatttctttggttcaagatggaatcttttcatatggctattccccctcatccaagatgtgatgcttaatgtagataacgtaataatataagttcgtagtgccttcaggttcggggtatttgttgcctcttggtgttagcccctgaatttttcagggtttctatgctaggtcaaattctgaatcggctctataatttaaaatttgaatggtatggttgtcctgaattgatgctccttcgggtgaaaagtgaaaacaatgtaatttactatcgcatttgttcccaatatatcgctattgcagtggctacatggcttttagtagtacggtaaggtaggaattgtaatgcttcccttgtcaccaggagcactataacaatatgttagtatccttattagtctagttattcaagatcattgcttcacaatttttttgtttctctttgggaatccttgctcggctcagaattccatttgcttttagcccctctattattttggaatacgtatgatgctgtactgatttagttctggagctgttctgatgaactatggttaaattagagagaggcaaaacgcttgccataaatcaaatctgtcacacaatctgatgtgttgtaactttgtaatcttgtttgataatactatcaaaattatgctacattaatgcaaatatgtgcaattctctatatataaacattaatgtaacactaaaaaaatgctacattaatccttatgggcttttgtgtcttatttaccatgaatattttgtccatcatggatttgttactaacttctagcttgaatattttaattgataatgattctttttgttccttacatcaggggaacgaatgtgattttcgtcacagtgataatgctcgtatgaaccctagagactgctggtactggttaaatagcaattgcttgaatccaaaatgtccgtttcgccatccggtatgtccctttccttcctttttccccttatgcactggtattatgtttttttatcaatacttgccagcaagcagcattgtctaagactagtaaatttgctgttatgtttctgttcatcagaaactaacagggtgtttgctcctagttattaagcttaatattatttggtcattttgtccagtgaagttatttggagtctaattctgtcttctacttttacccagccaattgatggtatgtttggtgctccaactactggaatgcctgcagtttcttcacactacgctccatttaactctggaaagcagttggttccatgctattactttaaaaagggaaactgcttgaaaggtgacagatgcgcattttatcatggaccacaatcagtgggaaataatccatcagaacaggtggtaaaagtttcttccttacctttggagcagcttcagactcaaaagaatgatttgttgggcattaaagattctgtgcagtctactaattccattcagcatggtgctccaataactaatgagaggggcaaaacagccgttgatcggtcaacggttaattctgccaggacagctacagttgcaataccggttgcttccaatgcaatgtcttgtcctaagtcagagaaggtaaaaagtagtacgccagcagcacttaaggaaagcttcactacttcttcaggtggggatcatcctgagtgctaccagaaccattttccaatggatagtgatcctgtgcgagattggaaccaaagttatgaaatgccccctgcagatgatctgccccagaacagtagggaggctgatgaacttttgggtgaatcttcaccaggttttgatgttctcgtggacaatgatgcagatggtgctgcttatttacatgatgaagattttggaggagatatgtatccagtggaagattatgaatatgctccagctgattttgatgttcgtgcacatcatgaaagagagcggttcaatggtatggatgagcaagaccagatgggacatatgtatgatggctacgagagaaaacggcgtagatcatctgagaggagcatggaacggcctttccactcagaaagaaggtttctgcaaagagatagagaccgtgtcgagatggatggatcggatttacgtcatcggctccgtaggagaagaataaatgagtcttcattggcaattagtccagaacgcaatggagagcaacggcggagggatgagcgctacagggaaagggcacatggtcaccgttcacacagggatcatcaccagagctctcgaggaagcactcttagctctcgtctgcaaggcagaataaagcttcctggaagatctcctgacagagttgatactcgctccgagaaagagcgagatagaagaagactccgggacaggctgtctccagttaggcgcacggaatttcagggtaccaggcatagggaggcaggacaacatgaagagcagacccagcggagatcaagtgaacttgctttaggttccaggaatgcagatggccagcatttgacaaaggatgtgcctgactcacacaacttccctcatcgcaaaaactcgagggactccagtaaggccaatggaagtgttgagcctgaagcatcgcttgattttgagggcccaaagccccttagtgtcatcttacagcggaaaagagaggcagcatgggccaatggcacatctgcctgtagccccaaacaagataaatctgccgaggtctcacacaggcaagcttctctggctgaagctgagaaggaaggtgacaacataattagttctgatgaatacaaaagtggatctggcgatgaagaattcagagacgaaggccacatccctgtggagggccatgggcaatcttcatctcatggtgacaaacttgaggctgaagatattattgaggtggatcccgtggaaaatcaagatgctgataattatgaccagagggagggggagtcctactatgagcctatcgaaggccaggactacaaatccgatgacgagaatgcttatgaagatgatgatgaagagtatgatgacgatgatgattttgctcggaaagtaggggttgttttctcttgagctctgtgggccttctcctggttttgttgcatgcagcaaagctgaaaatgcttgccttagtgaatctatttggataaattcctctggtgctttgtgttttgttcttgaagttcatagtgccaaagcctttatttataaggctgataactgataagtataggtcaggtatgaagcgggggtaggattcataaattaaaagggctttacgtgtaaaaactgctgcactcgttgtgttcagcatatatctgatctatcctgaaactattgtattgtattagtttcctaactaacagacaagatatttctttgataaattttttgcctgatatgggtaatataatcagccccattttggaggggttcttttcttcacgaaagagtaatgtgtgattgtacatatgtggttcctcagttttcctaagattcttaagatggcatcagcctctgaacgagggaaggaactattttatcaggtcaactaatttggccgtctgggactctgtaaaattttgctgcttcattcaaatataatcatcttataatcataacgaactattttatcaggttaacggagtgtgattctcaactcacgatcatctctatctctactaattgaaaatgtttttgctagtactttaatatatcatccgtgtatgagtcggtttttaagtttgtttgattttggaaatacacatccgttcagtcgggttttaaattcgtttgcttttaaaaatatcgaaggagtcatataagatatctctttaaaaatctcacatgctaacttgagatgatcaaactcctaattgcaactcatgattttctagaaaaatatatatccaagccgcgaattcctagagtgaatatcatcttaactaataaatcgtataacaacaataaattaaagagtaacgtgtacgaacattccttaaacttgtaggggtgtgtcatctaggtccctgaactctcaaaatacatatccaaatcctagaacttgtcataatgtgttatctaggtctcaaatcgtcataaccccttcaaaaatctacgaggcattgatgtgacatgccacacagacatgacatggcattattttttctttttctttttttcttctcttttttcccatttattctcttttctctatgacccgtgtagaaaaaaagaaaaaaaagaatgggaagaaaccgaaaaagaaaaataaaagaagaaaaaaaaagagaaaaagacatgtcacgtccatgtggcattgccacatcagcgtcacgtaggattctagaggggatgtatcaatttgggacatagatgatacactttgacaagttatgggacctggatatgtattttgagattttagagacctttataacataaccttacgagtttaaggactgccaatgcactttactctaaattaaaataaccttcacccgttgtaacgcgcgagcttatttttttctctagtcttaattagtatcttttaaatatactcgtgatcgtgccgcgcctactggatctctgcttctgaccaaaatgttccgcattgaatcatcacaggactgaaaatcaatcctcgcaaaccacgagattatcagtatattaagtctcctgggaagctcacatgtatacccttgcaaactgtactgctatatgctaaattatctgcctgcatgatcattgaacgcaatcgtgagattctatggccttcttaagagcaacaaatgcacacctttctggacggggaaaccaacaaccaaatgcatatattgttgcacatcatcaaatgcccttcaaaattgtattagggcgcatgtgtatttcttccgttagatcaaaaattacaattcaaattaaaattcaaaaagagagagagagagagagagagaggattgagagagtaatcctgaaatgcaatgttttctgtaaaatacaatcggcttgtggtttttccccaaagaaacaacattggatgttactcctaattaagaatttcggcatttagcaagtactaaaaaataccagtaacaatttcattataaaaaaagataggataaatcacgatcgcaaaaactgaaaaagaaattctcaaaagaatgaaacagtttgcatcatgagaagaagaagacaagaagaggatgagccttcagtggcatatataaaaactggattactactgtactactctcagtctctcggcttctagactagggaagctcaccaacccaagaacaagaagtgatcggagatggctcccaagaaggtgctcctgctctgcggagactacatggaggactacgaggtgaggcaaatcttcctcttgttccgtgtcttgtgtgttcgattcgtgtcctcgcgattccaatggggttttcttggaatcttgtggatcaggccatggttccgttccaagcgctgcaagcgtacggggtgtccgtggatgctgcctgccccggcaagaaggccggcgactcgtgccgcaccgccgtccatcaggggattggccaccaggtacttggaatgattcgattccgctcgatttggatagggtttagtataactagttagggcttggtctgatgaattgaacatggcggattcccattctagagtggtcaggaatatcttcgctttcttgcctttgagtaattttaggatgtaatttctaggattaatacacatctgctcatcgcaattggcagaagggggaaagaaaaggagagtacacacagtcacacaacgggacagggaaaacatatgtgcaactaggtttatttttgagagctcataatgaaatgacagatttcttggtatgattgatccattagctttatctgttattctttctattctccaaatatctggtttagcattgcgagataagtttgacggaataatcagtcatgagcagaaatattccttaactgtctacaaaatgggatagctcttctgcatgattgaatggaaaaatcatttgaacattttggatactgaatatacttagacagccattcttatttctttcgtcacttaagtgaactgttgattggttcatgatttgggggttaactgttgctgtagagatttcttataaattcatatccttgtctgtttcccatattattgcattagttcctgcttctctttagatggtgttgcttctttcaaaactaatttgggggtcctctttgtctactggactactactccctttagtaatggaatctttgttttctctgaagcactcgattataaggatcgtctgtattgttggttcttttaggtgtgatagtatggtggtacttttcgtctttctaacataagtttgctttgacaaattaaattagattcattttgattcatcatgcagacatatgctgagtcaaggggccacaatttcgcacttaatgcttcgtttgatgaggttaatatcaatgaatatgatggcttggtaattcctggaggccgtgcaccagagtatctcgccatggatgaaaaggttcttgatttagtaaggaaattctctgatgcgaagaaacctattgcatcagtttgccatggacagttgattttggcagcagctggagtagtccagaaccgtaaatgcaccgcatatcctgctgttaaaccagttttggttgctgctggtgctaagtgggaagaagctgatactatggacaaatgcacagttgatggaaatcttgtcactgcagtggcttacgatgcacatcctgaattcatcagcctttttgtgaaagcgcttggaggctctgtaactggctcaaacaaacggatattgttcctttgtggggtatgtttagggaaatttcattcaattgaattcgtatgactactttcttattttcttcatttttcataagtcataccatctctgctgaacctctttgcttaactacatgcttataacaggattacatggaagattatgaggttatggtaccatttcagtctcttcaagcccttggttgccatgttgatgcagtttgccctgacaagggtgctggggagaaatgcccaactgccatacatgactttgaaggtgaccaaacatacagcgagaagcctggtcacgattttgctttgacagcatcatttgacaatgtggatgcatcaagctatgatgcacttgtaattcctggtggacgggctcctgagtaccttgcactgaacgataaagtcattagccttgtgaagggcttcatggataaagcaaagccagtcgcctcaatttgccatggccaacagattttatctgctgctggagtccttcaggtacatgataatgattaattttctaccattgctctacattaatcgtacttacttgattacttctatacctagtgttggaatataaagtgaattgtccgtctttcctcatcagcttaagcttttggattgaactggtcggtgcatgcaactcaatacctagcgataggaaaatttaccttgaacaaaacaaaaataatgcaacaatatctattcttgattaatggataattaaatgattaaatcattcctgcaaagtaaaagcattttcatagtgtggtaaggtaggcaacaagacgtactattacagtatcagtatgtcactatccttcttagcgtagttattcaggatcactgaattgcttccgaaaatctcacacaaatggacacaaacctgtttgatgcacgcagcgatgctccccagtctccctaattgtggatgataatatgatatgcagggaaggaaatgcacggcgtatcctgcggtgaagctgaacgtggtgcttggcggggcgacatggctggagcccaatcccattgaccgctgcttcaccgacggcaaccttgtgaccggcgcggcatggcctggccacccggagttcatctcccagctcatggcattgcttggcatcaaggtctccttctgaagcaacgagaggtcaggtcccagcgtttttgcacgcgatatagcaagacacagctttgggctttcgtctaagatatatacagtcttaccgatactgtaccagtctgctgtcgttttttgtgcttgaaataataagataattactaaaagggtttgcgtgtttatagtattatgtctgtacgagcagaaggagctgcacctggggattgcctgtgtatgatatgaactgcagttgaatttcatgagctctcgcctctcgccgacctgggcagtacttcttgggccgtgcttcaccgtgcggcccactaaagtcagcccatcaccgcgagagcgatcggagaaggaaaaagtccaacgctactccctaagactgagtttgaggagaagaggattgagaagattggaaagatacgtaaaacggggtgagccattagcgcatgattaattgagtataaattattataaatttcaaaaatagattaatatgatttttttaaagcaacttttctatattttttttaaaaaacacaccgtttagtagtttgggacgtgtgcgcgaggaaaacgatgtgatttctcactcaatgtcacttgaacgaacgcagccatataggttgaatttaatttgtatcccttgaacgcagctatgacgacttcttaaaccggtataaaataacttcaaagtagtattgaaggtggtattcactgacggcatattgcccttggtcaaaccacctgagttggctgttctcctctcctctgatctccatctctcagggcctattcatttttttttaaaaaataacacataagaataggagaagtgaaggaataggaatgcatgcgaacttcaatccataggaattttccaattggtcagagcggatgaatttttttatgttttctttttataacttgtaggaaagaatttttttgttttcctatatctagatttcttcgaaccaaatggatttcatagaaattaatccttagaaatccaagtcctttgaaattccccttagaggctatggcgccgggtccttctccctcttgctttttgtaccttccttctcgacagacgtccaccaccctttcccatccctcctctttctgcaggctacagagcttgcagagcttcttcgatcgatttgctctttataccatttcctccgtttcgtaacgtaagactttctaaaattatccacatttatatagatgttaatgaatctatacacatatatgtgtcttacattgtaaaacggatggagtagtcattctagcatttcccatattaatattgatgttaataaatctagactgtgagaaatgctagaatgacttatattgtgaaacgaatgaagtaaaagattttgggtggatgtgatacattctagtccaaattagtacaaatgaatttggattatttttagcagggagggagtaacagagtaataatagtcacacctatgtataaattaatcgtctgaaactctgaatcttcctttcatttcatctccaatattgcaaaaattaggtacggcgctgttaaggtttgggtaaagcgcatggcaccagcgccacctgccgatcgatggaaccaaaagcggcaggaaatgagataagcagagaaaggtcaccacgcaagcacgcactacatcacgtatgtgtgcctgctccaagctaagctactctttctagctaagctttgggcttaatttgccggcttttcgctttttcgtgaacgcgcaaaaagattgcacctcaatatattatgccggcttttcgctcatgcgcggcaacgaaataaacactgaattgatgatgatgatgatgatgatctgaggctgctaatcttgccacctaattttgcctcaagaaaagctcgccacttacgctaaagatggcgacgaaacggcagctccgagccctttaatcctagcgtgcccttggcctttctgcgctaccgcttcttctaccttatccttctcacacgccattcttccagaaaacataatgctattcttaggtcgtgatgttcagttatgtttttgaaaaaaaaaacaaaaaacataagtgatcttcagttacgttattacgtcccctgtaactgtaagctgatgaagcctgaagaacctctcgccaaaagatcgaatatggtgtgtaaccgcttattgtactttctgaagttttggagcattcaccgacgaatctgtttcactgctcctaactgttactgacattgatgttacactgagactggactgaagacgtggaggctaattacctaaaaacgcaaatattagaaaatgacctaatatcaaataaatataagatgtgagatttcgaacccaagccgactagccctccttatgaagttagccggaagactgatgggcgtttctccgatctggaggcttactaaagctacacataagacatagctctagctggctctgaggctggccctaaagatggatgatctaatcccacacacgcaaacagctttcatcagagggagaaaccttcatgaaaacttcatttttgtcaaaggtttggcgcagcaatttcacagaaggaagaaagacatgatcttgctcaagctggatatatctaaggcattcgacaccgtttcctggagtttccttttggagatgttagaattcaggggatttggtgctggttggagaagatgcctgtctgctctgcttctaacggctgagacaagtattctgatcaatgggatcacttctgatccggtgaagctggcgagggggttgaggcaaggtgacccgctgtcaccccttctttttgtgttggttatggatacgcctgaggctatcatgacccaagccaggacgacgggattgctctctcctctcaatgctgcgagatttttgcccagcacttcagtgtcttcttccgcccggtgactcaggaagcgttggttattcaggctgtgctggatctgtttggggaggccactggattgaaaacaaatctcgcaaagagtgccatcacgccaattgtgaaaccatgtgtggttatagttcttttgtgatgggaaattgacaagtaccggatgtgcaagaagtgtgtgtgtggactaacgttggtcaggttgcgacatctgtgccaagacaacggttgtttggttcatgtgtgtgcaggtgatcggggtcgatcttggtcaacggcggatcgggactagactcagggaggagttgaggtccaaagcgatcaaggatgccgggtgacaagattggacacaaggttgcacacggtggacgaacaccgtgtgaaaaggtctttgcaacaggcttcacaaggccaagtgtgcaagcatcggattcgcgaagaaatcagaagggactgtgcaagtgcattgctgctacagtacttgctgtaggtagcatacatgcatgtacacgtactgtacttgtgcaaggaggagcttgcactgtactggttgctactagcatggctcggtggaaaagtcaagctagctagctgtgcatgtgcgctgtgattggttggcagggaggccaagccaatccagccgttccacgtggcccaagatggtgaatggctcggctcggcaggcctgcatcgtccaagcagcgacggcccaagacggcggcccatggcgcatgggctcaggaggtgcaggcagcttgcatgcgcaaggacgcgcgcggaaaaaccgtacgcggcaacccccgtttcgcgtgactcgatcggaggcgggtgcaggagcgcgggacccacacgcgattttgcaagcgcgcgcgggagcggctcagcgggacgcgtggcggcttcgggctggttgggcgctggcgagcgcgcgctgaggaaaaggagacggaacgcgcacgacgcggctgggcaacgtggcaagtttggattcgtcaagacggagagcacgcggattcatcagcaagaagaccatgtgagggttcggatcgatgaggtggcaatcatctggagcttttcctttgagtagaaggaacaatggatggaccagatctgttctgagttagggtttcgccctaggggtatttgagacaatgtcttaggggtcttaggctataaatagagagatggatgcaagggtggaggttgctccttttggtaatcattttgagatgctcggtgagagagtttccgtgtgagtttggagtgtgtttgcccgagaggcttttgtattaggattagtttggagtgtgtttgtccgagagattttaagtttgtgttaatgttcctctgaaggtgtatgtttgctcctagttgagcggttattttgcatcacctataaatgaaatgatttgaaggatttcatttttgccttgtccatttaaattccgcaatttaaattccgcttgcaatttgaactttgcgatgatgagttttgctctctctttctcacctcacttctagtttcgggaattccttttctcttcctcctctagtttcgggaattccttttctcttctttttctctcttcttttctagatccggcttctctaatagccgcgattctagtaaggattttgagaaatccggcttgatgagtattttcgggggcaagatttgaattgctatattcaccccccccccccctctatagctgttcttggtctttcaattggtatcagagcccggttaagttcgttgtaacctaaccgtggcaacgaacgcagctatggaggaaaaatactctgcgaaaccatttgttttcgatggacacaattttgtcatttggaaggcacgaatggaggcctacctccagtcgcaagggcataatgtgtggaataaggttaaatctccttatactgtgcccgatgatgctgacatcacgcctgcaaatatggctcaggttgattttaattatcgtgcaagaaatgcaatcattggtggaatttcttctggtgaatttaatcgtgttcaacaccacaagtccgctcatgacatgtggactgctctgtgcaatttccatgagggaaacaatgatattcaattggttcgtcagaatcaatttcataaagaatatcaaagatttgagatgcacccaggagagtccattgattcttatttcaaacgttttggagaaattatttcgaagttgagatctgttggaaaagaattttctgataatgataatgctcgccatcttttgaattgtcttgattatggtgtttgggaaatgaaagttacttccatcacagagagtgcacctctgagtgaccttaccatggacaagctttactcaaagctaaaaacccatgagatggatgttttccatcggaaaggcctcaaacactcgatggctttggtagctgatccctctggtagtacttcttctaatgactcagcctttgtgtatggtggcttctctcttgccgctttacactcagtcactgaggagcaattagagaagatccctgaagatgatcttgctctttttgctagaaaattctcaagagcttacaaaaatgtgagagatagaaaaagaggaaaaaccaatgaaccatttgtgtgttttgagtgtggagagcctaaccacaaaagagtgaattgtcccaagttgaagaagaagagtgacaagacgaccaagaagcccgagggacaagggcgaaaggggaagaaggatttgatgaagaaggcgatccacaaggtcttggcggctcttgaggaggtgcagcttagcgacatcgactccgacgacgatgatcaagaaaagggggacaaggacttctccgggatgtgctgtctcgccaacaacgaggacttcatcaacctgtgtctcatggcgcttgaggataaggatgactcatcggagcatcctgaggtatgtcttgatgatatcccttccttggatggttctctttgtgatgattcttgctcagataatgactctgttgatgatgaactaagcaaagaaagaatggcacacttgatgattgaaattagtgataagtataggtcttctaagtataaaattgagaaactaaaatctgaaaatgatggaatggcgctagaaattgctaggcttcgatccatgattcctgaggaggatacctgttctacttgtgcttcatatctttctgaaattaatctcctcaaggataagttgaaatcatgtgctttaggagctgggaatccttctagtgctagtgctgcttgctctacttgctatgaaatgaaagttgatatgggtttgcttgagatggaattgaaagaactaaaagaaaaatttgttcatgataggattggtaggtgtgaaaattgtcccattctcactagtgacaatgatgaattaagacaacaagttgccatgcttaggaccaagaatgatttgttagaatcttttgctactaaggaacctattcattcttcatgtgctaattgtgctatcctggaaactgaactaaaagatgctaaaactgtcattgattctatcaaatctattgattcttgttcttcatgcatttctctgaaagttgatcttgagtctgctaagaaagagaactcatacctacaacaatctttagagaggtttgctcaaggaaagaaaaagttgaacatgatcctagaccaatccaaagtgtccataaacaatcaaggtataggctatgattttgctgagtctttgaggataggtacccatgagattttaggtgtcacagatgggatgatagaactagctcaaaaacctataaccttcaagtctgcaggtttcattggaaacactagttctagtacacccaaaacctcagaaccaaagatggtacctatgactagcaagtctaagcctgtagagttacctagacccaaaaatccaaaacaagttgagcacaagcaaaaccagagacaaaccaagcctgtagagaaaaccaagtatgagtgcacctattgtgggaaagctggtcatttggtaggtttctgctttagaaaggctagaaaagagcgacaagaacgtcttaggactagaagagctactagagtccctgagaggttcgagtgtgcgtatcattgtcgttcaagtggtgtatctcgctttcctcgccgagatgtgcaccctcgacgtgacctagcagggttggggcaaaacagacatggtcatcttgcatataattctgctcataacactaaagatgcttgtacttctcgcatgattcagtactggattcctaagtcatttttcactaaccccagtactgaatcatcgagatctgctgtgtctttcttgtaggattttggagtagggagaagtaattcttggcttgtggactccggttgctcacgccacatgaccggtgaagccaagtggtttacttctctcactcgtgcatccagtgatgagaccatcacttttggggatgcgagcagtggacgcgtgatggctaaaggaacaatcaaggtcaatgacaaattcatgctgaaagatgtggcactagtaagtaagcttaagtacaatttgctctctgtttcacaactctgtgatgaaaatctggaagttcgtttcaaaaaggacaggtctcgagttcttgatgcttctgaatctcctgtttttgacatttctcgagttggtcgagttttctttgctaacttcgactcttctgctcctggtccttctcgttgtctcattgcctcagagaatagggatttgtttttctggcatcgacgtcttggtcatattggctttgaccacttgtctcgcattagtggtatggatttgattcggggtttgcctaagttgaaagttccgaaagatcttgtgtgtgcaccatgtcgtcatgggaaaatgacatcttcttcccacaagcctgttacaatggttatgacagatggaccgggacaactgcttcacatggatacggttggtcctgctcgggtccagtcagttggggggaagtggtatgtcttggttgttgtggatgatttctctcgctactcttgggtctattttcttgaatcaaaggaggaaacatttggcttctttcagtctcttgctcgtagtttggctttggagtttcctggtgctcttcgagccattcgcagtgataatggctctgaattcaaaaattctgcatttgaatctttctgtgattcttctggagtcgaacaccagttttcttcgccatatgtcccacaacagaatggggtggttgagaggaagaaccgcacccttgtggagatggcacgaactatgcttgatgagtttacgactccaagaaaattctggactgaagctatttctgctgcttgttttatctccaatcgtgtgtttttgagaactatcttgcacaagacgccatatgagctcagatttggtcgtcgaccaaaagtttcacatctcagggtcttcggttgcaaatgctttgttcttaaatctggaaatttggacaagtttgaatctcgatcattggatggcattttccttggctatgctactcattctcgggcttatcgagtttatgttctttcaaccaacaaaattgtggagacttgtgaagtcacttttgatgaggctagcccaggagctagaccagaaatttcaggtgttccagatgaaagcatctttgtggatgaggattcagatgatgatgacgatgattctattcctccacctctagacagtacaccaccagtgcaagaaaccggttctccttcgactacatcaccttcaggagatgcaccaactacatcatcttcagcagctgaggagattgatggtggcacatcaggaccgacagctccccgacacatccagaaccgacatccgcctgactcgatgatcggaggcctgggtgaaagggtaactagaaatcggtcttatgaacttgtcaattcagcttttgttgcctcttttgagcccaaaaatgtttgtcatgctttatctgatgagaattgggttaatgccatgcatgaagagttagaaaattttgaaagaaacaaagtttggtctttggtagaacctcccttgggttttaatgtgattggaacaaaatgggttttcaaaaacaaactaggtgaagatggttcaattgttcgaaacaaagccagactggttgcacagggtttcacccaagttgagggcttggactttgaagaaacttttgcaccagttgctagattagaagctattcgaattcttttggcttttgctgcttcaaaaggtttcaagctttttcaaatggatgtgaaaagtgcttttctgaatggagttattgaggaagaggtctatgtcaaacaacctcctggttttgaaaatccaaaatttccaaatcatgtgttcaaacttgaaaaagctctttatggtttaaaacaagctcccagagcctggtatgaaagattgaaaacctttttgcttcaaaatggttttgaaatgggggctgttgataaaactctttttactcttcatagtggtattgattttcttcttgtccagatatatgttgatgacatcatatttggtggctcctctcatgcacttgttgcccagttttctgatgtgatgagcagggaatttgaaatgagcatgatgggagagctgactttcttccttggacttcaaatcaagcaaaccaaggaaggaatctttgtacatcagaccaagtactccaaagagctcctgaagaagttcgacatggccgactgcaagccaatcgccactcccatggcaactacttcatcgcttggtcctgatgaggacggtgaagaagttgaccagcgcgagtacagaagcatgatcggctccctcctctacctgactgcgtcaaggccggacatccacttctccgtgtgcctgtgcgcgaggtttcaggcttctccaagaacatcacatcgccaagcagtcaagcgcatgttccgctacatcaagtctacacttgagtacggtatttggtactcctgctcttctgccctttcagttcgagctttttcagatgctgattttgctgggtgtaagattgatcgcaaaagtacttctggcacttgtcattttcttggcacttctttggtctcttggtcctctcgtaagcagtcttctgttgctcaatcaacagctgaggctgagtacgtagctgctgctagtgcatgtagtcaagttctttggatgatttcaactctgaaagattatggtctgtctttctctggtgttcctctgctttgtgataatacaagtgcaatcaatattgcaaaaaatccagttcaacactccaggaccaagcacattgagatacggtaccactttctccgagacaatgttgagaaaggtaccattgtgctagaatttgttgaatctgaaaaacaattggcagacatttttacaaaaccacttgatcgctctcgttttgagttcttgcggagtgagttaggggtgatccacccctatggcttgatttgagggggagttgtttttcttttgcatgcatttgtaacatattgcatcatgtttactttatgcattgtattatacactcttcaattgagctttgcttgttatctcttggtcatcactatgctatggatgtatcactcttatgctagtttgatctcttgtctagctttcatttgcttaagtagcttgtgtgatcatgttatgctgttcaagcgtgttgaaacctgcttaaattaactattcatttgaactcaatcaatgtgcaatgcttgctctagaagtttgtttaaattgaagtatccttctcatactcatgccatgtttacattcttttcgcaataactgtcagtacatgcttatgaatgctcatgcttatgcgtccatactttgtatcaatcatgctttacaagttttatctctgtttttgtccgggctactgagtgcgtttacgcatgagtagtgccgaagatagcactgagacagcctgtaatgggaactctagctggaaaacttgattgaggtcagacggcagtgtttggcacaaccatcacttgctgactgataagatcaggtggaccgtcgtgattgtgctattgtctttaaagaaattaaaaaaaaaatcataaaaataaaagtcatgagaaaagattaaaagctcatgttctatgctttgttatcatgttgatactctttatgaactgggcattagcacattagcatgggttcattgctttgtttatgtaaatcttgcatgattatgagctggtttgcttccttttaagcttcttctagaaatagctttgcacactaaatcactaattcacttgaaagctttttgcttgctggcgatactaacttgatattcatgacttgtttcatacttcttatgcacatgcttagctaggcttgagcacatgcttgtatctgtgtgatccatgtctaccttttgatgcctttagataactctcaaagctctcaaaacctaaaatttgcaagtttcatctcatttttatcttgcatttttgtctcttttgatcttgatggcatcattgacaaagggggagagaaatttgcacttattgaaaattaaaacttgctttaaatcttggtgaaagggggagtttggcacatagggggagcattcttgcatttgcatttgcatcccttttttcttcttgtcacttggtcttgatttttcgcgatttcaaaatgaccaaagttcgcttttgcaaaatggtttgctttgtgaatcaaaaatcaaattttcaaaattttgcttgagattgtcaatgttcccatcaagggggagattgtgaaaccatgtgtggttatagttcttttgtgatgggaaattgacaagtaccggatgtgcaagaagtgtgtgtgtggactaacgttggtcaggttgcgacatctgtgccaagacaacggttgtttggttcatgtgtgtgcaggtgatcggggtcgatcttggtcaacggcggatcgggactagactcagggaggagttgaggtccaaagcgatcaaggatgccgggtgacaagattggacacaaggttgcacacggtggacgaacaccgtgtgaaaaggtctttgcaacaggcttcacaaggccaagtgtgcaagcatcggattcgcgaagaaatcagaagggactgtgcaagtgcattgctgctacagtacttgctgtaggtagcatacatgcatgtacacgtactgtacttgtgcaaggaggagcttgcactgtactggttgctactagcatggctcggtggaaaagtcaagctagctagctgtgcatgtgcgctgtgattggttggcagggaggccaagccaatccagccgttccacgtggcccaagatggtgaatggctcggctcggcaggcctgcatcgtccaagcagcgacggcccaagacggcggcccatggcgcatgggctcaggaggtgcaggcagcttgcatgcgcaaggacgcgcgcggaaaaaccgtacgcggcaacccccgtttcgcgtgactcgatcggaggcgggtgcaggagcgcgggacccacacgcgattttgcaagcgcgcgcgggagcggctcagcgggacgcgtggcggcttcgggctggttgggcgctggcgagcgcgcgctgaggaaaaggagacggaacgcgcacgacgcggctgggcaacgtggcaagtttggattcgtcaagacggagagcacgcggattcatcagcaagaagaccatgtgagggttcggatcgatgaggtggcaatcatctggagcttttcctttgagtagaaggaacaatggatggaccagatctgttctgagttagggtttcgccctaggggtatttgagaaaatgtcttaggggtcttaggctataaatagagagatggatgcaagggtggaggttgctccttttggtaatcattttgagatgctcggtgagagagtttccgtgtgagtttggagtgtgtttgcccgagaggcttttgtattaggattagtttggagtgtgtttgtccgagagattttaagtttgtgttaatgttcctctgaaggtgtatgtttgctcctagttgagcggttattttgcatcacctataaatgaaatgatttgaaggatttcatttttgccttgtccatttaaattccgcaatttaaattccgcttgcaatttgaactttgcgatgatgagttttgctctctctttctcacctcacttctagtttcgggaattccttttctcttcctcctctagtttcgggaattccttttctcttctttttctctcttcttttctagatccggcttctctaatagccgcgattctagtaaggattttgagaaatccggcttgatgagtattttcgggggcaagatttgaattgctatattcaccccccccccccccccctctatagctgttcttggtctttcaccaatacagtgcaacccgtcgcagatacaagctgtggaggctattttgcattgtcaggttcagcattttccaattacctacctaggcctccctctttcaaccagaaagccgactaaggcggagattcaaccgattcttgatagattggctaaaaaggttgctggctggaaacctaaactcctctccattgatggacgcctctgtctcgtgaactctgttcttcaggctttgccggtgcacttcatgacagttcttcaattgcctaagtgggcggtgaaagacatagagcgtaagtgtcgcggtttcctttggaaaggccaagaaaaagtcaatggtggtcactgtctggtctcctggcgcaagctctgtatgcccattgagaaaggcggcctcggggtgatggacctagatctgttcgggcaagcgttgaggttgaaatggcatgccaagagccttgagcagaaaggaaggccgtggactctggtttcctaccatctgggtagcgacgtcaatgctatcttcaattgagtggcggatttcgtcatcggcaatggaactgacactaacttctggacgtcgaattggacgggaaagggaggtttcgcttggagatggcccatcctgttttcttatgttgggagatcacgtctgacggtggctcaggcgatgatcaatcacaggtgggttcgttgtctgctgcggccctatgcgagttctttcagctctgggacgaggtcagaaacaccacgctgcagaatggtgatgactctatccgatggaaggtctctcccgacgggcaattctcagcatcggcaacttacaacttctttttcacgaccaaagaggactgtcctgtgggcgacctcttgtggcactcaagagcaccttccagggttcgattcttcatgtggctagctctcaaaggaaaatgcttaacggccgacaatcttgctaaaagaaattggccccacgaggatcactgcgttctttgccaaagagaagaggaagattgccagcacctgtttgctgactgcagctttacctctgcggtctggggattgatcaggagcagagtgaatttcaacttcccgattcccaccgaggaaaactgcccactaatgtgctggtggcttcagccgagagcccgttgccgggtaagctacaggacagattttgacagtctagtccttcttacttgctgatcaatttggaaggaaagaaacgctaggatctttgagcatcgttttgaacggcgaaccatctagtggaagacataaaagaagaagcgttgatgtggaaggaagccgggattttttcccaagagtgcgagtagtcagtgtcccgtttgtttgttcccctaggctgaactctgtttcggctttcttccccctcgacatcctcatgtcgatgtaaatcttgtaatttgtaacttattttttctcctatcttaatgaaattggccggccatcctttggccgtcccggcaaaaaaaaagacacagctctagcttgaaattaatattcagggattctgaaggtacgcacaacacatgcaggatcacagatcgaattgcaagtgggttattggtgccggacatggtccaagatggacctctggctagctagccaaattatatgccatcaatcagaccatgcattcacgggcatattaagcaccaaaatatcctactcctatcatcatccattttatgcagatccaatccaccggcctacggaatattgcattattggtaataaagatgcagtcaacatctagctgctgattgatcattgctgatgagacatccagcctctagaaaactgcaggtttatcaatcaatgaatatacattttgattgcttagaatctatgataatatactgtacaattgacaaatccaacacataactaccctacggttcaagatcccagcgacaattgactgaggacatataagtttcgatacatttatcgtacacatcaacttaaaaaactgacacaagaaattctaaaaaaaacatatatgtacttctaatagtattgcacatatatgtataaagtctaaacttcatattacaaatgacagcagctagccaacagaacggtttacacttcagctgcacaaattacagttattcgaagtaagtgttacatagaggtaaattgagcagaagagttgcacacatagtaaatcattcagagtaactgcgataattggtagttgcaggaggatctatcacctatggcatctgtcaacagagttacctgggcgtcgtcatgctggatgctacccgtgcagatcagacaaacaacaagaacaggctacaagatacgcaacatgtccatacatatgagtaatgcaggccccagaagggcccttttcgttacaaataaactaatccaggcacctaccctatgaatgggatgtaattcggtatatgcaatcttttgaaacttccttattcattcccctgatatctttagattagaaaagccacaccatatcgttgtcatctcatacatgtctgattgttccccttgctgaaaagatatttggaaagttaacaaccgagaatgatgaacctaatctttggtagctaccctttctgtgtttttcttcaggcacatggtaaattgcctagaatattcagtgttagtactccacccagtccaactgatcttttaaaaccaacttatccataggaaacatgttctttggatgtggtaaaatacgcagaaaagcaaaagaccttcattaacatcctcatctgagcatctaaaagcaaggaaagagagaggttgcatggtcgtcatttcatgcgttgcacatcttacaccactaaatcttttgtgagcctttgctatcgcagttcacatttctcattgatgagctgaaaggtatggaaaccgaataatgctcttcaccggccgtcaactgggccaggatgaatcattcattcacatcattcttctcaggtttttatcataaggattgttactgcactggagtacccttcctccctgataaaagcagggaagatccagatggaatggaacagatgatagctgatcccaaaacaaaacagaagctgccaagttgatcagatacacactacataccctgttgtcggttttaacagataaaactctgaattcagtggaaatttccgctgttagacacagaaaaataggaaacagggtcgaaggaatatcgtccgtcacataaacgtagggatattttcgtctacaccttataaaaactcttgtaagtagtgtaccaggttcctccacccaatacattgatcccattcttgaactttaagatttactaaaacataaatttgtggcacagaatttcgcataagcaattgaatccgtgtgatgatcatgcgaggaagttaatgggtccaaacctgaaaacctgcatctctccggtgaaaccggccgcgggattgtcagctcaagaactcgttaacagcaaatgctctctgtcccgggacctgaactgagctaagcttgctgctgaattgtgacaaccaaaacaggtgtatacagttcgtggtgggcccactttgcagtgatatttttgcagcttgattgacgtggagagaatccggggaaggacgtgggccctacacagaaccaacggacaaccgaaaccagcttccctttgccttccttcctactagctttgtctgaattttctgatgctgctctttcgtctctcacgctgcaagcctgcaactgcagtatggagttgcacaatttgcatttgcacaccctccatcttggaatttggaaaactattgctgataacatgaatcatttcgtcttcatgtgagcgacgctgatgcattctatcttctactgcagtgactgcctcactgcaggtacagtcaccgagagaatcatctcgcaacagctaagctaatctctgaacgtgccgagaaaacacttagagactattcttaccttacgtggcattcatttttctatccagtttctttccctgctaaaactacatcaccatctaaattgaaagcagctgtgttgattcatgaatcagctaaaaaatatcatcgatctcgcgcgtgggccatgacaatcaatccaataattttgatggtggtggggtccggaggcctgcactttgcgcctcctcctcgacaaaacagctcgatcgatccatcaagagccagatgcgatcaatcatacctgcaattaacgtacaacctaattcccctttatatatggctataatcagctgcatcaactgccctggcatggcaatcgctgtagccgatcgccgttgctactgcgattgcctttcttgtttcctctactcttctgaagctcatcgcattttttttttcagtcggatgtgtacagatcacctaatgctaagttaaagatcacagtaaaatcactttttggaaactagctaactaattacttcatccgttctcgaataattgacactagcagtactattcaagctcaaatttgttttttcctgaaatttataaacacctaagggtgttatattagtcaaagtaagatgatcgtagtcatcagtggcagtaattcgagaaacgagggagtaaacaattggctcatatgattggagaatcattgtcatacatgtagcaatgaacgcatggattatacaagaactgaaagaggcagtaacatgctgcatggcacactaactgaaagtctgaaactctccaagagaatacactaccacatcgagtccagaaagcctggctgtccttttctctcccctagaatataccagctaatagatagcacaatttatcaaggaaaagcaggggaatataccctaaatatggagatccccatggaccatgcatgtctggtctacttgccgaatgtggagttgtccgtgtacgtctcggccaaccaccgggtctctcggctactctggagggccattttcttctgcagcttatggtgtctttgaaaccctctattaaacagcgcgttagccacgtggaacgggatgattcattaacatgtaattaattaagtatatattattataaacttaaaaatagatttatttaattttttaagaaaacttatatattaaaaaaaacatatcatttattagttcagaaaacgtgctaatgaaaaataataaagctgtagtttggagttgaagtttagaattcagctgacacaaataaggcggtatgtgaaaattactccagaaacccttgtgattaacaggcagtataatctagatttgacaggccttacattgctcgtggttgatgttaaatacagtactgaagaagtgttctctgtttgtagtgcattcgtttcatactggaccatcagattggctattctgtcactggtgtttgtctgctctgcagcttgattcttcttctcgtccggagaaaaaaaaactgtcacaatacaatactgtgctcttcaattttttttaaaaggaaatgctgtgctcttcatggtacagtatcagactatctacgctgttgctgacagtaacaaaggagcacatgcaccatgcattgagcccagaaaccaaagcacacgtgtcatggtcagttagaagctttcagaaaaagctgtgcgcagccttcgtaaaaaaaatgcgatgtgaagtctttcattctgacatggtcctacacaacactgatgataatgcacgcgtaaatttcataaaattaaaattatgagaaaactatatatttaaatcaatgtatcataaagtatataattagaactaaatttatcaccaaacaacaaatttagcaataaaattatcataaaaattttatgtcttccaccaagtacaaaactacaacttttataattaactttatcataacggtactgctagatatttaaacaatgtgataacttcaatattaaatttgtagttttgaaatacttgatcttaaatatataggtttacgataaattttgaaatacttgatcttaaatatataggtttacaataaattttgtataaagcatacctataattttataatacaacatattaaatatatacttttacgataacttaatcaacttccacacagttttgtaaagtttacccgtaaatcacaatgcatgcaacattgcaacactccaacacacaggattttcagcatcacattttttttaacaatgccgttgtattttggtttggttgtgagaattcacaagagccaagaactctgcatcgttctaaaaataattacaaaaaaactctgcatcgacggagagagtgagagtggatggaccacatggacaggtgcccatccagctcggctgttcaagccggctcgatctacgagccggccgtgtttcgaaataacccaaaaaaaagaggggtcaaaacgcaaaaggggcatcgctataaaaccgcggctccgcgggcgccaatccaccgcatcatcggcttccctccggctcgagccaatctctcgctgtgtctctctcgcgctctccactagcaccggctcggctcggctcgcgcggcggcggcggcggggcggcgtggcgccgagggaggggaacgccggtgtggggagggcggcggcgaggggactcgccggcgacgagctggtttgggtatgagaggggttacccatgcggcgccgaccacgagcgtcccccgccgcggctccatggacggcctcctcatcttcgtcttctacctctcgcttcctatacgtggtggccgcgaccactcgttaatctcctcctctaattgttagccgatctcgcctctcccccacactctctgatcccgctctctctctctgcttcgattcgattcgattcgatcttctccacctcgtcgccgtcgaacgcaactcggatcgggaggataatggaccagccttctaatggcttcgccgccggaggtgcgtctccgatcagaatactcccctgttcttttttttccatttttaggtagagaagtcattttttattttattatttttttgcaaattgatatgttcatcagtgctattcaatttcaaccatgcatacaaatcccacacgcaactttagattactatccaagtataaaatccaagttgattgtgttacggcaaatattgctgtcgacctgtcgtggactggcgtcccaatcgcaatcgattgtgtgagtatgacagtgcagtgctttagtgtcacaaatcgtaggggtcagaatgtttcgattcagtaaatgctgatatggagccatccttttttttctttttttttttggttccggtgaatacgcaaaaggggttgcgtagccatggattaaggtggtgaaagcaaagctaaaatcctatcgaatatgaaatgtgtacatatctttaactttataccttttttgttctatgtaataattatataaatacataaagtaggacccttcattactgttttcttttttaaaaaacgaaatgttgtaaaacgatcctttaattgattggggaccatcccccattgttttaaatcttgcaatatcagatgagtcacagtagtgtagataccatcaatcagcaagaatctagaggaaaggaagggattgtgatggcaatttgctagcaaaactgtgaaagagatgtggaacaaggttccaaaaattgaggtctctaaaagagtaaaaggtcaataggaaaaaaatggtatcccttgtccagaagaagtagcatccgaggccgaattgtttccttgttcttgattgcattttttgcagaatatgctgctgcatcgattaatccagactgctctgcgtcaaataactctatggatcattctgctcaatctaattcgaacatgacactttattgccaaaaaccaactgtaatgaataaatcactaacaaagattattcagttggccacttgtgggctcgaaagcacaactattttcagtcataaatttaacaaatgacacatggttgcactgaatgaaactttaaatgtgcttattcatgtacatgtttgagaaatatgtgatattagttgagctacaattccaaattgatttcaatatttaacccagaaatttactgtgcggtgcattcaggtctttttcttcgtcacattgatgggcaaaatgcctctcccccttctgtcattgtgattggtggagggatttcaggcattgcagctgctcgtgcgctgtctaatgcttcgtttaaggtaaatgctgtcattgaaagatgaaataactatatctctgtcttctatattctattagcttattgtccaaaaataagttaatgttttgatgcttcccgggccctttttcttagatacttttacataactacaggtcacactattagagtcacgggaccgacttggtggccgtgtgcatactgactattcttttggctgcccaattgacatgggagcatcttggttagttgcatcccagaagtagctattttcgccgccttgcaacgtgtttggttttcatctcatggttttatcatgtggttcaggttgcatggtgtatgcaatgagaattcattggcaccactgattaggttgcttggccttagattatatcgcaccagtggtgataactctgtgctatatgaccatgatctggagaggttaggagttattcctaacccataagtttatcctcaacttgatgggctttcattctcttacaattgttgtttttgttcatttagctatgctctctttgataaggatggtcgtcaagttccccaggagatagtgacaaaagtcggggaaacatttgagaaaattcttaaggaggtattgtcatcgtttgcatttcatttgttatccatcaaatgcttttatgcaactcttgtgagcttactttgttaatattgcagacggtgaaagtaagagctgaacatgaagatgacatgcctcttattcaagccatctcaattgtgcttgacaggaatccacacctaaagtaagtggaatttagcattcacctatatctggaatggtggtgctttagcgacggggtgaaatgttctaatgatatgcattcactcttacaggcttgatggtttgcaatatgaagtactgcagtggtgcatatgtaggctggaggcatggtttgccacagatgtggataatatatctctgaaaaattgggatcaggtatgcaatagggggcacttttgtatttacatgcgcacatgaagaattgttgtattcacgtagagcagtggactgacctttcaaatttacaggaacatgttcttactggtggccatgggcttatggtgcatggttatgatcctgttatcaaagctctcgcgcaagatcttgatatccacctgaaccacaggtatgcagttacatatcctcatggccaagtaattcacataagttctgtttcataggtttcatagttataatcccaaatctatagtatcttatctcttaactttcctccagggttaccaaaatcatccagaggtacaacaaaactatagtatgtgttgaagatgggacaagctttgttgcagatgctgctataataactgtccctcttggtgtacttaaagcaaatatcatcaagtttgaacctgagctcccagattggaagctttcatcaatatctgatcttggtattggcattgagaacaaaatagccctccgcttcaatagtgtattttggccaaatgtagaagtgctaggcagggttgccccaacatcaaatgcctgcggttactttcttaaccttcacaaagccacagggcatccggttcttgtatgcatggtagcaggaagattcgcatatgaattcgagaagctatccgatgaagaatccgtaaactttgtcatgtctcagctcaagaaaatgctaccaggagctactgaaccggtaaatcctcaaaattcattttcagaccatgtacagttgagtactgtcaatttcagactatgaacagtagctctaacacttgtgctacacaactgcaggtccagtatttggtttcaaggtggggaaccgacccgaattcgcttggttcttattcctgcgaccttgttgggaagccagctgacttgtatgaaagattctgtgctccggtgggcaacctgtttttcgctggggaggccgcctgcatcgatcactctgggtccgtgcatggagcttattcttcaggcattgttgctgcagaggattgccgaaggcatctgtcgacgcagctaggcatctccgaccttttccaggttgggaagattatcatgagggaggagatgactgaagtcatggtccccttccagatatccaggctgtgaaagaagaacaaagcctgcctatttagcaccgtgtttatcctgcagctgctatggttaatattgtagctgctgctctgtagtttcctaattatctcagatcctgtaccgtttcacagtttgatcgtttatgtgtattcaaataaaaacagaataattatatatcaacagaccttgttctctgaatccatggatattgcttttcatttacacattcccagtcagtactgctgaatttattttagttttcagtgtttgccttgagactggagggctgtagtaaactagtaatcgtctgatcgaacttggcttgcgcccccatttgcttcattttgcatgtatatagggttgtagatgcaggctagttgcagttcaatggtcataaacagtggaggtttttctttctttactttcatacgtagatctccactaataataaaccatacagcatcctgcatattcggaaacgattccaccatcgtgtgaaccatatcaaacgcattcattccactgtaacatctgctgccacaatttgcaatgtccatcccatcctgtagcatcagacttgtaaattgtaatagccacaaacagagaatacattaattccctcccccaccacctaaaaatcattttttttctttcaaaaatacatatttcattaaaaaatctattatttattttcattgtattttgttttatcataaaatgcattttaccatgatttgtattttacatatttacacaaaatatttaagacgaatattcaaacatatatgtctaaaagtcaacaaccacatattaaaaaacggactcaatactacctcctttttaaatagatgacgtcgttgagttttgaatacacgtttgactaatcgtattattaaaaaatacgtaattatcatttaccatattttttagttgttttatcattaaaattacttaaagcattatttatatgttacgtatttgcacaattttttaacaagacgatactcaaacgtaacgttatctattaaaatacaaagggagtatatatattatctgtgttctagtagttcctcttgtaaaaggaagaaaagataaaaacaaactggtgccgacgccaactatttccaccgcatttgggcccacatgtccgggagccaaacgcggctacgcgacccaaacgcaaacgcaaaggcggaagctgggatcccgtgtcgtcgccgactccgactcctcctcctccgctccatataagactcgccccaaccccctcatcaacttcataccaaaccgaaccgaaggaccccacccaaaatcacacgcgccaaccagatcaaacccacctcgcaggagaagagaagcgatctacctctcctcgaggtggtggtgaggatttggagttgaattgtggggagggggacctcgcgggtgttgccggtttggagcccaagatagggttatgagctgcttcgcggaccgccgctgctacgccgccagccgccgccaggacggcctcctcgtgttcatgttcttcatctcgattcccatacgtactagtagcagtagtagtaataattgtaattccagtagtagtattagtagtaatctcctgtaagcggagttcctcctcgcggctgcgtgtacggggacgggaggaccttcttcctcttcgtgttcatcttcttcttcttcttcctctcttccttcggcttcggcgctggcggctatggatcccaatagcctcaaaactggaggtatgaattattcccacttttttgtaatttttttttctgaaattttatctggtaggagtacttggtagtggtgcgtcgtgaaaggtgggaatatttcccattgatcatagtatttttagaaatctatctattgtactttagaattaaattttccacatagggaaggtgatcatcacactttagattttacaagattattagaatttataattctagttgggtacaaattggttagttagttggtaacttgggtatctacagtattatgtagattagtgagcttgatgttcaacgtgatttctctctcttatgattcacatacctgacagtaaaaaacattttttgttcaggcctcttgcttccgaccattgagaggcaatgtgcttcgcctccatccgtcatcgtgatcggtgggggaatttcaggggttgcagcagcccgtgctctctccaatgcttcgtttgaggtgactgttttggagtccagagatcgcgtaggcggtcgtgtccataccgattactctttcggatgcccaattgatatgggagcctcatggtcagtctcaccctgaattgttagtgtgagaaattcactttagattctgttcatacaagcttacttactgttcattccaaaaattcaggctccacggcgtttgtaatgagaactccttggcaccattgattggctatcttgggctgaaattatatcgcactagtggcgacaactctgttctgtatgatcatgatttagaaaggtaatcttttagctcttgatcttacgcttttctttaccgatccgcacaatccttgttgattcttacatcaactctgtcaattgattctgttacagttatgcactctttgataaggctggccatcaggtctcaaaggagacagttgctaaagttgaagaaacatttgaaagaattcttgatgaggtacataatgaactcatttatacttggtacttctggtgccgtttgaagagcatgttcagttcactatctaatttctgttgcattaatgttccaaaaaaaattttctgttgcattgcagacagttaaagtgcgtgatgagcaggaacatgacatgccccttctacaggcgatttcacttgttcttgagaggcacccccatctgaagtatgcacattcttgtaccatgctatcaatttactcacaacatacttaataaattcctaggatgcatcatgagaggttgactgatatggttaccattatttgtaggttacaagggatagatgatcaagtcttgcaatggtgtgtctgtcggcttgaggcatggtttgctgcagatgctgatgaaatatctctgaaaaactgggatcaggttagctgaaatcagtctatattagcacactgcacattcttatagtgacattagtttgcttagtgaaggatattggtaaattacatcgaattgtttgccatcttgcatagttagttacttatgtttgtattcctcttaactatgcaggagcatgttcttaccggtggccatggtctgatggtgaacggatactatcctataattcaggctcttgcacaaggtctagatatccggcttaatcaaaggtgtgttcttttacctcccgagcatacaaacacaacaattaatttcagcatactgaagtccctttttcagtgtattttggctccacaaaattacttgtcgtttcacttgtcaatattgctaaacagttttgcttactcgcttttgctactgctaaatcttcagggtaaccaaaattgcccgccaattcaatggagtgacagttaccactgaagatggaacaagttactctgccgatgcttgcatcattacagtaccgctcggtgtgctcaaggcaaacataatcaagttcgagcctgagttgccctcatggaagagctctgcaatcgcagaccttggtgtcggtatcgagaacaagatcgccatgcacttcgatacagtcttctggcctaatgttgaggtgctgggaatggttggcccaacgcctaaagcatgtgggtacttcctgaacctccacaaggccaccggcaatccggtcctcgtctacatggccgccggtagatttgctcaagaagtggaaaaactgtcagacaaggaggccgttgatctggtcatgtctcacctgaagaaaatgctacctgacgccactgaacctgtgagtttgccatctcagatcatggccacagttagttccattttcgagttcgcattatctgaatgaattcgttgttcttgcgactgacaatttgcacttgttgatttgtgttattgcagacgaagtatttggtttcacgctggggttctgacccgaactcgctgggttcctactcgtgcgacctggtcgggaagccggccgacgtgtcggcgcggttcgccgcaccggtggagaacctctacttcgccggcgaggcggccagcgccgaccactcggggtccgtccacggcgcctactcgtcggggatcgccgccgccgatgagtgccggaagcgcatcctgatgcagaagggcatccctgacctcgtccaggtcaaggcctacgaggagatggccggagtcattgctccccttcagatttgcaggacctgaaaaaactgaacctgctccaccctgccattgtcatggaatctggattgattcaattgccatgcctatgccctggaatcttgatgattcaatcactcatacaagttcaagttcatgtaggggattaactgcatgaatcaaaattattaattaataattatgtaattgtcatgttattattgaataaataaatcgagatcatgcttgagatctttgtactgggacacagtttcaattaattaatgctagtaacaaccttggagtgaatgaatgtgagtagttgggctggagttgcttgttcgtcttttgctgctgtgattgcaacctgcgagggagaagtgcacggctgtctcgtctcatgcctttgcttgctttgagcctttgaccgtcgccggcggtggatggcagctgacctcgacgtcgacgtggtggaacacaaatttggcgccacgcatagttctgaagatgacaggtcatcttgtgactacaataaaacgctacttccttaaaaaaaattcagtttttaatacaacatttaactctccgttttatttaaaaatcttctaattagtatttttattttcgttagatgataaaatgtaaatagtattttatacgtaactatatttttaaatttttataaatactagaaaaaatgttcgtgctgaagtatattttaattgggtgaagtatattttaattttattattgttatatggattagttaagatgaaatttattgtgggagttcgcttggatatatatttttttagaaaatcatgagctgtggttaggagttcgagatcgtctcaaggtagtatgcgagttttttaaacagacttcttatatgattccttctgtattacaaaaataaataattttaaaaaccgactcaaatatatatatatatatgtatttactccatcgtcacttagagatttgggagggagaccggttgagctgacatgtccacgatggcagaatctcccaagattccacgtggaaccctaaccttccctttccaaaaagaaaacgagagcccttttcctattgacgcacgtgagcgcaccgcttaagccacgctacccacgctacgcctctctatacctaacgctttccccgaactccaagagatcaaaaaaaaaaaatctcaaacggcaaagtcaaaaaaatactactactccgacacgaaaaacaaacagaaaatcgggggaaaaaaatctctgtccattcgttcgcttctcccatggcggcgatctcgcgcgcgatccgggcgtgcgccgccgcggggtcccggcggagcatggcgtcgtcggcgaaggaggtggcggcggccggggcgcgggcggcggcggcggtggcgcggcgcgggcgggagcgggagcgggaggaggacgggaggcgcgtgcagtgggtgttcctgggctgccccggggtggggaagggcacctacgccagccgcctctcgcagatgctccgcgtgccccacatcgccaccggcgatctcgtccgcgacgccctcgcctccccgggccccttctccgagcaggtgaaacgccgcctccgtttctctcttcctctctcttggccttcgcccttcgaggtctcacaatgatggtgatggggatggatgataatgaacaagagagcatgcgtttttcagattccaatttcttgctgtcaattgcttttgttaagttgatggatcccctgcatcgagtacggaaaaggctttaagtactaaattgttcttactaaagtcttattatgctataagtaaatctagatttcctctaacccccatctagttaaatcaagcggttaagatcattgtttgtaagagttatgtaagatttttttgtagtacgtgtggttataacaacgaacaggaaaagaatgatccttagggtgcctaaagagatggcttgatgtgagaatagtaatgtattacttctatgtttttcattgttctgtgtctgatccgatttcagcttgcggagattgtgaataatggaaagctagtgtcggatgagatcataataaatcttctgtcaaagcggcttgaagagggagcagaaaagggtgagctgggcttcatccttgatggttttccaagaaccataagacaagcggtgagctagttatttgacctgactgtaagtatgcaaaacacatacttgcaacttctcagtatacaattatgatttgccttcaaatttgcattttcatatttaagaggtgaaatcatatacatagcatgcaatttgatacacataatgtgtaacttgattgctgaggtagtattaatctttggcagttcaacattaagacgctgtgcctttataatcagcttgatctggttactagcagcattttggcgactagacaaatcaatttgttaacctttgcataagttggtagctatgcattagtttacttaggtgtgccataattccataaacggatcagttaagatgctatttttgtgcctatattgcatatatcgttgaggccaacaatcatcaactacttgttaaatcttatccactggaactattttgtgctttggtaggagatacttgaaggagtcacggatattgatttggtcatcaacctcaaactccgagaagaggctctgcttgcaaaatgccttggtagaaggatgtgcagccagtgtggtggaaattttaatgtagcgtccattgatatggagggcgaaaatggtggtcctcgaatgtacatgcctccactactgcctcctccacagtgtgaatcaaagttgataactaggcctgatgatactgaagaggtggtaaaggagcgattgcgtgtttatcatgatttggtatgttctagcttgtgttatttttatttattgaattcctcacttgtaatttgctagtaaaagactaaggctttgtttgtttgggcattcggcagttgcaaattccttgttttccgttagcatgcttcccaaactgataaacaatgtgtttcttttttaaaaaaaaactttttatatagaaatttctttaaaaaacaaataaactcattttttaattttatttatactcaatttatcatgcactaatggcttgtcttattttatgtgcaaatgaaaagctgaataagggaaagtttacatttagtttactttggcatcgtgccgtcctctctaagctgtcatttttgcagtgtgagccagtggaggacttctacagagcacgtggtaaactattggagttcaatctaccaggaggaattccagaatcatggccgaagttactgcaagcattgaatttagaccctggcaatgaaagatctgcagcagcatgatttttgctttaggaatgttcgttatgtatttgtagccctacgccagaagtagttaagtaatgagtattccttgtacctctagaagtagttcaatcgggttaccaaaattatattgatatagcactcaattgtataggtgattcatcatcgatcttgcatgatgccatgatcgatgagtgtgctggttgttattcttaaatgagaaagcttccaataaaccaatacacatttatttgtagccaactatgcttgttgaaagcaacacaaggcaagccttgtgatgacagtaatattttccttgcaactatgcctgtttgaaagcaatacagagcaaccattgtaatgaaattctggtgctattgacacattgagagtgtttgcacatggttctgaaatttcccttgccccaggttgggtcttatctgaatatgcaagtagcctgctgaatactacctccgtcccataataagtcccataataagtgtagccatgagtttctgtgcccaactttaatcgttcgttttatttgaaatttttttataattagtatttttgttgttatgagatgataaaacatgaatagtgctttactcgtgacttatgtttttaatttttttaaaaaaaaatttcaaataagacgaacggtcaaagttggacgcggaaagccatggctgcacttattttgggacggaggaagtacagcagaggtcacagactcagttcaagtagcaaatctgtcttttcgaatgcaatctcctcacggtaagaaatgtgtctacccttttagcaggaaccaaatagtatctggattagaagaaggtatcacggttaaaggcgttaggaattgttatactacagcattggtagcaactcaccgtcacaacgggggtgtagctcatatggtagagcgctcgcttcgcatgcgagaggcacggtgttcgattccccgcacctccaatcttttgatctttttttgatttccattttatcataacttaaaacctgttttttgtttttcattccaccacagcttcatcactcagaacttccatttcatcataacttaaaatctgttttttgttcttttttttcattccaccacagtttcatcacttagaactttattttcttgtgatgaaatgaaatgaaaaacaaagaacttcgtatttaggtagtacaaaattggaataggccgtagaaggtgcctatgattctgggctctggctgtccgctgatccgctggccgtagaagtcaagcccatctcacagtctgcagatcgcttctttttacaacccaacgggccattttcagaggcgtcacccgtaaatccttgggccaatgtgacccaatcaatttcgtgaaaagtactccgtagcaaacaacgcgcgcgcgttccctgcaaaaaacgccggaaaacgcattgccgagcgagccgtttcagcaaataagggatcgttagactttatcagtgactgtatgaaacttttatatatgtgtgtgttcttacgacttaaaagataatgctgaaaaatttatttcaaaatttaaattttggttttgacttattatatatttttggggcaaccgatggggctatgaggctatgagctatccatccatccatagcgcaacgtgtgacagcgtgaggtgacaagatggaaaaccgtgagccgcgccaccggtgtaaaccccctcccttcacgcgcgtttactttgcaagcaaaggacaaggaaaaaagccgtaattggcgaagaatgttcttggatttgattagcagcggtacggtaacacctctagcttgcatttgcatggtagggtgatttggctaggagagcaggatcatccgtgcattcaattttcctcatttctttttgcaggctcaatagaggagaggaggggcctagctagcaccaagataatgcagcaaaaaggagagaagagaacatgtcatccagtccaaagtgcaaacgtctctatacaaatggaacatatggagtggacctaagcctagttgcttctgtgtcccaagctcccaagtgtcaaagccttaatgtgcaaaaccacatctgtggggactcctgaaagcaaactaaatgattgcaaaagagttcgtttattcacctatttatttatttattttattttctttccatgtgtctgttgtttgatactttgattgatcatgtgctaaactgcagaaaaaaccaacaggcccagagtaccggcgaaaaggctcctcgatgaaaagtgcagggattctgggggagttgccagtgcgccaccgttggatttttgcacacatataaacaggggactctgctgcacctctcacacagtaacatatatagggacggttccaccaagcacgtttgggaaatggttttttgagcaacatctcatgcgaacaatttaggcactatttacttgtaccttcaccttgtacgtgtgctccatcccatagctgcattatttgcatcaatcattttaattgcatatatacatactccctctcgtatttattttttttaataaatgacatctttcactttttatcacacgtcttttaataagacgaaatatcaaacgtatgataaaaaaaatcaataacgccatctattaaaagacagattgagtatatgcgagacatttaattatttgccacctctcaacaatttaacactcgtgtgacataggagtagacgcatagggtaacaaattgctaaacgtcaagtaatctatgagtagcaactagcaaatacttaaatatctcctaatatgttagcattgcaccaaagtctataactatattgagctttgtcctgtccatggtaaagtgtggggttaaagtgttaaaaagctattggtagcagtatctagtatggcgtggcaggccggtgcagataaaaggggccccgggttttgcccggaaatgaggagaggacgccccggcagctagcggacgctttgcatttgcatgcatggtgctctctacttctccctccgttcccacggcaaattgcaaaacgcatgctagtatttggcaccattagcctaaggtagtagtatcagcgtgttacagaaagaaaatagttaagtagcagtaattaattaaagcctgtgattaaggtaaagcagcagtgcagttacaaaccgaaacaaacaagagtcagcgaactgaaaagaagaccgggaagaagaagaagaagaaaaaaaaagacccgaacagagttttgatgagcagtgtcaggtctgtcacatgagaagagagcgaagtagctcagctcagcccccactcgctcacatggaacgcctctgctcgcctcgactacttaaccagctaaacgctcggttgattaggagaggaaaaaaaacgagggaaaaaacgggtggaaacacacgcaaaaacacaacgccgtgcggccttgtaaatacgggcgacgccgacgcgcatcgctccccgaacaccaaacgcctcagcttgccttggctctcgccagtcgctacgcccgcgacgacacgaccgcgccgcgcgcgcgcgagcgagcgagcatgtcgggctcctctgccgacccctcgccatccgcctcgaccgcgggggcggcggtctcgccgctcgcgctgctccgcgcgcacggccacggccacgggcacctgactgctacgccgccgtcgggggcgacggggccggcgccgccgccgccgtcgccggcgtcggggtcggcgccgcgggactaccgcaaggggaactggacgctgcacgagacgctcatcctcatcaccgccaatcgtctggacgacgaccgccgcgccggcgttgggggcgcggcggctggtggcggcggcgccgggtcgccgccgacgccgaggtcggcggagcagcggtggaagtgggtggagaactactgctggaagaacggctgcctccgcagccagaaccagtgcaatgacaagtgggacaacctcctccgcgactacaagaaggtccgcgactacgagtcccgcgtcgccgccgccgccgccaccggcggcgcggccgccgccaactccgcccccctcccgtcgtactggacgatggagcggcacgagcgcaaggactgcaacctccccaccaacctggcgccggaggtctacgacgcgctctccgaggtgctctcccgccgcgcggcgcgacgcggcggcgccacgatcgcgcccaccccgccgccaccaccgctcgcgctgccgctgccgccgccgccgccgccctcgccgccgaagcctctcgtcgcgcagcagcagcaccaccatcacggccatcaccaccacccacctcctcctcagccgccgccgtcgtcgctgcagctccctccggcggtcgtggctccgccgccggcgtccgtttccggtaatggtcggtgcgcgcaccgtacacttaatactcatagtagctgttacatcccctcccctccaaaccatttactactgttctctcacactgatatgtgggcccacctcgcagcgagctgagctccgccactatacgttattaaaagcccgcgttatgattgggctagttacgttgttgagttgagctggtcgtaattatttactaccgctacattttttttacctttttaccgtggggttcgggagagggtggtcgcggtaataataatgtcctcaactcaggggttgggagaataaagctgcgtgcagtgtggtgcagttcatgcatgggaaaggtgatgcgaatccggatattttatgggggtttaattgaaagatttactccacgacgatactaccctctactcctgccatgctgcaagcatgcgtaatgcgttacattgcgaaatcactcgctttgaatgaaaaaaaagcctgaaactttggagaaaaaaaaagcaccttttgttttctcctcgtgcatgcatgccgcgctgcgtatcttgaactactttggacttttgtatcgatcaacaaaactatacctatattagcagtaattaatactacatttgtagatatcctttgaccgttctatcttatttttgataattaaaaaaattagttacatttaaaaatgctatttatattttattatctaataacaataagtgtattagttaaatattaaacgttggatatgaatagtttaaaacgttggatatgaatagtttaaaactgtattgttttggggcggagtgagtaattgattgatcgattaattaagtggttgactaatgtgtgtgtgatttatttgtgtagcggaggaggagatgtcggggtcgtcggagtcgggggaggaggaggaggggtcgggcggggagccggaggcgaagcggcggcggctgagccggctggggtcgagcgtggtgaggagcgcgacggtggtggcgaggacgctggtggcgtgcgaggagaagcgggagcgccggcaccgggagctgctgcagctggaggagcggcggctgcgcctcgaggaggagcgcaccgaggtccgccgccagggcttcgccggcctcatcgccgccgtcaacagcctctcctccgccatccacgccctcgtctccgaccaccgcagcggcgactcctccggccgatgatcgccattgcaatcatatgcaatgcagcaaggacgatcgatgtaaataacccatggagatgcatggatcgaggcatcggattattgtttggaatggctgcaagaagaggagtagctatatatttttttttttgagtgtgcatcgccatcgcgtcgtctgcgagtattgggagtacggtgcattgcatgcacaacgcctccgtttcttgatttctttctttctctcctgtgtcctgtgatttttttgttgtttattcttttcgtgcaattagtggagagactggcaggtgtgtggtgtgaatgatcgaaatggttagtgtggctgctgctgctggtgctgttgctgttgctgcgttttttcttctcgggtgttgggtttgtcgtggacggcgatcattagcggcacagtggatgagagagctgagctctagctgcaggtcgcttggtctcgctgcgctgtcatgtgatcactactgcgcatgggggccacggttaccgctatagctgctgcaactgcgtgcgagaacgagctcgtgctgagctatacaagctttgctgctacttctgcttgcttttgtgctatggtggtgttggccgaatcagatcagagtttgtgctaccactttacattcgagattccgcttttgcccccgtggtgtacttgcaatatactccgttcataattaaactaattaacattgaattgaattgtacataacctaatataataaattaaatctgatcatgcatatccaaatttattgtattagattgtgtcacattcaatcttaggttgatttattatgagagtacaaaaatatactccctccgtcctatttttaagtgtaattatgagattttgtgtctaacattagaccgtctgtcttatataaaaaatatgattttttttttaaaaaaagtcacgcataaagtatgttttatctataataaaaataaaagtattaatcaaaaaaaaattaaataagatagatggttaaacttcgttggacaaagaaacacactactgcttttttttttttttgacaaaaggagtactagtacagtactacgttcgtgtggtgtaataattgttgagcacaagatagcatgagatcgagcacagcggagtacgtactcatgcaaatcacctgatacgacgacgcccgtccatgtccatcgagtacatggaattgacgtgcattgtaccgatccatgcatgcactggctacactcttctgtcaattaattaatggtatcactagtacggtactctagctagcacaatgttgtgatttgcagatggtaatctgagcaaatgacaattaattgtagggacgtgtgtctctctgcattgccgggtaagccaagtacgctgctcccatttcaagtccggattaatgcaacgcacgcatgcacgcacgcacgcacgcggccaagtgatcaagaccgcgattaccccacagtcccacacgtatctacgctcgccgacacacgcgctaaaccctcactcacctcacctgcttttgctcgcgtgcatgcatgtgtctcgtctcacagcattgaactcctggtcactgcaaacttaactgtggtttaagaaaaaaaaaagtgataagttccatcccttgagggatacaaccttactgtttactatatgttatctaaatagttattaaaaaattaaaaaataataatatagattaatacaaaatatatcacatgcaaaaccaaatttaatttctataagctgcaataaaaagaacaaactaaactgaaaatagttaccgtacattcacgtctacattggttatttttttttacaatttataggagttgaattttaatttgcatatttgtaaagtgatacatttcatattaatctatcttgctaaattttttaattttttttaactatttatatgatatgcacaaaatggaaggatacttcctcgagcggataagttgttctccacatgcataggtcggcggccggatcgaacagccgagctgagcagcagcgaacacacaaccacctctctagtatagctagccctgcatgcacgacacatatattactactagctcgttagtttagagacgatatcgtagacagattaatcatgtggtagtacgtagtacgtgctgattctccaggttaacaaccagctagctctcgtagatgctttgcttacgttacagacagtagtacgtagctcctcgatccctagctagcctgcatgattcctcacgatttgtttcttcttgtgaaaagaatttaattacttatacgaagtacgtagcttgtgttccaccgagaaattaacgcgagaaggaactagtaggggagagattctcttctctggtcgattccactagctactctgctgtgctgcctgtgtggtgggtagcgtagctttgccaaaagctcgcgatcgatggatcatcgcatgggacgcgcgcggtcaaaaaaggctcaaaacgcacacacgattctgcgattctgcgcgggcggcgtggtggtgaggagaaggccgtcgcgcgaggtaggcggccggcgaatcgcggggttggtgcgacggctgcgctttgctgggggatcaaccggcaccgccctgtgctgtactacctgggctattatgctaatctattctagcgagagagggaaggtagagactagagagagagagagagtgggtgtgggtggaccgctgtcttgtcgctttgctcccatcatctcacctcacctcacctcaccgtccccaaaggcagcgcagataggggcatttcggtcttttcattttgggcataaaaacaacctctaattttccattgtcttgcctggttattcaacggcgagaaaccaagttagggagaactgtaaaagaaagtctcagttataaaaagagttaacttctgataataaatctgaccaatatttatcttaattagattcattgttaaaaattagttttttgggacgtaaggtgtacttgtactccttggagatagatttgttttctttctcacatgatgttccctgtttcatgtatgttgtgtaaaaagttaaatttttcaaagaattgaataatacagatcaaaagatagcacatgatatgccactacacaaacatataaattaaaattcaacctataaatttagaaaaagaacccataaactatttattatatattcgtagtcaaatttattaatatttttgcttagcttgtattagttgaatctaatcttataaatatgtttgtgaagtggtatattatatgttgatttatcttattaattttttaactttttaagatgatatattacgacaacacaagttatggtaatctacatcgttcatcaacgctaagcaagcaaacagatcaggttaagatatcaggggtaaagtaaggtgctctcaataaaacatatacatctcagcaatagactagattaataataaaccatctcaatagtatgtctatatgggtatttatacctctttaatccattgcctcgtttttctctatagactatctccaggttagtagatagttttgctttctctcttcatttaatcttttccatataggaaaatatgctgacatggatcttttatatatagtctataagagcacccgcaatgttaaagtaaggtactatttataaaacatatacatctcagcaatagattagattaatagtataccacctcaatagtatatctacacatgagtatctatagctttctaatctattgcctcgtttttctctatagactatctctaggttagtagatagctttgctctctctctcttcatttaatctctttcaagtaagaaaatatgctgatatggatctcttatagagagcctatagataaccattgtgggtgccctaaataactattacggttgacctcatatactgagatggcggcacagcgtataggatagtactcgtacgtttggtggcgatcaggctttaattgattttggtggcgatggcgatgattttggtgtgggagagtgagaggagaggagagtggacaggacactggacactggacacaggcggtggtggtgaggttggcttggagtgctagtactacacgtactactactactactgggagtatatggattcctctccccgctttgtggtgtcagaaaaggccctgacaatctcccctagctgtcatccccgctcagagccgtagtcaaacccccttgaccggacagagtagataccatgccactcaactcactcatatccccgaaatgcccctcccttccaatcacaaaggtatacgtaaccctagttaaggacctgtttcgagaagtttaaaattatgagaaacagaaattaaatggtactctcctcgtttcacaatgtaaattaatttactatttctcacattcatatcgatattaatgaaactaaacatatatatttatctagattcattaacatcaatattaatatagaaaatggtataataacttacgttatgaaatggaggaaatagttagctttaaagaatttaaaaatatttaggtttctcggattctaactcctactttattttctggttctataactatatatatttttagaatctgaattataaactgaagcttcccgaatagggccgagtttagttttaaactttttattcaaactttcaacttttccatcacatcaaaattttcctacacataaacttttaactttttcgtcatatcgttccaatttcaaccaaactttcaattttagcgtgaactaaacacaccctagcatcacgtttagttccaaaatttttcttcaaacttccaacttttccatcacatcaaggtcctgttcactttggtaaagttgccaaaattttggtaatttgctaaaattttagcagaatttcttatatagttaccaaaatttgatagcaaactaaatgtagcaacttttttggtaactttactaaaatttggtaagattgtaaatggcatcaaagtgaacaggtcccaaaacttttctacacacaaacttctaatttttctattacatcgttccaatttcaaccaaatttttagttttgatgtgaattaaacacagtataggtcttaaagctaattccacatgtctctagctagaagtagccactactagtacgagttcaactttgctcctttcaattcacctcaccgatcatatcgatcacccttataattcaccgcccatgcaatgcatagccgcctacgagtagtttttttgacgttacgcttcgttgtcatcttgctgctacagtacagacagggcagtgtgctactaccccctaatctctattgtactacacaatgcattatgcatgtctctaattaagctcaaaaaatcgtaaaatttgtacttctactccttggactacaaatttctcaagagaaaatggtgtggcaacgctggagcaggggggcctacaggtgcgtacttgcaaagagcaaaagcattggagcattggatgctagtagctccactgaaatgggctctagagagagagagagccgcgctctgtaaaaaggcatgcagatgcagtgcgtgggcaggggatccggagctgagcgagctagcggtgcatgcaagctgtaaaaaaaaaaaaggcacagcctgcacgattctccacgcacacacgcacgcacgcacgcacgcacgcacaaggacccccgttcccgttccgtccaacaagtacggtgtacttatatttgccagaaaagagctttgtatgactcagaataaaaaccttaattcgtaagggaatgtttggtggtattttgcctgaattatgtgccacatatacagccccatcgttgggcttatatctggaataagccaaacaacatatttataaacgaaaaataatttataaataaaacttttatatatgtgtccttagtgatctaaaagcacagactgaaaaataaacttctataaaaaaactcaaaatcagctttaaatttaagattaaaaattcaaattttagctgataagtataagcgtaagcgaaaagatgagcccggtagaatggaatgatacatactgtttaactattcattaagaggaagtggaacacgtaccagcactagttgcaaaactgaactttcttcgagaaaaaaaatgtattggattattttcagttgaacacagtatgctctaattaagctagtactgaatttggctaactcaagtacgtatagcagtttttcaagctactaaacaaccccttaatgagccaattgtgagtcagctttaattgattttttttaaaaaagctagtacttcctgaaaaagaatatgaggtgcagctacaaacaacacactgtgaatgcatggttcgacggccagatcgacgagaaacgccgtacctatatagttaagacaacaataagctcatggatggacgtcagaggacgtggtgccattggaggagcgtaggccgggcccctacttacaacaatctgcctatacattcaggacataaattgagcttgtggccatttatttcaggcttttgggttggagccttgcacaaatagttgcattattatattggaggaaaagaaataaaacgaaagcatgaactgctggttatatccgagaaattagtacacacacagtgggttactgatgatcaggtgatttgtaaactagttgaagtgagctgcagaggcaagccgaactgataagtgatatacagtgttcttgcatctaaaaatattagtattttgtattattagtataagactttgactgataaattgctctacttatatactattcatgtgatgaaaagcataatcataaaaagtacttctgaatataaaactattaacaccaatttgatgtcgaaaaattatatgctaatggagtaattatcggtctaaatcatgtcttaacgtaacaaaatatgtcttaattttttgaacaaaaggagcccttaatcttgtgttattagtcgagagatcctggattgattgaccagaatatatagggtcctctagtacgacagtagcatagctagctagtcatacaagaatagaattacgatgctatcttaaacgaccacacacaggagtaattgaaatggagtttactggcagcgagacggtggtactggtacgtcgacggatgcgccggagatggcagcttgtataaatgcaatcccggcccatgggcaggggccaaaccgccaccaatcacccctcctctcctatccgggagggacacgggggccagtgaaaacgaagaagccaagccaaagccaacccacagctgcaataataacgcgtagccacagccactgccgatgccgctgctgcgagagggtgacaccggccaatgcaacagcggcagcagcagcagaagaggcaggcaaatcataaggcttgcccccacgcagctgcgtgccagtcaaacggagccagtcaaaactccaccgttctcttcccccacactgtgtttcagccccacacaaacccatccatccagcaccgtacgtgtacttgtccagcaagggtagcggcggtgacagtatatgacattattgtaccatggggagagagataattggctgtgtttagtacacgctgaagtttgaaagtttggttaaaattggtacgatgtgatagaaaagttgtgtgtgtatgaaagatttgatgtgatggaaagttgaaaggttagaaaaaaaaaaacttggttaaaagtttggaaaaaaaactttgaaactaaacagggtagtaatatataggttaggccactgggatgcatcatgggttaaaaaccttgaatgctgcgctggaacgagaattccgtggtagtactgaactttaattttagtcggtagattgtctgtgagagcatggaacatattgtgaattatggatgatagaaaaaactgaattttgtaaccattataggagaaaacaatcaaacgagttaagtattagtagaaagttaataacttggtttagaaaggaataacttatgacaagaaaattttatggacaaattagcatgagatctaacgtcatggaaaatctctgcaatttttcttgcaatctatccaaactgtcgttcgtgtaaaaacataaaattgcttgaaaatccatgttttacatttctatttttcttttaaaattttacatttttcatattaatgtgttttctcattcttgcatttttcttgtgttttatatatatggtcatttctcaaatgtttgaaaatcctcttttatatctgtcctaaatcgtgcgctaccttttactacattttcttaatcctacattaaaaaggtggtcttataattaaggaaattcatgaaaactgaactggttcctattaaattatttttttaaaaaaattactttgataaaaagagctgtagcattcttaccttttgcgtccaactacagtctacagtcagtcccggagacatttaaccgacatccgatatataatgatggttcacgtccagacaaagtcaacagtcaacatggcatgcaaagcaactgttcacgctcctcgatcagacaagataaaactgtgcccgtacggacatggctggtatggcagtagctctgatcaccaagagtactccctcggcacaattaactggagcctgcctgaacgaaacagaactcaagagtaccaaccaaaaccatcacacccttgtcttttcccaaaaagtaagatgcaggtaagcgcaaggattaccacgggcaccatggttattagtggactttctcttccagcatttgacaaagatccaaaggtaagaagaacaagattttatcagcatctgttcaggtataataatattatatgcattaaaagagaactggagtaaacctactcaagagttctataaacatactaggaaccactacaaaaggaatatgggcatttccacaccaaagaaaccagattcgtcatttggctccaagcaccaggagggaaaaagaaaaataagagaagcaattatgaaccctcacagaaaatcactcgataatcttgacttggagccaataaagaaataacatgagttgataaaataggcttttagtcccacaaaaggttgatcatcgagttggccaacccggcttctttgaaagttttatcactctcgtactccaggtttgtggatgccctaggaatgggctgtacgaaatggaaagccttcttatccccgtcctccacttgaggatagcagaatgaccacaggagctgcggcgagatggataaagcatcagcgaacaatgtaggagaagagacaaaactatggaaatttatttcagtgttctaaccttaataggatccgtgtgaaggaaattcctctggatcctcctaccatcaggtaggcgaattgcaactctgcacaaaagctcccgacttcctttgggttcttcagggagaggaggatagttcagcttagcactcaggctaggctcattttctacctcaggttcaatcttttcctcactagtgtcagagcctttactctcctcaagagaagccgctactgcccgtgctagttcttcgtcttcatcctctgtggctactacgggtacaggggttttacctacaaagaaatggaactgtgaacatgtgcttttggtcaaccttgaaatgcattgcacgtaaccagatcctaacataataataaaaaaaaacacacacacacacacacaatcaatgctgcgaaattaatccatcaaaatatccccttaagtagtggcatccatatgaccataccggtaatattgaaaattacaaattttctttgtgcatgtcatgccatgcatggagagcttacgctaacttttgttatgcctacccctcttgcaaataaatctgggtagttgcttatcacaagtcaaatttgaaataaccttaacttacaatcgacacacaaagaccatcgttgtcagagggtggcaaaaccagttgtgacttttgcctaaagataactgtgattagacatgatttaaattctaattcctaactacacaacaaataaattgttgttgacatatagactactgaaatattttttttccttgcgtctggtctatgttatgcattatcattgttcaagatgagtgttaatggaaagtgatatgtcagcgatgattcatatccaagtttgaaacatggctaagacaagtactgccagaaaccatacatttccaatgattttcctattataaaaaatgtccattgagtctcgtgtccatactatccaattattgtgttatctgggccattaagaatccttaatatctagaagtacctgccaaaaacaagttgaaataaaccactaaaacttattgccagctatcaccaacaggataaaatctggtgacagatgatgtatgaggatagaatgactcgtaaggccaatcctccgactcccataaaggtcagtgattatgccaggcacatccaccagataatcatcgttatatcataattcataacaagagtaaatttcacaaaactacaggtattttgaccaaattatcacaactacagatttaaggagttgtatcacaaaactacatatttagcaccaaatttatcacaaaactacagattttagattaagtatcataaaaatgcatatttaatattgaacttatcacaaaactacaacttttggagtttaaatccctagcaccattgttatggtggagctataaacatcattactttgtgatttaattgattctaaacctatagttttgtgataatttagttactaaatatgtagttttgtgacacttcatcttaaatgtgtagttttgtgataaatttggtgttaaatatgtagttttgtgatacaccgagttaaatctgtagtttggtgataatttggtcatagtatctgtagttttgtgaaatttactctcataacaattacaagcaacctcccaatgaccaactgctcctggaaatcacgcttatgtagtgtaagaacgacctaactgtagttggatgatacaaatgaacaccgctcccccttatccaattttgtaaagcatcaaatgctagtacagctagcctacccccaacttgattgggaacaaaggctgatgctgttatactaagtactagaaaacaaaacacaatgcacctagaggcaccctcacatgacaatcatccctgctactttttcaagaattggacatccactcacaaggtttgaaagttttgattgtatggaagccccatatctttaacagatgaagtttcgattgtcacgaacttagcattaactatgcatctattccacaaaaaagttatttcaccgtgttaaaagataaatccatataatgtgaagaaagattgcaacgaaaaaagataggctcaacatatggttatttatgtactaatgtgcttggttcatataatagttctgcagaaacaaactattcgagcttaaatgtttcaaagggaaaaaaaaacatcactgctagttaacatatctttggacacaagccataccttgtttgccgatagaagtttcctgatcaacttttcttggccgtttttgaggttgagctgcatggtgctcctttggacctttgtccaggtaaggcatcaaatcctgtggacagttcacatgcagacagtaacaaggaataccatgtcaaatcacagttaagattccagtattagaatgtggaagtaagaatgttatcactacagaagttagtaacatgagagatgaaagatagtaggtcgatagggttaccaaattacctccagcaaacggtccgggtgaatcattccattccacccacgcattttttgcccagtgatagggtcaatcagaagaatggcaggaacagagaccaaattgtagtaggtgcataccttcctcccctcactggtgtcatggtaaacctatatttaagatgatagaacatatcagtagacaactagagatgctaaaaatttgatccatcttggggtttgggaaaaaaagtgaacattagaaactctttctttccaatactattcctaatacatcaggaataaaaattggagatacagttatgtggctcaggtatagaaggcgaaacaaaggagtaaggaccaacctgccagaaaataaagttcgatcgaattgtctgagccacagcctcattagcccaagtgtcccgattaagcttcatgaaagaaacactcaagagtaaaaactttgccaatgcaggaaaaagaatgaagggttaacacaaggctgcatgacattaatggtaagatctgtaccatgtgagagctgaactcttcagtcgattgcaaattgatcaagagccacttgtccagaacagaagcctctaactttgcctacatttatgaaattcattgtttttagaaatctgaattaaattggtaggttatagaaaattaaaggataatcaaattagtattatgaagttcatcagctccaggctttcacatgaaaattagtagcagtttactagttctcgtgcactggtcattagacaacaaatgaatttgcaacaactaataaaaacatcaatgtactttcaatgataaatagtgtgaacaaagaacattaagaagcatgtttgaccatgcctcttgttgacaaaagggaggcaatgtttgcttgagtaataaactgaaccttagcagctaataaaccgaactaattatttgacaggtaggattgttagcagctgagataaatgaagagttcgtgggttacatggcgtgctgctccatgataacaattcagtatgtcactaatagaatattgcaattttcccaatgcataccaaatgcccacagacaaagcaggttattgaagtttgcaggcaaaggcagcacatggtcatgttagagataaaaaggtaacaccagacgttaaataagaaaaaaaggatagctgaccttgtcgaagggtccattgaacatcaaagcaaatggtggacgatacaatgccgccagattatcacgagaactagatgcagcattctgctcagaatcccaaacagcagattgccttgactcctcttcaaagttacgaaatgcaactgttgaattaggccgaacgctgaaaagaagtcataaaaccgtttcaaatttagaaaatgatagattttaaattagtagtccacgttccaggaaaatcatgcaaaaagtttggttctattagtgctatacttctctttggttactgtggctcaacttgagtttcatctctagcctattctaattttctttagagtaaaaggctgttgttttagaattttggttttagcaaagcaagacatagaagcctaacaaagcatgtcggcccaaaagaaaagagtacaacaaaatttgggccttatcatctccaaaagaaagagtagaacaaaaattgcatcacttcccacactttaggtcattaggtgtggctcagcgctattccttccagatttaacaaaagtggactataacaaagaaccatagtaataatgtcatatgtattcaagagatgttgcatctaccaaagaaatggctaaacatcagcaaaatcaaccccaattataataaatacttggcacagcgcatttaagtatatatatctaagtatacccccttaatttgcagtgccattggggcagtcccagatatgccatcggtatcatagagaataagggataaaataagagctgtgactgatatgttaatggtcattgtgttgtcctaatgggtagaaggataacaccccgaataaaaacattcctaactttatctttttcaggaggcaacaatctctcctgttttgaaaataattggcagcaaatgaaatgactagatgtttcttctgatcagtaaattctggttgagttcgagctagtgattgtcatcatatctgttggtgacaagtaaagatatctaacttgtagccatgaacgaaatttgttggtgaccaaccaaataccaataatctcattggttgcaaactatatgaaagagatgttagtccacttggcaggggaagagagggcaggaggcttgactgcaaattagtggtactagaaaatggtgctagctattaacatagccaaaggtgcaatttaggccaaaaggtttatatcccatcagcaagccaacaatgattaccaacaacacatgctaattccattggacgagaacaaaattactataggttagtgacatctattcatcaccaaccaaacacacacatgccttttatgaggacttaagcttcgatttgaagccatcaaaaacttaaagctcccctaaacagcatggccttaacattgtcggataagagtttttttagacaatcacatgccccatgtaacctatcccaatttctctttgaaccaaaccaatgattctaggcattactagtaccgattttgtgccaccgatacaccctatttggctatttacatgtatcagtacatcacataaaccacaatcaccacaggggcagcacagatattgcattgaactagaagttgtctcacacaaagtcttaacacttatactgaggaactcaatcccaggaacccaactatcataaagagtttgctaaccaagcactagacttacacgaccatgggggcatcgccgtagagagtctcccgctttgtgggcagcggtgcccgcacatcctcttcctccccaagtccctgcagcattccatcacccagtgcagcagctgggggcggagcgaacctgcccatcacagcacacggtaagcgtacacaaaccaacagaaaactcaaggacccaaaaaccaaagcccaaacccgagaaatctcgcgccgatccacctatgacctacctcatcgcgtcctccacctcagcagctgctgccaccgccgccgccgccgcttccgccgcagcagccggcgatggggccggatgcgccgcaagggcggcctcgccgtcgatgtagaacagctgcaacgcctcctccagatgccagctcgtcatctgggagagacgggatcgcatcaaacccttcgaatcgatcagaagctagactctagaggggggaggaacgagacgacggacctggaggaactgggtggccgtctcgggcgtctggccggcggcgatctcgaggaaggaggtgacgagggactccttctccgcctccgtcgggggagcgccggccatggcggcgaagtcggggatgggaccctctcgcgcgcggcggttagtagggtttggtgggacggcgaggagtgttggtgaggtgggggagaggggaagtggaaacgtgcggggtgagtaagacgagacgagtgcgaatgtgcgatgcgatgcgatggggaagtataggattggagatggtataagtgttggggggagtacggcttggaagggaagaaagggcccatcccgagcccagaaatgctcatgccgtgggcctcgtgattcgatcagttcgtggaccatgccacgtagtatatgggcctaggaagtataaaatgggtcgtttgtccagttggtcagattccagtaaacagtacaactgaggtccctcagcgaattacaaaattgtcaacttacagaaccgaattattcttggtctttaggtgatattgaccctggttttgttcaacaaagcagctgagtcagcacaggacccacgtaggctccgcatgtcatggtgaccaagtcattaccctgtcctcttctcctcgtctgagcaggccggcagatcgaggaggagggggaggagaccagcggggtgaggtaggaaagaagttgagccggagcatggcggtggacatgaatgcaaggtgggcgtcgttagagaaagtggcagaccagccgccgcagccactcttgtccacaggcggcttcacgatggagaggactaggaggatggctgcggaggtgagaagcgggagcagcagaagggagtaggcgacgtcgatgacgacttctatttctctcgtgcccttctcactgctgcaatgtcaagataatagacgtactattagccagatcgacgtagtagtattgtcttgccacgctaacccaaataacgttgttaaaatgtttagatcttatatataaataaattttaaaataaaaaaggttaaaaagataaacaaaaattgattcggtggccggtgcagcgcatgggacacggtggcgctggcttaagcggtttccggcgagagagaagacgaggatttttttttgttttttcgcggcaaatggaccacggacacagtgaaaagcccggcccagttaagtatactagtttcaggcccacgaacgcatcgcacaagcagcagtgcggccatggcggctcctcctcctcctcccatccgaagcaagcagagcgagatctggaaggcggccatggcgcgcctcgcgctcctcgccgtccccgtcgcgctcctcctctccctctccttcctcctcctgcgccccgcctccccgccgctccccttctcgcggcagcaagcggcgtccggccccgaccgccgccgcctcctcagggtctacgttgcggagctcccccgcgcgctcaaccacggcctcctcgacctctactggtcgctccccgccgccgactcccgcatcccggcctcctccgaccccgaccacccgccgccgcggcctccgcgcgcgcactcgccgtacccggatagcccactgattaagcagtacagcgccgagtactggctcctcgcctccctccagccgggctcgtcgtccgcgcccgccgtcagggtggtcgcggactggagggacgcggatgtggtgttcgtccccttcttcgcgacgctgtccgcggagatggagctcgggtggggcgccaagggcgcgttccgcaggaaggaggggaacgaggactaccgccgccagcgggaggtcgtcgaccgcgtcaccgcccacccagcgtggcggcgctccggtggccgtgaccacgtcttcgtcttgacaggtactgtgattcagttggaaattggaaatgtgctttttattttttcctgagtgaacttaagtgatcaaaatggcataatggaacgggctgttgatcatattaaccctccattgctcccaattggtgtgggttatatgttaagcattcgataggttaagttatgcttgttgtccgtctattatatactcaatcccaactctcaactagtatatgattggaaactagttttttctcctccatactcaatcccactttctgactgatatctacagggtttagctactcaactctaaaaactgtgagctgatttaggcttgaaatcattttgtgtgttctgttagttaccggctatacatgtgatttgttgctcggcgcctcagtgtaagacttaccaagttcccttttccaaacagagggagtgtgcccagaacagtgagcacattgacatgtagatttaaccatgataggaacctcacaatgcactcataaatttgaaattagttatgtgcatacttggaataggggggtcaaggtagctggttttggtttcttaggcacgctttacatgttttcttgtgtaagggagtggcatacccttgaaatgccatcattaaagaaaaacaattttgaaccatgtgactttctgtacatttgtcatcaaggggatattggtaatcctcagtgtttcggagcaaaagacacaactgttttgcaagcaatgtaggaatacaagatatactgtttatgttttcgttgtaattgatctgcatagtagcttattattcttttgtatgctcaggttttgttaaatattgaggcattctttgacagaccctgtggcgatgtggcatgtccgtaaagagattgctcctgcaattcttttggtggttgattttggcggatggtacaaacttgattcaaactctgcaagcagcaatgtttctcatatgatacagcatacgcaagtgtcattgctcaaagatgtcattgtaccttacactcatttgctccctacaatgcacttatcagagaataaggaccgccccactcttctgtacttcaagggagccaaacacaggcatcgggttcgtaccatttatcatactaataagcatttaatgtatgcatggcaatatttatcttctttgtagtatctgaatctaagcaattggaaatgaaaatggaataaaagaacatgttagtatgatatgggctatcttaaaattttattttagaacctgttgagtctgaatccacagctctttgatattatttagagtaaagtccatcaccggtccctaaacttgtatcgttgtgtcatcccggtccctaaactcgcaaatcgaccgttcaggttctcaaacttgttcgactgtgtcatcccggtccctaaacttgtagatcactcgtataggtcctccaacttgttcagttgtgtcacctcagtccctaaacttggatttgaatatcatctgggtcaaataggacggtttaaagactttatatttaaaaataattcataactttttcatgtgaactctaatgaagacaaactttatatcaaacttgtagccctcgacgcgatctacaactttgtagttgatatttttttttattttaagtcattttttgtcccagaatgtaattttaattttaaaattacaaaatctataaacatgcaacaatattttgggaccctaaacagttttaattcaaaaaattttcaactacaaagttgtaggtcgcgtcgagcgctacaattttgatataaagtttgtctttattagagttcacatgaaaaagttatgaattattttttgatataaagtttttagaccgtcctgtttagagaccggcgtgacacaactgaacaagttggaggacctaaacgagtgatctgcaagtttagggaccgggatgatacagtcgaacaagtttaaggacctgaacggtcgatttgcgagtttagggaccgggatgacacagcggtacaagtttagggactggtgatggactttactctattatttatgtatctacaaggaaactattgccatttgaagcattatgctctcaacagaacttttatttacaaaccagctttgtttatgacttatgagattgttgttctgtactactgtgcatctctatacagctttatcttactataacttctgaaattttctttcagggtggtttggtacgggagaaactatgggacttgatggttaatgagcctgatgttgtcatggaagaaggttatcctaatgccacaggacgtgaacaatcaataaaagggatgcggacatcagagttttgcttgcacccagctggtgacaccccaacttcatgtcgtctctttgatgctgttgctagtctgtgcatacctgtcattgtcagcgatgagattgagctgccctttgaagggatgatagattacacagaattcgccatttttgtctcagtcaataattctatgagaccaaaatggctcacaaactacttaagaaatgtccccaggcagcagaaagatgaattccgaagaaacatggctcacgtccagcctatatttgagtatgatagtatttacccaggtaggatggcctctgctgcacaagatggtgctgtgaaccacatctggaaaaagattcaccagaagttgccgatgattcaagaagcggttacccgagagaagcgaaaacctgatggaacatcgatccctcttcggtgccattgtacatgactcgcgagacatgattgttagtattagcaatcaatcccccatgggaggagttagttagcattccctgccaatttatggattgtttgtagtgcaaatatgagagaaatttcaacagtaggtttatgctcttgttgtcaattgtatttcgtctggagtgattccccgcattgctccatgtgtgaggtttgttggttcactgccatgagaattcatatatgaatctgcccattcggcagacaattttccatattactcagagagaagcttgagacagtacgtagtcccttatatttgttgcttctaaatgatttggctagcgttcacccaaaatgcatgcatgatcatgagcaaaataccttttgattcaacagaaagagatccaatctatgatgtttggcagtaccaaattcaggacatgaaaagcaaaagggagaaattttatagtctcaacaacatgaactgtagccaaataacagataggctgccaacatggtggccaaaggaacggagatattgtcatccacaacatcattgacaggaatacactccactacagtagctgctaatgcaacaagagccagtttaccaagtgccagatcccagcagacagtgaagtaaccaaggcaagagaagtagaacagcatcctgtgatgcaaaagatccatgagttaacaataacaaggagtaacaatgcaaaagaaccagcaatgcattctgaagcaaaaacctacagtgcagatagaaggaagccagaaatgaacattgagatgcttcctatccagctcttgttctcattgaatggcagcttcgcggagccataccttctcccaacaatgtcagcaaagcctgaaaaaataagaaccaagaaggtggatatacttagcagaagcattcatttcatcaagtgaactggggtattacaaaaaaaaactgcagattttcctaaattcccaggagatccaacatcttaccatcaccaccactcatcatcgacaacgaaacaatcccaataggagactggcgccagaagaccaaaacactgaccagcagcacaatgacatagtacagaggacctctcagcaattccctgtaagcaaccaaagatcatgtcaaggaatactattttgatttttgaatgaaggagtatcagaaataaggatcatagcacgaactctggttttccttcacgggtcaccgattttactagagcttcatcagtggaaaggcggagcccgtaggtcagaagccttatgcagttcagcaacgggacaattgccgcgaagaaccgtgcttctgtcgaattactgcgaaaggggcatgattttcttaagatctctagtctgatttggttgtagaaaacatttcgatgctggaagaagcagtggcaagggagacctgaatagtggccaggaagacatgaacaggactccggagagcacatgcacaatttttctgctcaggttctgagattaattatgaaaagaatcagaagttaacaagatataattaagaaaggtataaattttatgcttgaataatctattttcctttgattgatcaataaagaaagacttctcttttatctatcctaactactgtattttttgaacagtagcagtccatctgaaccagtcagatcttcccagcaattgaaaataaattcaagatacagatcacatccactgaattgtatataccatattttactctccggataacagtcaacagagctaaagaattgatattttttgaagaatggcggagatcaaagcttcagctccacctcaaaaaaaaaagaaatacaaaaaaaaaggaaaaacgagatccgacacctgttcgatgagccgccgcgccgtgagcccgtcgaaggcgcgcaccagggagtacgcgcccgcggtgatgagcagcgtggcggcgcagtcccgcagcgccgcgggcgtcgccgaggccgcgagcgccgccacggccggggcggcggcggcgcccacgccgagcacaagccttcgccgcatggagctcgccgccgccgccgcaggagacgcgagcctggacttggagcgcgacagcagcaaggaggaggaggcggcgaccgaggaggagcacgggaagtggcggacgacgtcgacgggccgcgccgccgcggccattcggtagacggactgcagtgaagcgaaatcgctggtaggccaccgcgaatttttgtcggggcgcgcgcgggtttctcgttgagacggggcacttttgtagttttgtggaagcgattcgtcccacctatccacggtactgtgtactactgtatctttttccgaaaataggagggctcgtccaaccctcctagagtgtacgtaatatctttgttggaaataggattctcctgatatttatattttggaaactcatgctagcaggggtgtgtttagttcctgaaaaaaaataaaagttcaaagaaagttgagagtttagaaaaaaagtttgaagtttatatgtgtagaaaagtttttttttgatgtgatatgatgtgatggaaaattgggaataggaaggaaactaaacatggcagttttattccacaccatgaaacagagtaccaatgcaattagttgcgctgaaactatcgttcaaagcacaagcataacatgcactggatgatctctcgcgctttgctgcagaatatatacgttagatattgaagaaacgatgaaatgatttgaactgaaatattatgaaaatgattgaaggatgatggtttagcatgtatatatttagttttataatgaaataattgtaaatataattactatatgtttatatgttataagttttgcgtgtttaatgagtagaatctatatatatatatatatatatatatatatagatttattatatgaatgtggggaatgctagaaagtcttataaattgaaacagaggtagtatattttgatgttaagttttaggtgtttaataggtattagttttatagaaagaaggattattgggatgagccaaatacgagatggttctcctgatatttcaggacagggttctccatatggaggaagctgttcctgtcaactcagtcaaaagctacaatcccatttgtcagctgtaacgtttattaataatttagttcccaatttttttctctaaaaatattacatcgaatctttggacacatgcatcgggcgttaaatatagattaaaaaactaattgcacagtttacatggaaatcgtgagacgaatcttttgagcctaattagtccatgattagtcataaatgctacagtaaccaacatgtgctaatgacggattaattagacttaataaattcgtctcgcggtttccaagcgagttatgaaattagttttttcattcgtatccgaaaacccctttcaacgtcgatcaaacgttcgatgtgataccaatttttttttcgtaaactaaacacaccctaaaaaacaaacgatagagctgtaacaacacgtgatgctgtacttgggagaactcatatccaaagatagataataacttcagtaatagtaacagtaactgtttaggactttatacatcttgcgaaaaaaaaagagcgataataataaaggactcggtaacagtaacaaagataaggcttctatactagatcttccctattcaaaactacaaaagagattgaatcaggttgttccggaacacttcgtgccatcgccgccggagtcctgatattgtacgggctgttcttgctctgtcaaggaaaaaacatggcaacgtgtgagcacataacacacacagacataacacgtattagcggccaatgtaacttttacatatgttcttaacaacttaaaaaaaagtcaatgatgaaaaagaaattacttataaaaacgctaaaatcaactctaaaaattaaaagtaaacataaaatttaaatttaaaaccttggagcaagtgcgagccttggcgttgcagacgggatactccttggggcagcaggtggagtgatccttgcagcaggtggcgccctcgacggggcagcatccccacacgatgcagtggttcctgatcccgtagttgcagcagcaggtggtccccgccgggcacttgctgtaccggtcgcattgctgcggcggcgatggcgccggagacggcggcgacggcttcgggttgggccccttcttgatcgggtaggacgccatcatggcgatgccgcacttgccggtgcgcgcggtgacgttgcgctccatgcggatgtagccgttctcgccccagtcgggcccccacgagttgcgcaccgtccagtaggcggcgccggtggcggcgtccgtgccgtaccccaccgccaccacgccgtggtccaggttggtgccgcaccggccggtgaacacgccggagtcgtagagctggaactcgcggccgccggcgtcgatggcgacgctgacgggctggtgcgccacggccttctggagcgacagctcgtcgttctcgggcacgtcctcgaagccgtcgatggacaccaccttgcggctcctcttggcgaggttgcacttgccgtccatggccgtgtacgggtagtcctcctccgtgtcgaggccgccgttccgggcgatgaaggcgaacgcgtcgtccatgatcccaccgttgcagccgctgttctgcccgttcctcgcgcactccaccagctcctgctccgacagcgacaccagctcgccggtgacgatcttgttgatgccctccacggcggcgaccgccgagaacgcccagcagctaccgcactggccctggttcttgacgggggcgacgacggcgcccttgtccctccagtccacggagtccggcagcgcctcgacgccgtcgtggcggtacgcctccccgacgcggcgccccctgccggcgggcgtggtgccgaggtaggtggcgcggaactcgccgttggtgaggtcggcgaagcggttcatcccgaggcggaacccgccgcgctcgtcggcgcgggcgttgtgggcgtcgacgaacttgaggttgtcccagaacacgcggaaccggcgctcgtgctcgccgatgaacccgttgcgcgagccgccgccgccgccgcgccggtgccgcgccaaccacaggtcgtacgcggcgcgcgcctcggcctccgtccgctccagcccccgcaccccgtgctccgcgttgtacctgatgatcgacatgatgtccggcggcgccgccgccgccgggggagcgaaggcggcgaggatgaggaggaagcaggccatggccagcgccgccgctacggacttgccgccaccgcctgccatggttgtcgtcgacgtcacgtcacgccgcggcgcctcgagatcgtcgaaacgaaatcacgtagaagtatgtgtggatacgaaatcgtgcggtgtttggttggcttgtgctatgttctggagaggcttggcggtcgatgaatttatacaggttggtggcgtacggttcgtgaccgaattttacttggtcgctgacgacgtgtcggtctcgtattggatctgtatcgtgtagagtgtactcgtttctactcctaaatctgacgtgtcacgttcaggttcggtattcgattctaaataggatgacgtgtcacgttcacacacgggccgtagcagattggggattgaggtgttacggcccggcccatttggcccacgaaatatcacctgacgacttctcttctcttctcctcttccttttcccatccgatttcttctccgggcttctggtagagtacgatttgatactatctgcgattccgcctcccctccccctcgccgccgccgccgccgcggggaaatctaggcgagactccactactaccgcacgtgtcgtaatggctcggaacaagaagaaggtagccgtggcggcgcccaaagcccggaagccgaagcgtgatgcagtaataccccgcgcctcagtcagctggagattggatcgtttttggtggaaggggaattgagctttagctaatatattttctcgtttttttttccttttggtgattgatttgttaggaggagaagaagttcgcgaagaaggccgacatgacggagttccgggcgcagctggactcgctggggttgaagattatcgaagttagtgcggatggcaactgcttctttaggtcttcttttcgattccattactcaaattcttgccactttttacaagaagaggctaatcgatgttgtacgatatgttagagtactgttagtttatgaaaggaggaatagtatatgcattatgcagtcttgtgttatatggttactcatcgtagtctgcagggcaatgggcgaccagctcgaaggcaacgaggaagagcacatgaagtaccgtgcaatgattgtgcaatacattaaggtatgcatcagatgagatgaccaaaacaaacatcttgtaacactgtgacttaataactgtagttagggtgccattgaatcaataaggtattagaaatactgcaagctttggctatgaccaagaaacatcttgtaacactgtgacttaagaactgtaattagggtgccattgaatcaataaggtattgcacatgctgcaaactttggctgtgtacatctgatctgggcgtagagtacaggctgccaggctgggttgttcttttatctaaaagacatgctgcaagcaagcattggcctatttacacttcataatctttcttgtatgcatcttacaggagcaccgtgtggattttgagccattcattgaggacgaggaaccgtttgagaaatattgtgactctatgcttgaggatgggacttgggctggtcatatggagttgcaagcagcttctattctcaagagaaaaaacatatgcatccacatggtaattttcaatacaagctttgcagtatgatttcttcaacctatgaataacacgctaggcagttgagccttgcctagtctgtattttgaaacacatgggtgatatagatcaatgtgctgcttatatatcccctgatggttctctgttatttttcgtactcattttcatattatagcctttcttctatagaagagaacgtactgtaacatttgattgatgcctgtaccattactgaatgatttgcagcttaactcaccacgatggtacataagaaacttttctgatcgtgaagctaccagtatgattcatttgtaagttaatgtgtgttctgctgttttaaactaatatgctaatactggcagtaaaaggacatacattctcatgttcctttgttttgattccaatatagatcgtatcatcagggtgagcactacaatagtgtcagactgagggaagatccatgtcaaggtcctgcaatgccagttattatcaaggtttctcactgtccaaattgtaaactgttggttgttttgtgtccctggaaggacagtgagatcctgttgtagctcaacttgctctgttactaatcttaattttatccgttatgaaattacaggcagatgccaatgtagctagcacaagcaataatgctcaaacaaaagcaaaggacctgaagaaatcttcagacagatcaaagtatgatcatatatcggttaaattggtgatggctggaactggatgttctaatatcgctgcagttgaacaggtatgaattatacaacaaatcgactttcttgtattgcaactgcgagcctaggctgaccgtagcagccaatcagtcattatatattaatggtcaatgccacatcacataggttttgaaagacatggatggtgacattgatgctgctatagagtacatgttagctgagcaactaatactgggttctgatgatgcggatggagatccttatctggactatgcatgtgatggtaaacatttgattattctgaagtctaaagtggctgtccctatgaatgaatctcatccttatctttcttgaggacttcagcttatgacaattaatgaaatttatggtgaaatttggagtacttctgggattccatagattgagttttcattgtttaatcctattcatattcttgccaaacatgagctgcctcacctgagcaagcgtttcatgcacacccctcaattcagtagcataaatctagtaggtaaaacctatactgggtgttgtgctcatggcattttgggtttatgcctcactaatatgatatttaccatttactggttatttttaagatcatcaaaatatgataacagtaccaagaagcatgaacggtgttatagaaagctcaagtaagactacggccttgttggagagcttctagctactgcagcttctcccagaattttcagctctctcaaacaatccagattcttagctatagaatccagaaaatgaactagatgccggttaccaactagctgtttctcagaattttaagctcccaccaaacagcccataccagttgctgtgctgggtgttttccatgttcagttcctctgcaattgccaaaggtcaatatcataccctgtaggaggtatatctgtactaagagttagtgtgctatctaaccaccctgtaggaggtaacatttttgtttggctggttattgttggagaccactattttagaagcacaagtagttcattttgtaaactgagggcattaactgtttcaattaatatccaatttctcatacctgttcaagtaatatttgttttacattggccatgcactgaactcatttcctttattgtgtatattacctggatcagcagagtatgtacagaccatagaggatgagcttagcatgaagcaggatgagagtcaactggatgaacacaagaaagaagaaaaggactgttctagcaaaggcgaaacagctcagaaacacaacagttcacattctaaaaaggtaactatcatgtggacgactcttaatagtttccaaacattgaattgccttgttaaaatactatgttggaaggaataaataggaattatccctttattcttttgcacagggaaagtcaaaaaccaaggaatgctcttgtggatctgctaggaagcacaagccttcttgtaatttagccacaactgtagcatcgagagaacctccaaaaacaactgcaccatcgagagaacctccaaagtatggctttataatggttttgctaaaaatatggcgccacatttttgacttgatttcagtcatttttttcccattcggattgctaccattcttttatactcctatgtaagtatgtttcgctctactatctcctctttcaagtaggtaattaattgttttcatcctaattctcttatatagtgtgtgctgcaaaaaatatggtgtaagtattgagatttggttttaatttttttttgttttttggtggaaaatgtggtgtcttaaatatagctaatcccctttataatgtttctgtccttttgtttgtcttttaccatattctattctacaactgaacttatgtcctgctgttcgcattgtaagcattctttcaaatggaatttttggggggtgaaatcaatatttccagcgtatttgcatagtgcattgctgctgttgtatctggcctatgaaaccttaacagtattgctgcaaaatatgcacttatcccatatgccttaaagtcaccgacctgattactatttcctttttcactagggaggttagttgcattgcatgtttaacacaatgctggaagtgttatgtactaatactatctgcttaatgtgctttactatcaggaccaaaggtggccaagggaaaggccagaaggggaagaagcaaaagaagaaagaacaagatgaaacaccagccatccgggatcacgattctaaagttgcaccagatctaggagctctttgcatatgaacatggtcgacgagggtgatgttctcctcagtgtgtagccgccaggaatgtgcggggcatcagttttgaagagagatgtctgcggtctaccttgcttggacgccatgatctagatggtgatttttctcttgcccagttgacggcttcacgtcactgccttctgctgactgactgttgttaagcctgtccaagtttcaggatgggatcatgggactgacggtgaggtggtgatctcagtgggcacagaaacatgaatgagctgttgatacatagcttcttttcttcatacatactttacctgtggatcaatgccatgtaaaacaatgatcagtcgtgcaaagcatattaattttgtgagaattatatcataatagagtattccctgtcctaacaaaacaaaaatacgctctattgtttgagatggagggatagtataatgggttcatcctggagtatatatagccagtcagtcacaattgccttcatgttctcgtgaaagtatctgttttaatataatactgttttctcgtgaagtatcttatctggtaagcagcttatctacttcaccagctacaagtccatacccccatgtgattacggaaaaagaaaatccataagaccaagctacagggttgttgcttagcaatcggtgaagctctcctgggtcagtcaggaagggaaagcatgttgcgatcagaaaaatggcaaaacgtggctcgcactaactcagagtcaaatgctttccttttgggactttgtgagagctccctttgggtcactgaaaaagcaatgtgcgagttgcgagataagaaagccattcgatgatgactcggataatcaaagtttaattgacatgtcattagtcgtgctggtgatagatattaaccccgtcagttgggtttggggttgtgcgttgcgtagggcaacaagctaatccttccaattaatcatagttgcactattcaaattattattgcgtgcatgaataattggtgcacgaggacggagcctactctaggatattgtcgataccatctgaattctcgtgggaaaaaaataataggagacgataagaggaatcgactggaatctgtgggagatgggctccggtcggcgcagtgtcctacagctattggatcacccatttttggctcttggctagctagtagacaccggccactagcaatgctcacaggcaaagatagattttttttaattgacatttagtaattctctttcaaaagaaaaagtagacaaatagacaatctgtagctgcctggacatatcttcggctcttcgatgagcaaaacgatgctactgtgcgttcattgggtcagcagggcacaccaggacaccggcgagactggaaggcgtgagatgtggccatcaaccaacaaggtggggagatagtacgcaacagacgcgtgttgcgcgagccgcgctgacgctgcacatacagcgcggacatgccacaggccacagcagcaagcggagcggagaagtggccgctcaagccaagcaactgcaggatcggaggcgaaatcgcggaagcaaacctcccccgagtgggcaaaagaaattcacgcggagttggccacactgccgactgcccgcgtctcgggcaaaatttgccgacctcgccgcccgccgcccggtaaacctcgcggcagattgcacgttggatttccctggtatccatcggtgaaaagcggcaactactacagtagcgcttcgtacaccagtgccgatgattctagtacggcactatcccgtcagtgtgtgcggccgattaacacgtgatctactcactggtccccggtggtgcacataaacaagcatggagtaatcaaccactgatctgcagcacgttgcgcatttcgggctgcgaagggaagggacggaccccagccacgttcccgtcatgttcagacgttgtgatgctcatgttcgcgcatggggctccggttcccaaggagatcggataggatttcagacacccggtcaccggccaccgctaacaccggccggcgagcggccgcgaacatgcatggcgtctcgtctgtcgtctcccgatcgaccgtgttcgtgtacgctaccgtggtgaccaaccagccgctctctgtgcagtgcatgggcgagttgtgtctcctcccaactctttttccttatcgggtaagcaaacggccgtgattgggggaccaactgccccggtgtcgtggtacgtatcaagtacacctccgtcttaaaatatactaattattttgtagcagagtagcaagtcaaaaaatttaaccaccgcaaaaaaagtcaaaaaatttaaactttaattattaatagtaaaaaaatttaaaaaagatcaatcatgtaaaattgatggtattagatttatcattaaacaaactattataatatgtaatttttttaccttaaaatactagttttacaatactagttttacagatattggtagtcaaactaatattttatattttagagaccttattatagtttaaaatcattatattttgggaggtagcgagtaccgcggtaggacgcgccaccacggagcgaaaggaacacgagattcgtccgaccgccgcctcgcgctcgccggcagttggccatcgttgacgcctcgctcgggcgcccggaaatggtgtctcgccacgtgtggatattatgggtaccccatacccatacggcatggttatccgactagtcataggggataacttatatctatggaatatgtaatagatcatgactcgggtattacgtttccttatatattacggaacagcctaaagtcctggtttgataagattgtaaagtagaccgataccgtgttggttaaggtttctatcttgtaatcctgccccccatcataaggtgggcaggaagccctctagggggcatgagacaacctgatcgtcagattaatacacactcggcggattcaaatccccaaacaggagtagggtattacctctcattgagagggcctgaacctgtctaaatcctttgtctccgcatccatccacttttaggtctcgtgcgctaccccttttattattgccgaattcatgtttcgacagttggcgcgccaggtaggggctgcgtcgagttttccgtcgagaagtgcgatggaactttgtgctggcatcatcggtgctactcttgtctttggccgtgatcctctcaacaaaagggcagggtcttcgtcgccaaaaattctatctggatctggtcaatcaaccaggagattaatcaccgatcgaatcgatctacaaccagcttgttaccgtcaattttacctccgtcagtgagatcaaatccgtcgctacaatgctgccatatctgttggtccgtcggtttcgtcaccagggcatgatttgaagcaatcagcaagcagccgccgccaaaatcatgcgaagatcaccgttggttgagcctgtacatcaccaagtcaatactactcggatacgtacggcaagacacaaagtccaggatacaaattaaatatacctggtcaaatctgtggtcaaggaaattaatccatacacaaatcagctattacatgcacaaagtggtctccaaactaatccgtgcatgtgctaccgacgattacatgtctacacggctgcatgacacggctgcatgctacggttcatccattgacaggcctcgaatcaaagttggatcacaaaccaggtttatcgttctaaattttcttatataaattagaattaattcacagatcactaattattatttgatctattattttatacatgtaccgccggccgccttcgtcgctgccgattggtttcatcgcctccacggttggtgtgcgccgctgccgttgcnnnnnnnnnnnnnnnnnnnnnnnccggcctgcctccgtcgccgccgactggtgtcctcgcctatacggtcggttggtcacaccaccgttgatgggcatcgtcatctacaccgccggcctgcctccgtcgccgccgactggtgtccccgcctatacggtcggtctattatgccgccgctgttgggcgtctacgacttcaccgccggcctgcctccgtcgccgccgattggtgcctccgcctacacggctggcctattatgccgacgctgttgggcgtctacgacttcaccgccggcctgcctccgtcgccgccgagtggtgcctccgcctacacggctggcctattatgccgccgctgttgggcgtctacgacttcaccgccggcctgcctccgtcgccgccgagtggtgcctccgcctacacggctggcctattatgccgccgctgttgggcgtctacgacttcaccgccggcctgcctccgtcgccgccgagtggtgcctccgcctacacggctggcctattatgccgccgctgttgggcgtctacgacttcaccgccggcctgcctccgtcgccgccgagtggtgcctccgcctacacggctgacctattatgccgccgttgttggacgtctacgtcctcaccgttggctcaccttcgttgccgtcgactggtgtttccgcttacacggctgacctattatgccgccattagtgggcatcttcgctttcaccgtcgaccgccttcgtcgccgccgactggtgtcttcattgttattgatggacgactttgttcccacattggccacttctgccatcaccaaggggaatattacaaaggatccagatccagatatgcataaaagggattcatggctttaagcttatctcttacgctccaggaatggatcagtcagaacgtcaccaccggctcgcctcgaccgccgccgactggtgtttccgcctgcacggctggcctattatgctgccgttgttgggcgtctacgtcttcaccgaccggccgcctcgtccactgccgactggtgtttccgcctgcacggctggcctttatgccgccgttgttgggcgtctacgtcttcaccgaccggccgcctcgaccgccgccgactggtgtttccgcctgcacggctggcctttatgctgccgttgttgggcgtctacgtcttcaccgaccggccgcctcgtccgctgccgactggtgtttccgcctgcacggctggcctttatgctgccgttgttgggcgtctacgtcttcaccgaccggccgcctcgtccgctgccgactggtgtttccgcctgcacggctggcctttatgccgccgttgttgggcgtctacgtcttcaccgaccggcttgccttcgccgctgccgactggtgtttccgcctgcacggctggcctttatgccgccgttgttgggcgtctacgtcttcaccgaccggccgcctcgtccgccgccgactggtgcttccgcctgcacggctgacttattatgccgccgttgttgggtgtctacgtcttcaccgaccggcttgccttcgccgccgccgactggtgtttccgcctgcacggctggcctttatgccgccgttgttgggcgtctacgtcttcaccgaccggcttgccttcgccgctgccgactggtgtttccgcctgcacggctggcctttatgccgccgttgttgggcgtctacgtcttcaccgaccggccacctcgaccgccgctgactggtgtttccgcctgcacggctggcctattatgctgccgttgttgggcgtctacgtcttcaccgaccggccgccgcatccgccgctgactggtgtcaccgcttgcacggctggcctgttataacgccaactgatgctatcttcttcacggctggctacatcgctgtcgctactaataggcatcagtatcttcaacacaagctgcctacgtttgccatggctaccgactgttttcttcacttccatggctgcatgattctgccagtgttgattggccttaccatcttcatcgccggtcgtctcgtctgctgctgactagtaccctcgtttctacatctggtttatacagctatcactactgatgaacatcatcgtcttccgtcgccgactggttatgttgtcgccgactagtgcttttattttcacaactgcgcgtcttcactaccagtttgcttctgttgccgacgactcgtgttcacttcatcacggcaatgcaactttgtcatcatggtagagcaacttcatctttattatcttcggcactggcaaactctattgctgctacttcgcaagttttgctacttcaccaaccacgacgtctttatgagcctcgacatctcggcatgcgatgccatgttattttactacaacaagaggctctccaacattcatgatttctacttggacatcttcaacacatatcttcaatcaagcaataactattcgacgacaagaggctacagttctcgactctatgttcagttgtttcccaactaatcaaagagtcggggactacacaactacaaggctcaaaatttgacaaattttatgtcaagctgaagaaatcaattaatcagccaacgagtcaactccaggagtcattatcttcatctttgcttcggagcagacattctacttcaacaacttcaaatatttcggtttagacgagttgggcaacaacatcaactctcctccaagtaaagcatctacaacagctataacattaatttgatggattattatcactgacatcatcaccagcacctctgcttcatcgaccctgacatctccgctgttgctaatggatgattatgttttcgccgacttattatttcaccttcacggttgacctactatgcaaatgctgatgagcgtctttgtcattatcattggttgctacactgctattggctggatcaccgacatcgtcatcttcatcatgtcggttgcgtttgtcgtcgtcaactattttcttcatcttcatgattggtggattttgtcatcacctttgatctacctcgtctgtcaccgactgattattttgctgccatggctacacaactttatcgctgggctccttcatcttcattgttagttgatctgtctgccgccgactggtttcttcgcctccatggctatgcgacttcattacttttgattggtatcactatcttcgctaccaccaatatttttgccacctctggtgggcaatattctctctatattggttgtcttgtctctatgccaactgcgtcagctaccatcaatgaacaattgtgactacgtgctcaggggcttactagcttaaatacaagtattatatcttcaatttggacttgctccggatacatgcaacatgaattcatgatcatgggtctattttatatgctcaaagactggactatttattattccccgtaagggttatcaattgaatacttgcgccagtcgggattcaattgttacatctattttagagtatcccataagggataaccactcagatcagaagctattcatatgagctacgcttggtctatattacccggaagatttattactcgggagcatgttatatgcgtcatcctttaaagggcgtcgaaggcatatgttttggcctaggcctaatatgtctgcagcccatattttcaggtgtggcctgtcacgttcttttagggacttaggcactttttgcttaggccaaagtgcgcgtgatcaagtgcccaataccttaaaatccttttataccgcagttacttaactttttaggagttggtacaatgcatcttaaaaggtgtcaaatagtaaagctttatatagctgtcccgctgacttttttatatataagtcaaggtgctgtttgggtttttaagcatttgattggatacaatatcattgcttttcgccacgtaagtgtgcatttttattgaccaatattatggcttaggctgattatatgttgtggccattttctaggcggttggtaaatcctttatgagtttatttactcggattttacaccacatatgccatatatttccaggtgtggtgaaaccatgtgtcttctagggacttaagcacatctgttaaagcagtgtgcgcatggcgtatgcccaatactttggaaatttctttattcacaatatacaagcttctttatagctattttgctatatcactcatcatattttacaaagcagttggtatatcactcggatcatgttatttggaggattcacaccgcatatgctatatattgatatcaagtcacttggttgattacgattatcaaaaccactcggttggttggattatttattccttgactatatgcttggtttgttcaattaaccacattgtcgggggctgcacctattaggtgcatctagtcggtgcacctgactttattttccagccctccacagtcttcagatttggtaaaagtactcgggagaccatgacaaagatgattgaagcactcggctttggagtaatctggttcgagagaagattatcttttcgactgcgaaggtctcaggggctactgtggatattatgggtaccccatacccatacggcatggttatccgactagtcataggggataacttatatctatggaatatgtaatagatcatgactcgggtattacgtttccttatatattacggaacagcctaaagtcctggtttgataagattgtaaagtagaccgataccgtgttggttaaggtttctatcttgtaatcctgccccccatcctatataaggtgggcaggaagccctctagggggcatgagacaacctgatcgtcagattaatacacactcggcggattcaaatccccaaacaggagtagggtattacctctcattgagagggcctgaacctgtctaaatcctttgtctccgcatccatccacttttaggtctcgtgcgctacccccttttattattgccgaattcatgtttcgacaccacgtacacggcggcgatggccgcgtgtgcgtcaccggccagtctacgatgggtagctgcagtacagcgaccgcagccatccatcagtgacgggatcactttaacggcatgatgcaaatgaagatagtattgccctattattagtgacaattgacaatattatggcatgcgattagcttccggcgcattacagcgcgcgagtattatttagtggttttctaggaggtgtaaagcgtttcaaagcaaagattaccctctcagcaagtagtcagagtcttatccgatgaagtacatgttaaattaggatactatatactactaagtgatgagaaagagagagaaagtgaaaattggaaccatgccattatataaaatttaagatatgccattttgacccacatgtcattgactcatgtgagttctttatgtcattgagataccgatgacatatcttaaactttgtaaaattataatggcatggttcttgtcgatgacatgggaccgggagtatcgtgactagaggcttgaggcagacacaatcgcccacgtggcctggcacccacgggggggggggggggggggtcgggcccgagggtggtgtgttcgccctcctctttgtctccccgagggggtcggaccgctctcgccttggccccgagggctggggcgccccgaccccttgtggattttgcgccgcgtgtatgggttaggtgagcacagcggcgctcacctaaccgcatttattgcggtttggacgaacgcgtcacgccgcgtgtaatgcggtgcagcgcgctcgtttatccggtctgtgaccagtcacagaccggtcagatcgtgggttaggtggcgacaggcggtctgacgcacgcctcgccccgtccagtcaggacgagagcctccaagcactcgtccctagccggagccggcgtgttacctcctggagatgacacgttggttccggtcagatatataccaggcttcatcctaaccattacaggcaagatgttgta

SEQ ID NO: 5427 - DNA, 1334 bp, Oryza sativa
gcgctggcacgcagggcggggtgtggcggtggactggtggttcaccctgaacaccccgcccgtgatcatggttgattcgactgtttgttcaccacgcacacgcagcaaaaataaaaaaataaaataaaatggagccaacgatccagtcaggctagctagggcttccatacctgaatacctgcactgtgtgaagcgaggaatcgcgcgcggtggactccgcggtggtggaggaggaggactgcgagctgttggctccggcggaaggaggggcgcggcggccttcgtcggcgccggcgaagaggtggggattcgattttgttttgggacgaagggtatccgtataaaaagaccttttaccctaacaaaaaaaaaggactcgtctacagttcggattcggaaatatattaagagaattatgtagtgggctcgcaaattcgtgatagattcggagacgaggcccaacaaacttgggagcccatctagtggggagaaggccgcccagcaatacaggggccttctggacatgggccgatctttagctatgttggcttcaaagatcggaataagttcacttagggtccctctatttgtcgcccagtccgattttcgtcccttgaccacgaaaccgggtacaatctgtcccccaacatacgaaaactggacaaaaaaaaggtccctcggcggttttgatagcggttttggctgatatggcgcctacgtggctaatttgacccggccttcatctgacacttcgatccaaaataataataaagtccgtgggacccacatgtcactttcacacaaaataataattaaaaatggtgggacccacatgggccccacatgtcattctcacccctcatcttcttcctcctccctctccatctcccctctctccatctctctcccctcctctctccagcctccaggtgccatggcccacggggtcacggggaggtccagcggtggcggccggcgacgcaacagcctcccgccccgacgagctccacctactcccccccgatcggcgttgctgttgggatggaagttgcgcatggcggccttgtacgccgaagtcagccttccacttgaggagcacgccgtcctcgatgccgagctcgccggtgggcagctcgatgtggaggcggtgcaaacctcagacggcgagtggtgtgagacgtccacggcggcaggagtggatggcgtcgaagtcagcgccgtccatgctcaccagcctcatcgccgggatccctagcttctcgtggaggtacgccatgcctcacaccacgccgacggcgatcctcatcctcgccggaccaatccagcaccaccct

SEQ ID NO: 5428 - DNA, 3779 bp, Oryza sativa
ccaaatcacaaatctctttcaagaacacacacacacaacacccataatcacaccaacgcaggcaagaatcacaggagagaggccctaaaaatccctcctttcccatctccgcatcaagcagaaaccacccaaaaacccaaaaaaaaggggcctttaactgacaagcgtagcaagagcagaatcactcttatcaccttcttgcgaagctggatctcactcacccagggcttgggattaccgagttcttggcgagatctagccggtgtgcaggaaacaaaagcaggagaaattttttgggtttggaggagcgaagcacggctgtgaatgatggtgggagaggagtgaggtggaaaggtggagagacagggtttactacacttttgctgctaaagcaccgggaatttaccactggtaggagtaatagcagctgtcatttagtttttcattttattagtcccaattaagctgcgggtttggatggtgatttttgcggattagcccggttcggtcagtgcctgccttgccggagcggaagctcgccgccgccgccgccgctgctgaccgtcgcagccaccgctgctgattgccacgcgtgcataggcgtcgcggtctccaagttgagatgtgtagggaaataattgcagcagaggtggccaaacgggccgggccaaacgggccgcccggggcacggccgaacctgtagcaggcacggcccggcacggcctgctacagtaacgggccgtgccggcacggcacgagtagccgtgccgtgcttgggccgctggccgagcccgcgggccggcatggcacggcacggctactgtagcaggccggcacggcacggcccgcggcacggcacggcccgtttcgccggtggcccgtcaggcgtggacagggcgggcggcggtcgaatgggaaggcgccacgtggcactaacggctatttgaccgttcaaatttgaaaataaccgttgggaggctaaaaaattcataaaaatttcgaaaaaattccaaaaaatctcaaatttcgccctataaatagggcatgaaccccagccatttctcctcatcccacactcctcatcttgtgctctcaagtgttttaagtgctctctttgttctcaagtgtgcattttttttgattttgacaaaatttgctcaaattttgtcaaaaatcaaaattagtttcgtagttcaacagtttgatcgcagaggtttgaagagctcgcggttggaaagatgtaagtaatattcaaatttgtgtattatttgtattgtgtttgtgaattcaataaatattcgaaaatttgtttatgtcggtttaaattttcagaatggatccgaactttccataccagtcgccgtcgttcaccttgggtgatttcgaccccaactacatgtcggggtttgacggtacctccggatcggctccaactccaccatctgtggaggaggtaccggttcatacggctgtcgttgaggaggtaccggttcaggcggcgatagcttcggaaggattttccggaaccgcgagcggaagtgtttcgacacacaccggctcgaagagatcgagaacctccgttgtgtggcaaaacttcgacgagataaaggaaacatgccccgacggaagggaggtatcgaaagcccgttgtagaatatgtaggcaaattttatctgctcgttcttctggtggtacaggtcacctcaagcgccatgcggagtcgtgtgccaagaagcaaggaatacaactccggcagcagcaacttatggtaaacccagacggtacggtacgcagttgggagtacgatcccatggttgctcgggaatctcttgtccggttaatcgccagacaagatttacccctgaactttggggagtcccctgcttttgaacattacattcagcaatctcataaccctaggtttaaagctgtgagtagacaaacatcaactagagatttagagaatgtttatcacaaggaagcaactgcacttaaggaactgtttagtacatgtactttctctgttagtgttacttcagatatatggagtagtagagctagagaggattatcttagcgtagttgttcattttgttgatgatgattggcaattacaaaagagagttttagggcttaggttaatagatgtctcacatacaggagaaaacatagctgaaagaattagggaagtaattaatgaatttaatcttgctgataaaatatttgctgtcaccctagataatgcatctgctaattctagggctattgaaatattgcaacctttattttgtgtgtatgctcaatcttttctactccatcagcgttgtgcatgtcatataattaatttgattgttaagactggcatgaagagggtaggtgaccacatcgatgctgttcgtcaagcaatcgcgtggttaactgcttctaacccgcggattgctgcatggaagaggttttgcaatgcggccggtgtgaaagctcgtaagtttgccaccgatgcagagcatcggtggaatgcaacgtatttaatgttaaaagttgttttaccttatagtagtttactttctgattttgttcagtcacgtggtggcccaagaaacagtgacgggtcttcagtactgaacgagcatgtttgggcaattgtccaaaaatttcaccaatttctagaaactttttatgattgtactctaactttgtcacaagtttattatccaactgctaatataattttgcacaaccttcttgaaattgctactttatttaaagaatacgaaaatgatgacgttctaactgaacctgtctttcacatgaaacaaaaatatttgaaatattggaaaaatatacctatgttgtatgcttttgcttttgttttagatcctaggtgtaaattaaggggattgtctgctattttatcacttgttggagatactataggtgtagattatagttctttttatactgaggttagacgtaaattatatgaggtttttggaagatatgaagtaaagtttcaggaagttcgccagcagagaccccctcctatccccactacaggtaagaagaagatacagtggggtaggatttggggtggatcgtcttcaagttcaatccaaggtggtggcagttcgtcggctacaagtggagacgcctcttcgcatgttgtggccgaagagttgtccggttgtttggacagcgacgccatccaccacgaagcacaagatttcaacgtcctcgggtggtggaatgaccacaagataacatatcctgtgcgttcaaaactagcacgggatgtgttgacggtgcccgtgtcgacggtgtcctccgaatcggccttcagtctatgcggccgaatcatcgaagaccggaggacgactctgcgcagcgaccacgtcgaaatgctactaagcgttaaagactgggagcttgctcgacaacatgcccaatacactgcggacaaccaagaattggccgcccagttcgagcaactctacctggatccagaccaaccccagtagaattttgttagaagtagttctgacctttgagctgtactcttttctttgtcatggttttctcattttcccctatgagtttttacatgacaaagtttttaacgaggcagcatgtatcattgtatcctgtaatgatataaacatcaataaaggtcattactatttttaacaaattcttttgcaatattttcgcaagtgtggatttatctttaaattatttcaaaataatgaatcacaatctaggtttttaatttttacaagggggatc

SEQ ID NO: 5429 - DNA, 10809 bp, Oryza sativa
cgatgtttgccaacgagtgaaagcagagcaccaaagaccagcaggtttactccaacctcttcaaatcccggaatggaaatgggaggagattggaatggactttataacaggactgccccggacatcatcgggtcacgattcaatttgggtagtcgtggatcgactcactaaggttgctcacttcataccagtacataccacgtatacgggcaaaaggttggcggagctctacctctcgagaatcatgtgtctacatggggtacccaaaaagattgtatctgatcgagggagtcagttcacttcaaagttctggcagaaactacaagaagaattggggacccgtttaaatttcagcacggcctatcacccgcaaactgatggtcagacagagcgagtcaatcaaatcttggaagatatgttgagagcttgcgctcttgattttggtggagcttgggacaaaagcttaccatatgcggaattctcgtataacaacagctaccaggccagtctacagatggcaccgtttgaagctctatacggccggaagtgccgcacacctctcttctgggatcagacaggcgaacgtcagctgttcggaacagaagtattagcggaagcagaagagaaagtcagaatcatcagggagagattgaggattgctcagtctcgacagaagagctacgcggataaccgtcgaagggagctaacttttgaggccggagattacgtgtatcttcgtgtcaccccgctccggggagtacaccgctttcagacaaaaggcaagttggcaccacgcttcgtgggaccgtacaaaattttggaacgaaggggagaagttgcctatcagctagaacttccatccactatgatcggcatccatgacgtgttccatgtgtcccaattaaagaagtgtttaagggtacctgaagaacaggctaattcggaacacattgatatccaagaggacctaacatatgtggagaagccggttcgcatacttgacactagcgaaaggagaaccagaaacaaggtcaccaggttttgccgtgttcagtggagtcatcattcggaagaggaagcgacctgggaaagggaagatgagttgaaagccgcccatccgtacctcttcaccagctccaccgaatctcggggccgagattccgtttaaggggggtaggtttgtcacaccccgaagttttcctcccaagtcaaaattgtaatttataattgaccctaagaaaatgctggtgaaatcaggagaaaaccctaagaaagtaatgcaaataataatcggatttgacatgtggaatttttcttgagttctacatgtcgaaattcattaacaggatttttagtggaattttcagagctctagaaataattttaaccaattaaaaatcactaaagtgcaattgttaattccagggaaaatcctttttccttttctttttctttttcctctcttttccctcctttttgtcaagtgggccgtcggcccacttctcccttccttcccctcccttactgggccggccgcaggccgaggcccagcccgacagccggccgcccgcctccctcctctcggggtcgccgacaggtggggcccacctgtcggacccgtctccctcctcccgccgatcccgctcgcgccgccaccgccgcaaccgacgccgcgcccacgcctccgtctctcccgggccacgtcgaccacgcccgcgcgtgcgccgcattccccgcgcccgttcccctccctctcccgctcgcgcccgcgcccgagatggccgggattcgaaaaccgaatcccgcctctctctcctccccactcccccacgtcggccgtcgaatcccgccgctcccggccacgtccggttcccccatcccctatttaagcatcaccggcaccccctctcgctttttccccattgcgccgacctctcccgagctccccaacgcctccgcgccgtgcaaccacccgccgccgccgcttttgctactccggccgccgctagccgccgctaggctcgccgccgtctcacgccgtcgccgccgttagcttcgcgcggccgaggtccacctcgtccacccctcctccgtcgaggttcgtcgccggagccctcatctccacgcgcacgggtgagcgccacctctaccgccgccttcggccatagatcccgatcgccatggtccatctctctctctctaatctctatcttctccttccttagggcacgccgaagctcgtccgctagccgacgccgtcctcccgtggcttgccgtcgccgtccgccatcgccttcctccgcgccggccaccctcggtgaggcatcccctcccttcttttccccttcctctcctctagccgccgctctccgccgccgtcggtcgtcgctttgcgccgctgccgcatgtgcgccgccgccgtgtgagcgccgcgccgccggcgccatggtcgccgccgtctcgcgccgcgcccgcgcgccccggccgcgaggtcccgcgccgccgtccgatctacccttgggtagatcggggccgtcggtccggtcgccacgtggcgccgccgcccaaccttttcccgtgccgctgaccggtgggccgcgcgccgccaccctctttctctctctcccggtcgctgaccggtgggccccgcctgtcggcgccgcgccccctcgctgacgtcagccctggttaatattgcgcaataaattatttaaggatttcttttatagtaataaacacagtgaatcttctaaaattcatatctaattcatccgagctccgtttaatcccattcaagtctcagtaaatcaagaaaaatgtgtagaatccattaaaaatggttttgttctctgtttcagtagtcttatagcctgtttgcaatgtttgctttgtatgtcgctagattccggttctttcgacgctccggtgtacttcgaaatagtcgccgaggtacctccagcagcagagcaaggcaagtcatgcttgtcacttgaacatgttgatcctatattgcaaatgctccattgttttctttcaaatattgcattgttttataatatcactatgggatggatacctactgctacagccatgcttttggatatcatgctcctttgttagcttgggttataacatgattagactttggactaggacttgcttagccatgcttagttcaactagcacacattggggatctcatttaaaacctagactataggtttatatgataatgttggtttaataccaccgctctggtgttggttaaataaaatgaaccacatggtgggctgtgggtgcacggttttgctagtcgcacccatggcagttaaggaccggttcgcaggatgccctggaagaatttatcgtacttaccacaagccagcgtgggcaacggctgggcttgtagtgtagctttcctctagtcgacgcatccaggcaagggtgggcgtgatggagcggggcgggccctgcgacggcctctgtcgcttccggattcacctaggcacgagaggggactgcccgtcgcccgctggggacgggggtgaaacctgaggtgtggtgtgcttggctagagggggttatgcgaagggtcctgtcacggcctctttccggtatgtcgtggtggcatgtcggcgcacggaaacgtgtcgtggggctgtgtcttgtgggtacagttgtacacctctgatcagagtaaaactattcgaatagccgtgcccgcggttatgggcggtcaaccagattcaccgtgattagtctcaccctagtgtaatctgttgaacttggatagtttaggtggatggttgggcctgtcgcaacgtgggttagcgttggacagcggatgtttaatactgcttaattattacaactgttttcgcattaaattcctgtttataaatgccagtatttatgcaaatgaaccactctagctcttctttgttaattccctgcatcatacccctattccggtatgacttgctgagtacagtgggtagtactcagtcttgctctacttttcccaaccccagaggacgggtatgtgtcagatgaaggtttctccgaggagtaggcttcgtccgtgccgtcgaggatgcctgtggagtggtgttcccgctgccgttcaagtcaaggcttagctccagtttcttttgtttttccgctgcatttctgtcagacctttataatgtttgtaagacgtggatctgtatgtcaacattgtcgtttgtgtaccccggctggtcctggacgggggttttaatacacattctgcttggaattctattcgggaatttctgggcgtgacaagttggtatcagagccgaccttgaccgtaggacaagccaaatggaaaaacctaagagccctctgaatcctttttcattgcatatgttcttcgcaattggatttgttccgggaaaatggggatctgttcttgtggttcaagggaaaaatcttggtcgctcgtttaaagtgagtttttcaaaacgagtcagtctagggttttagtaaattattgggatttattcgtcagtcagttgggatttgatgggtgaaatgcattcggtcctagctcggtatcatgggttgcaaggtatttatgctttgttcgttattattattatgtatctaatttcccattattttatcgttatgtgagtctgtcttatttattcgcgctcatgtaaaatgatctatgcataaaattttgctcttatttgattcctttatttgagtcctttattgctttatttaaatttggatttgagcatgcattgatcctactcctttgtcttctctagatggccggtcacccacccaaccaccgcggagaaggcatgatcgacttcgtggcagagctggcacgcatgacactggtagtgggctaccccgacgcgccggaatacacgaccattccgccgctcagtggcgagcttccttaccgtgtccgcttggaggtccatggctacgtggggacttgcctcgctaacatggcggtggaggcgtcaggaggcacagcagatcacgcctgtcaggaggcagcctacttgatgatggccagactacgggagcgccacgactacatcttccacgacacggcgtaccgctaccacccccgtcgagcccatggtgatggcgtcagctccttccgtccgacagctggcgagaacgacaccaccttcggtcacatgtgtgctgtgatgaggggattggaccggatgcactcggacctgcacaaggcgaccaaggccttgaatgatgggaagctcatgaggatcgtcgctctgaaggacgagatagcgcgcctgaagaaggagaatgctcagttgaagggtcttccagcaccaggaggagtccggatccgcactacgccccgtaagaggacgactgcacccgtgcgcatccagcttgcgcccaggaacccacctccaccagcagctcccgcagcacctccagttccgcccgcagttcctgcagctccagcttcagctccagctccagctcccgcgttcactctttccttcgctccagcatcagccgccagaggtccagccagtggtaccggaggttggttgtccgctactcccagtggcagcggcgagactgatctgtcaggctccaggagtcgttcagagggaccaggtgacgagcaggaggacgctttcgactccaccgaccgcaggagccgttccgagcattaggctcgttttcccattagtttatcgattgtctagtttctgcttgttagtttgtgtgtttaggttgcttgtttggggtcagtcgacggtcgatatcatgtgcctatgatatggctgtcttaataaggatttttgcttgcctttttaagtgttttaattcagatcagaacaattgcagttttaattcctatataataaagcttagttcttgagcatctgtttttcttcttctcccccgtctgctttcccctccagatggtctacaccaggactggcaaccgcacgacaggcgagggcagcaacggtgaagaacgcgctgatggtgtgcaccccaacagtgattccggcaatggtccgccaccacttcccgagaatccgacccttgcccaagttatggcacatcaaactcagatgatggcagccatgatgcagcagatgcagcagcagcaccagcagatgcaccagaggatgatgcagcacgccgaacagcagcaccagcagtttggtccccctccccctcagtccaagttgccagaatttctacgcgtcaggccacccaccttctccagcaccaccaaccccatggaggcgaatgactggctccatgcaatagagaagaagctgaacctcctgcagtgtaatgatcaggagaaggtcgcttttgccacacaccagcttcagggtcctgcgtcagcttggtgggacaaccacatggccacccgcccaccgggtactgaagtcacatgggcagagttctgccgtagcttcaggaaggcacaggtgccagacggggtcgtggcacaaaagaagagggaattccgggagctccatcagggcaacaggactgtgacagagtacctccatgagttcaatcgcctcgcgcgatatgcaccagaggatgtccgcaccgacgccgagaagcaggagaagttcatggcgggtctggatgacgagctgaccaaccaactgatatctggggactacgccgactttgagaggctggttgacaaggcaatccgccaggaggatcaacgcaacaagatggataggaagaggaaggccgctcagttcagggcacatcagggaagtcaccagaggctgcgcttcactcccgggcagcagggtggacctaccaccatgatcgtccgtcagcaccgcccgttcaaccccagcaacttccaccagggctccagtggcagccagaatcaccatggaagtcagcccaaccgcggtacagctccacgcccaccgatggcaccggcacagtcaggcccgcccgcacaagccaagaaggagacgggagcaaagccagggtcctgcttcaactgtggcgagcttggccacttcgctgacaaatgcccgaagcccaggcgtgccgggccaaggtttatccaggctcgtgtcaaccacgcatctgcggaggaggcacaagcagcaccagaggttgtactgggtacgtttcctgttaactcaatccctgcaacagtactttttgattctggtgcaacgcattctttcatctccaagaaatttgtcgggatgcatgggttaataagagaggaacttagcacaccgatgcgggttcataccccagggaatagctccacttcggttcaattcagcccttctataacaatagaaattcaaaggtcaccgtttctagccaacctcatccttctcgaatccaaagacctagatgtcattcttgggatggattggctgaccaagtttaagggagtcatcgattgtgcgaatcgcacagtcaccctgaccaatgagaaaggagaaaccgtggtgtacaaatctctagtctcgccaaagaaaggagcctcgttgaatcagattgagacggaaatcccagtggacatcgaagagaagaacttgagaaaattggaggacatacccatagtctgcgagtatccagaggtgttccccgaagacctcaccaccatgccacccaagagggagattgaattccggattgatttggcaccaggaaccgctccaatctataagagaccgtacagaatggcggccaacgaattagcggaggtcaagaagcaagttgatgagcagctgcagaaagggtacatacgaccaagcacttcaccttggggcgctccggtcatttttgtggagaaaaaggataagacgaagaggatgtgcgtcgattatcgcgcacttaacgaggtcacaatcaagaataaatatcccttaccgcgaatcgacgatttatttgatcaactgaaaggagctaaagtgttctctaagatagacctgcgatcaggctaccaccagttgagaacccgggaagaggatattccgaagacggccttcaccactcggtacgggctatatgagtgcacggttatgtctttcggacttaccaacgcacccgcattcttcatgaatctgatgaacaaagtgttcatggaatttctggacaagtttgttgtggtattcatcgacgacattcttatctattcaaagtccgaggaagaacatgaacaacatctccgtctggtactcgagaagttgaaggagcaccagctatacgccaagttcagcaagtgtgacttctggttgacggaagtaaaatttctgggtcatgtcattacagctcagggtgtggcagtcgacccatcgaacgtggagtcagttaccaaatggaccccacctaagaccgtgtcgcagattcgaagttttctaggactggctggttattaccgtcgtttcatcgaaaacttctcaagaatcgcccgacccatgactcagttgcttaagaaagacgagaagtttaaatggacagctgagtgcgacaagagctttgaggagctcaaaaggaaattagtatccgcaccggtgttgatcctgcccgaccagacgaaagacttccaagtctattgcgatgcctcccgtcacggacttggatgtgtcctaatgcaagagggcagagtggttgcatatgcctcgcggcagttgcgtccacacgaaggaaattatccaactcatgacttggaattggcagcagtggttcatgctttgaagatctggaggcactatctgattggcaaccgctgcgaagtatatacggaccataagagtctgaagtacatcttcacccaaccggacctaaatctccgacaacgaagatggttggaactaatcaaagactacgacatgagtattcactaccacccgggtaaagccaatgtggtggcagacgctttaagccggaaaagttactgcactgccctatgcatcgagggcatgtgtgaggaattgcggcaggagtttgagcatctcaacgtgggaattgttgaacacgggttcgtagccgctctggaggcacggcctacgctcgtggatcaagttagagccgctcaagtaaatgatccggaaatagcagaactgaaaaagaacatgagagtcggaaaggctcgggatttccttgaggatgagcatggcacaatctggatgggagaaagattgtgtgtaccggacgacaaggaattgaaggatctgatactcaccgaagctcatcagacccagtactccattcatccaggcagcactaaaatgtatcaagacctcaaagagaagttttggtgggtcagcatgaggagagaaatagctgaattcgtcgcactctgcgatgtttgccaacgagtgaaagcagagcaccaaagaccagcaggtttactccaacctcttcaaatcccggaatggaaatgggaggagattggaatggactttataacaggactgccccggacatcatcgggtcacgattcaatttgggtagtcgtggatcgactcactaaggttgctcacttcataccagtacataccacgtatacgggcaaaaggttggcggagctctacctctcgagaatcatgtgtctacatggggtacccaaaaagattgtatctgatcgagggagtcagttcacttcaaagttctggcagaaactacaagaagaattggggacccgtttaaatttcagcacggcctatcacccgcaaactgatggtcagacagagcgagtcaatcaaatcttggaagatatgttgagagcttgcgctcttgattttggtggagcttgggacaaaagcttaccatatgcggaattctcgtataacaacagctaccaggccagtctacagatggcaccgtttgaagctctatacggccggaagtgccgcacacctctcttctgggatcagacaggcgaacgtcagctgttcggaacagaagtattagcggaagcagaagagaaagtcagaatcatcagggagagattgaggattgctcagtctcgacagaagagctacgcggataaccgtcgaagggagctaacttttgaggccggagattacgtgtatcttcgtgtcaccccgctccggggagtacaccgctttcagacaaaaggcaagttggcaccacgcttcgtgggaccgtacaaaattttggaacgaaggggagaagttgcctatcagctagaacttccatccactatgatcggcatccatgacgtgttccatgtgtcccaattaaagaagtgtttaagggtacctgaagaacaggctaattcggaacacattgatatccaagaggacctaacatatgtggagaagccggttcgcatacttgacactagcgaaaggagaaccagaaacaaggtcaccaggttttgccgtgttcagtggagtcatcattcggaagaggaagcgacctgggaaagggaagatgagttgaaagccgcccatccgtacctcttcaccagctccaccgaatctcggggccgagattccgtttaaggggggtaggtttgtcacaccccgaagttttcctcccaagtcaaaattgtaatttataattgaccctaagaaaatgctggtgaaatcaggagaaaaccctaagaaagtaatgcaaataataatcggatttgacatgtggaatttttcttgagttctacatgtcgaaattcattaacaggatttttagtggaattttcagagctctagaaataattttaaccaattaaaaatcactaaagtgcaatcgttacttccagggaaaatcctttttccttttctttttcttttt

SEQ ID NO: 5430 - DNA, 10092 bp, Oryza sativa
gtaaacattctctaattatatattaattaggcttaacaaatttgtctcgcaaaatagctttcatttatataactagcatgatggcccgcgcagattacgcggctagcatcattatattttctctcaaataatagcatatatattttctcattatattattcaaatatattaaaatgacaatataattttaaattttgcaataactttacaaaactactaatgtgtaatatttatattgtattttatatacgtgttagttattaattatttttaatatcaaattttagttatttgtaaattatatatattcctatatggactctagactcgtcttttaatatttctattttttaattccgaattttttgtaaattgtatttttatatagactctatgctcttctttcaatattatttatatttatttctgaatttttattatttctaattgtatttctatgtggactctaaactcatctttcaatattctttaattttaaattttgaatttcagttacttctaaattgtattcctatattgactttaaactcttcttcccacgtttttcttaatttctaattttatttatttataaattgtatttttatacggactctaaactctacttttaattttattatgtttattccaaattttagttagttttaaattcctatatggactctatactctacttctaatattccttattttttaattccaaatttctattttattttcttaattgtatttctatatagactctatcctctacttctaatattccttatttttaattacgaatttaagttatttcataattgtatttctacgactctatactctacttctaatattccttatttttaatttcgaatttcagttatttcctaattgtatttctacgtggactctattctctaattctaatattccttatttttaattccgaatttcagttatttcctaattgtatttctatatggactctagtctcctcttcaaatatttcttattttttaattccgaatttcagttatttcttaattgtatttctatatggactctagtctcctcttcaaatattccttattttttaattccgaatttcaactatttctaaattgtatttctatatggactctagtctcctcttctaatatttcttattttctaattccgaatttcagctatttctaaattgtatttctatatggactctgctttttctttttcttcgattaatgtgagaatttctaggccatgagagcgaacgtggagactccttttttctattcctttaataatataatagattagttttgtaagtagtctatatttaatactctaaattagtgtttaaacacagagactaaagttaagtccctggatccaaacactaccttagtcgaggaacagcttgccactggataaagaaaaagacccaaactcgtcaacttcaacaaacactgtaccatcagacatgtgacaggtcagcaataatcatctcaaaacaagggacaagcagtaaacaagtgtgacaacatgtgacacacggacacacggtatacaatgcattgcttcttttctttatagcaattgtggtcatcaagcatgtgtttcaccatacttcgttaagagtaattaatggtgttaaaatttagggacaattgcttatttatcctattttaaagtccaactatcaatttaaccttgtttttcagatttacttatttaacacgttaaaacttttcacctattagatctaaacacagcctgaataaaattttcggtctctgcccttgttaggtgaactcattttaaccccgacaaatctagcaaatgtcaaaaatgccccctcgtcttcttcccccgacccgaattctctcctcactgattatctcctccttctccactggccagccagcatctgctagcttcggctctgctccagttctgccctaatctgcttaacgccactcctctactcctcgaccctgctcgccatcacagcatcactgcaggttgcataggaaagccaaacgcggatctgcactgcaagctaagctaggagctcacacccatctaaattaaagatggagcaagctagctagctcgtcattactaatcgtttcatattttctttcaaaaaaaactaatcgtttcatattgcacatctggtctggagaagacgattgagctagctagctgttgagtattactaatcgttgcatattttacttcagcggatgttacttaagcgagagtaaatcaatagctagctagctcaatcatttcttcaaaccagatgtgtaatatgaaacgactagttttttttggaagaaaatatgaaacgattagtaagattggcctcgtacctgatcgttagtcgataaatggctagctctgtttttagctccaaccgaggtcaaactttcagacttggagtgtcaatttgtcgattgacgtttcatgcatgcgaagatcaaaaagaacagaaaatgcaactaattaaccaaccagttgtttgagcatcgggaacgcacctgcttacttgttattcgccgctgttgcaggcatcaaccggcacgagccaaggaggaatggcgtttctccctagcttctactggagtacatagccttcgtaatggagtagtcctaccttattagatagagctatgtatcttctgtacgtagcatcaaagttaacacggacgtctccccacaccctccacggcagttgacttcgaataaagagtaggcacatgcatgttgccgatccatagtttgtactactacatctgatttcaaataattaattaattaattatatgattgagtaaattttacaaaaccacacatatttaaatatgtatatcacaaaactacatggttagtatcaaatttatcatacaactacatatttaaagtatcgtaccacaaaactataaatttagtgatgaatatatcaaagaaccgtatattttagagtttatatccataacatattaagattacaaaagttatagttttgtgataaaaccgatgttaaatctgtaattttttatacgataccttgaatctcttaagaggtccgtttgcaaaaataaattttcgcaggccgttgccaacaatctcaccccacagttgtcattttcacaggcggccatttagctccaagagacctacccgcttgaaaaaaagaatgacagtgtttggaaaaaaaaatatttttctagtagtgcatcctctctctatgcttgggcactcccacgagcccttgtcttatattgttgtctagtaagttatttgccataacaccactagttattaacaatatattatgtgagagatgaaagtactgtaatactgaggataataataagtgaaatttccggaagatttcggtcctatcagaccccccccccctcccccgggcatgatattattttgaccaaaattttaaattttgttgtgaattttgctcagatataatcaatttttgttcaaaatttcactatatctacaccctctaatacaaacgccgaaaacaaaagattgaacagtggtgctatgtgtgctccttgggtaccaaacgcaaatcattttagcattctcaagtcttaaataaatgtcaatttattttataacttccaggcacttgtctctcttttctttcatgtatgttcttgtcaaagtgcattgataacccttgtcacgaatacatgagtcatcctttttcaacactcatttatttaaaaggaaacatcaacgttgttttttgctctaatttatttttcatacataagcccaaattatttaaagtcatatatactctagtatcccaaaatataagaactgtcggcgtgtttaaaatttatctcaaaatataaaatatacctcatttatttttgggacgaagagaccacattaattttagacaaatcatatgacatacatacttcttctaaaagactctagtggcggttctagtggcgatggtgagtctgtctctgtcacaaccaccctgttatgtggggggtcattacatcagtacggacatacataagtggcctacttactctatatgtaatatgtgtaagactccacttttttttaccctgattaaagtgaaaaactcagaaacattttggttttacttttgattttaaattggttatattgcataatttattgttagaaagtatttcacggtcacatgaaaaatgcatttaaggaattaagggttaatgtcttactttgggaactacaattctaacttcctcagtgtgtttcttttctttttataagatggaaaatttttgtttcaatcaagtagaagcaaacatttttttttcaaaaagcggcctcttgaaaaaaaattaactcatgtatttggctcctttttaagaagttgcaaactatagttggtcgtccaaacaaatgttggtggggtgaagtactactactctccattagagcaggttcaaagttcaatagtgtcgtcggccgtcggctgcctccatctatctttgcagctagcactggaaccaacctatacaatagactagctgttatgttgatcacatatcactaatcaaataattaattctatacacacttgtatcaatataccggatccaaactgaactcaattcttgtggccacttgaaccagtcgaatgagaaagcggaagaggaaaaccacaaactaacataagatccaacgggcttttcatgggacccacaaagtgtgtttttaattgctaacaacggcagcatgcatcgtaagacgtgctaccgcccgacgatagatcaatcgcctgcttgcttctctttccttacttctctctaagggcaagtacaataacttgaaattatcggctaatagtaagcttacgttggattttatacctatgtggcggagagagagtaccaagagagaaaaacatcgtcgattaatctgtcgacgatcatgcacgggcaccaatgcacctagcgctggcttggagccttcctatcgacagcaccatcgacggaacaagaaattagcatgaataatcttccctgattggcttggagggaagagaaaagctgggaaggagtgagagagaagtaattaaataattattgatatgtgtgctgcaataaatgtgaggagacaactattatatttattataataaagattagagtaagctgtacatgctcttagtcaagggacagcttgtcattggataaagaaaaagacccaaactcgggtatttgttgaagtcatgagacatgtgacagctcaccaataatcatctcaaaacaagggacaagcaataaaacaagtgtgacaaactgacaatatgcatgtgacacacggacacacggtatacaatgcattgcttcttttctttaatgtcctcaagcatgtgcatcaccatatttcgttaagagtagttaatggtgttaaaatttaaatatgtcgttacatatttaccctcaatcttttttaaggctttcgattctacctatatatgttttgacatgaattttgcccctgttaaaacatcaattttactcattccatttagtaaataaggacaagcataagcttgacatgaattttaacactaataaatactccttccgtttctaaatattcgataacgttaactttttaccatatatttgattgttcgtcttattcaaaaacttttgtgaaatatataaaactatatgtatacatataattatatttaacaatgaatcaaataatagaaaaattaataattacttaaattttttgaataagatgaaccgtcaaacatatttaaaaaagtcaacggcatcaaatatttagaaacggagggagtactcttaacaaaaatgagaataattataagcttcagttaaagaattaaggggaaaattataattgagtttgaaaacagggtaagaacgcagatgcacccttttatagagatagtagcaacgatccctaatttgtacccttctgaatctccaaatattaaccacagcataaactatcaacccacatcaatgcaactgggactgcagcacaaataggcccatcacccagccaccctcctcacgccgtgcaaccacacgatagaatcgctcgccttagacacatcgcgcgcaagtgcaccactaacacgcgagagcccatcacgcacggcgacaccaccctgcacgcacaaaccccatacccatacggcgaagaacgaacttgctactccaaggatatgaatacgagccggctatgttctttaccacatcacagagtgcattcttctatctgattgtgctaatttatgtgccaccttatttgtatcctctgctgaattgacatagtcttacctccggtcacaaacatattaagtgaattgatactactcccttcgtaccaaaatatactagcaacgtgtcctcattcaaattcttagtactagctggtatctaatttactactccctccatccaaaaaaaaaaacaatcctgggtttaaatctgaacacggtttgaatctggacacacattatatccagattcaaacctaggattgggttttttttggacgaagggagtacagagtaatactactagggctgtgtttagttggatccaaagtttgtattttggttgagattagagatgatgtgactgaaaaattatgtgtgtatgacagattgatgtgatggaaaaggactgaagtttggatccaaactttagatcaaaacacagcctagtactagtacaacagaatgagtatatcacatgaattagttggagtgagtatgtcacatgaattaattgcattgatagcaccgcacaattagattcttaaccaattcattcatatgggcacgttgatccacccattccacagcaagccctggtccctctctgcatcccatcaaccaattctgggtgttccatccagttggaatttgttcacggtgatcactgagaaggtgaaattaaacaggggacatattctaatactatgaatctggacatatatctatccagattaattgtatagaacgtgtcacatctaatcctagattcgtttttttcgggacgaagggagtacaaaacaagccattagtgttggttccccaaccgacacacatgtgttctccccgagaaaaaggacgggttgataaattgacaaggttcatcgagctgatgctttgagttatcctcaatatttatatccatggcaccgaatccccacccacatttacacaccagggaataaaaacacaataatttccatatccacaaatcaaagataagaacaaccacatcacagataagaacatactatttacattcactaggtgaaaccccgcgcattgccgctggaatttagtataataacaataaaaaataacgtgtaagatagctagataatatcagattaagtaaattaatgtggtttatgataatttaaatttaaatagtatgtagaatgatgattcaaacgtaaaaagtaaggtggtatgactttatagaagaagaaaagtaggcagatagtttggaccgtagattaatcatctaaatgctaaaaacaattgatgtgatatgacttaattagaggaaaaaaagagaaagataatttggaccatagattaatcatttaagcactaactaagtgaggatgaactatataagtatataggatatcataaaacataataggatatacattgaaatattatgtgaattatgttggatgataatttaacatgttgtatttgaaaagctcttaaattataaaaactataaagatatatcatgtttgcatgatgtttaaatgtgatgattgttagtggataatgatgtggcatcttgttaattagtggatgatgatgtggcatctttgcatgttaagcttaaggagttagtgggggataactttatagtaagataggattcaattattcaacaaacaccatcgataacaccaaaaccacatcatgcatcaaaaaaacctttgctatattacacattcaacagaaaaaaaatataacaaaaccggactcacattacactatgggattacttttctctgcttaagggtgataaacagtaattagcatggtgttagaaacttttatcggcgtcattagaacctggtaaatatatagtagctccgcccctgatatcgagataccatttataatacctacttcctctcgtcccaaaatactccctccatttcacaatataagtcattctagcatatcctatattcatattaatattaatgaatctagatatatatatttatataaattcattaacatcaaatgaatgtgagaaatgttagaatgacttacattgtgaaatggaggaagtataagaacttaggactggatgagacgtttactagtataatgtatctagacagacttcctatcaagatatattgtactagaaaatatctcatctaatcttagattcttatattttaggatggaggtagtagcatgatataagatataccagcttagatgatactcccaccgtccttgaatattcgacgccgttgacttttttaaacatgtttgaccgttcgtcttaattaaaaaattttgggaatattattcaaaaacttgagtagtagtagtatatttaaccatgaatcaaatggtaggaaaagaattaataattacttaaattttttgaataaaacgaacagtcaaacatgtttaaaaaaatcaacggcatcaaatgtccctaaatataagggattttagttgaatgtgatgtattctagtacaacgaatcgtgggcatgaagtctatctagattatttgtactaggatatgtcacattcaaccaaaatccattataattagggacggatggagtatacaatagcggccccattcgtttttcccggctgtgttgagttcctgaaaaaagttgaaagtttgaagaaagttgggagtttgaaaaaaaaattgaaagtttatgtgtgtaggaaagtttttgatgtgatatgatgtgatggaaagttgagaataggggggaaactaaacacggcctcaagccctcaaccaaatgccttcctggcttcccgtgagcatccgcggtagctgctctgcttcttctccatgcccatggtcgactttcactgagagtggtgtgctacaaacagtaaacagttggtggcacacggccagccagtgtgagactgagagaaggagctgatcgagatctagtacgtacgtagcaatatggtaggaggaggtgggtacaggcagaagctgatccaggtatggaacgattggcaggtgagcgtgctggtgctgctcagcctcaccctgcaactcctcttcctgagcacggcgggcgcccggagacgggcgcagccgagctgggggaagaaaacctacttctgggctctctacatcggctccaggttcatcaccacctactccctcggcatcctctcccgcgcctccacgggcgacgccaacgccgacatccaggcgttctgggcgtccctcctcctgttccacctgggaggccccgacgacttcaccgccctgtccctcgaggacaacaagctctgggatcgccgctgcctggagctcttcatccaggtagggatgcaagcggggttttttttagactcacttatttacttctagtttatttttttaaaaaaatttacactatcatgtaggaaataggaaatgaactagtaagcgggtttttatatccctaagtgcaggtctcgaccacactctatgtcttctcccgctacgtgctcgaccccggattccgccgcttcatcgtgccgttcgccctcatcttctccgccggggtggtcaagtacgtggagcaggtcgtcgcgctgcaccacgcgacgatggaggcgctcatcaagtccgtcctgggaaagcccgacgctggcccggactacgctgacaccattaaccgattggacgggattatgagatccggcgcattgccgtccctcgacatcaagaacgaacgagttgaccgcccaaactctggtgagtacgtagtaactaatcaacctaattaatttgtttgcggc

SEQ ID NO: 5431 - DNA, 9986 bp, Oryza sativa
  unsure (1)..(9986): unsure at all n locations
tttattccctctcctctcctatctcctccacgtgtttatagctgacttagagtaagtttaatagtatagctaactactagctccaaatcatctataattgatttaatagccaattcatacaatagttatctataaacatatactacactatgttattatacctgctcttatactctgctattgtatttgctcttaagaaaaagtaatagcaatatataattctcatacagagaaccatatagagtggagagacacccaaaaaagaaaaataaaataacaagaggcaggctaggaggaatccttgtttgagacggcccacggcccatcgaggcccacagtcggagaaaccctaccgcgtcctctccctcccttaaaaggcgcctctcgccgccgtcgccgaaaccctcttgtttctctctcctgctccccccccaacgccgccgccaccgccgccgccgccgccgccgaatccgagacccccatctcggattcacctctcccgcctccggcctccgtcaccgtctccccacgcgcgtcaggtcgagatcccccacccctcccaccccccgatgattctgttgctcttttccgctccggctcgtcccgatctgtgcgctttttttttttttgggttgctcgtgagatgtcgcgtggatctggctctcgcgcttgggctggatctgtggtagtgataaacaggtctagccgtagcttgtgcgcggtggaggcgaactctaggtttaggtttaggtttttgtttcctggaggaaaagttgggtggatttttttttctattattattatgtttgatgctgtagtggtcttagtttggtagattcttgggtttgtaggatgctcagtgtttgtatttttgtctgagatgattgtgggggattcgtcatgctcagttctgtgcttagtgatgctatactagatgttttttttgtcactgtttatgtttattaaaatattattgtgaaggtagcaagctcgcagagtcgagttctatctattggtgctgtggctcgtgccggtttttggtgttgaagctataagggttagtgtggggtgtattgtatattgtcaccttgctgcgattatgcatttgttacgtggcagaatcttaggacgccatgtccagcttattaatgatgttatgctacttgcaatgaatgcttgagtagacgtatttgttctaggtagcaatctaaaagcatgggattgaatgctttaattgaatgtgttgttgcctgcggataacctcttgcttctgtttttacgttaagtgtcaaatagtaattattgttaatatagtcggttgtatggctagggaactgatgttatgctcctagtttcatgtagtggcataatctaagtctttagaatgtgcatggttatagttgatgttcagctgtaatgtatttttcaagcaagtgatgttatttaatatgtagaacaaatgtgtaatatgtagctctgtgaaacatcacccataccgtttgcgatgtatcttcttcatatattgctttgttttcccagttcatgtgcctagttaatttacttttctgttatgcgcttatcttgttgctaactggaactagcagatatctccatcacgcatgttctcctctgtcctactttctgttcttttggctaacatattatcttattaccacagtcatggcgggaatggcaccagagggatcccagtttgatgctaagcactatgattctaaaatgcaggagcttctgtaaggaatcttatactgatacgttttatctcagccatcattgtgtacggcaatgtctgtctatttcctgtacaggatctaccgcttactgggtagtcttttaatgcaggaaccaaggtgaaaccgaggagttcttcacatcttatgatgaagttcatgagagttttgatgacatgggtctccaagagaaccttctcagaggcatctatgcctatggtaggtttataatctttcgtgctttttttttgtgtgtttgccatttgaactgttattcatcagacctttttttttgttttataggtttcgagaagccttcagccattcagcaaaggggtattgtccctttctgcaagggtcttgatgtgattcannnnnnnnnnnnnnnnnnnnnaaagactgccaccttctgttctggaattttgcagcaacttgactatgctgtggttgagtgccaggccttggtccttgctcctactcgtgagcttgcacagcaaattgagaaagtcatgcgcgcacttggtgactatctgggtgtgaaggttcatgcttgtgttggaggtacttctgttcgtgaggaccaaaggattcttgcaagtggagtgcatgttgttgttggaacacctggtcgtgtgtttgacatgctgcgtaggcagtccctccgtcctgattacatcaagatgtttgtccttgatgaagctgatgaaatgctttctcgtggtttcaaggatcaggttagcattatcttagttgtttgtattttgcatttggtttgcggtttaacactatttagactttctgagagcatgattcattaatgattgtacaattcttaatatgattagagttagatttcctgggagcatgtttcattgatgttatacaaagtctactaaggttgatgtgtcaccaaagatctcaatttgatctcaacttagctatcctttttgtgttatttaagtaactaattcttttagaatactaagcagcaggaaattgaaagtagttaagccagctgtatacgtttcatctctttatgttatgttattggactattctgaaaatctgtttgacatgtttctgttattccttctattacgtgcttcatatctatagtaatattaatttcccttttgttatttgcagatttatgatatcttccagctcctcccgtcaaagatccaagttggtgtgttctctgctacaatgccccctgaggcccttgagatcacccgtaaattcatgaacaagcctgtgcggatccttgtgaagagggatgagctcactcttgagggtatcaaacagttttatgtcaatgtggagaaggaagaatggaagcttgacacactctgtgacctgtatgagacactggccatcacgcagagtgtcatctttgtgaacacccgccgcaaggtggactggctcactgataagatgaggggcagggatcacacagtttctgctacccatggtgacatggaccagaacactagggacatcatcatgagggagttccgatctggttcttcccgtgtgctcattaccacggaccttcttgcccgtggtattgatgtccagcaggtgtcccttgtcatcaactatgatctgccgacccaacctgagaactacctgcatcgcattggtcgtagtggtcgttttggtaggaaaggtgttgccattaactttgtgacccgtgacgatgagaggatgctgtttgacatccagaggttctacaatgtggtgattgaggagctgccggccaacgtcgctgaccttctgtgatcaagttcagaagagttatgttaaggggcctgataaggattgtttttgtctgaagtatcactgtcttatctggggggggggggagtgataaaggtgggggttctgttttaaaagtcactgtggtcgtagacaatttccaaatttttatgccatgttatgggaatttttgtagttgctaggctgtgctatgtgctggtgaggagggaggagtcttttacttttattatatctattgttaaaactatgtatgaccgaatgatgttatttatttgtgtcatggttgactatttgccatatgtattctgccaccggtcctgctactgccactggtatctcgagtgaaaactgtttgctcctcggtgcaataagccagataacatgtcacctaccggaatgccgttgatgtctagtgatgttttatctgttgatatgcatgtttggttggatacttgcctggacgattataataattttttgagatgttggcttcattttggtgagtgaaaacattggccagttctcttcacaagggaaacaggttttctgtccatatttcgactgaaatggtacaccgtcaatcgcttgctgtaatctgaagcattgtaaattattggaagcatagatgtcaaggtacaggtaatctgtatcctgttagatcagcgccatctctacattctactctgtaaataaatggttgcatgagttgaggtcccagtaatagctgagaaacggaaataatagtaactgactcttttttactcatcatcgctgccaaatgaactgacgaaagtatccggaattttagttagttttctgaacatttctcaatcttagctagatgggaaaattgacctttagtttttctgcacctacctatcatcactgctaaatggagagacgctaaccatgaaaacatccaaacatttagcttgttggaaaattcaccttaacttttctgcactcgtagaacattcagcataccctgccaaatggagcaagctaaccatgaaaggcatccagaatttcagcagtttttctccctgaatttctgaatcttagctagtttggattcaccttagcttttctacaccaccagaatttttcccctccaacttaacaacatttggatgacctccttcggtcatcccgacaaaaaaacaccaccagaatttccaatgtattatcctagagtcccgctccggtgctttctacttggaatagaaagcaatctgagccgttcatcatatttaattgtagggttgtgatctatttctactcccaccagagttagtggtagtagaaatgtgcaagggtatattcgttcagggataataattcgtgcaggggtattatcataatttatcagtatctaactcatcttcggcgacgccaccgccgtcttccagcactgcgacatcgtcgcacgcctccccctccgcggccagcagaacaccatcaccgcccagtcccgcgccacaggcttctcgttccaggactgcagcatctacgctgacaccgacctcctccgcggtgcccccgccggcaacagcgtggagacctacctcggccggccgtggcatccgatcctgagcagctcgccattctccgacacagtggaaaactaatggctgattcctccgacactatggcaagaacttgccatggagctcaagaacaccctctcgacctcttcagaggcatctctgctaatcaagcacatgacgtactccatcactgatgcatcgcacatcaacgtgatcctgccatcatcgccggcgaagccaaattcctcttgagacatggcgaggagctcgccgaaaaccaccgtgcgaaggtacaccaatggcaccctcgaaccgtgccccgtcaatggtgtacaccgcgctgtggcccttgtcggcgagagacgacgacaccatgctgcagcaatcgcctgtggtgcctgccgtgcccatccaccgaacctgatgcgatgcgaaccgaacaaaacatctcatgccaaaattacccctaaactatattaggagattacttacctgcccttttaaataaacggtcgagattaattctacttgtagtagaatactgcaagtagagtgcaccggagcatcacccattatcctaatgttgggttctgatcacatatgagagcctgtgagtcagtgagccactgctttgcagcagttgatgctactacaatgtctcattcctcaaaaccatgctaacatgtgggctggttcataatgttaatgcaccactatatgtacacatgatccacaagtgcatgtgtagtgtgtctgcatgatctgactgactgaactgattgattgatttccagatgtttcatgctctagatcatggcagattgatccatatgttgactattaccttccttgtcgatgccgacgatgatccgtaacctcctcttcctcagcatcctcgtcgttttcgcttttttaacttctttatcctagttcatcttttgattttctcctttgcccaactagctttccttaattcattcatccatccacgttctttgtacagtagatatagagctctctttttttctttcttctttttctttgggatgcataaagctctctctactccaccaattaatccacatatgcagtcaccatcacacgtaatcttgtgcaaacgtctggtacaaaccatttgaacattctcttgctatattttgcgtgtgattaactttttagcttgttatatattctcttgatgaacagactagatcactagccgatagctgccttggatgtgtagacaaataacatgtcacccattttcttttattttttgctgaagaatgtagtaataatgtatgcatcgatgttgatgtgtaacttccatgacaacaaaaacccggcaatgctggaaatttgtcaaacactcaaaactttttatatatatgctcttcacatcgaataggtcagattcccaaccgaccacaagctgcaaaaaggcaaataatatcatcttctaagattttctgctgaaagttaatgaaaaatgtgagcatcaatagatgaaaatgaccaatcacatgtatgctcttcagaaggagagaaaagctgaatttattggtaccagaattagtttcagagttagccccactgcagatggggatcaaggaggctatagcttagagatgacccaccctaaatcacatccaaatctcaacactgctttcataatgaacagtcccaacagtagagctgtttcattcttgtccctctactacaaattgatgatcaaagtctcaactttagtttcaacatctcttttgaaaagaaaaaaaaaagaactttaatcccaacatctcttggttggttggactgatgcatggagtggatcatctttctatatatatcttcataaatttgattgttcaattcatcagctggaaaatggtaataaataattgatttaccatagttttcctgtgattaatctaattgtccttctatatgagttggctctatttagggaagctggagattgagaagctgctggtgagtatccagctagagaagctaggaaacccaatgttatgctaccagttcattttttgctacccgttttaaatgttattcttttttcagaacttttgaaattacatgcttgtaggcacctacgtatacgcaaggcagttagctagtgcgatgtgttatttgattttgatatgctgcatgattcatcgtcctcttttcctagcttttattttactttcttatatatatatatgtacacctaattgattctcaactatgttatatatttcgataagacaatatacctttcacatcacagtcaacaatctgaattaattactatatatattagcttttttttggtttgcctgatctcacaaagtagcaggctaccgagcatatgaaagcaacttgaaccaatgtgtatcctccttttgggaagatgggaaaaatgaggaagaaatatggtggtggaagcatgaacttttaaggcagttgatagaaagattcattttagtaatatattgcatattgttgctagtgggctaattatcagatcacttttgatcttgcagctagcactactctgaaagtgcttacccttagctgataatctttttggcttgttagcattagctcattagagtagatatatcatatatataaggcatatagctagtactaataatgtactagcaccaatccaatgatatcatctttaagttgatttcaatgagatcaactcatctctgatgtcacatcatagggattaatcggtcaatgcaatatttcccaaaatgcattatgcatgattcatgccttcaatgcttagacctaattagtccattacctgaacatatatataggatattaggctcccatcatgtcacataacatttagtaagacaaaaggaaaaaagttcataaggatccacttaactcttccaaaagtttgatcatttcaaccaagcatcgattctgggcaagaatcaattaaccctcaaaacatcaatgccgttagctttacatcattgacaccaaaatcacagtgatcccagagtcaaaaaccattctttctgaagcttgcagggatggacaatggaatttctctgaaaacaaaatatttccttggaattgaaacatgtactgtatatattcgtgcatgcacattgtcatgtctggttaaacatagtactgcaaattaatctcgttccatgcttttagcaacaacacaagttgtattattggcagctttaatttctaacgcatttacagatgataattaggccccaaccatgtgcatggtttggtcccttcaggctacctgacagtggatttgccggccggccggttgcaaattaactgcatatccacgaatatattagatggagatggtgctccaatcaaattaaatccagcttaataaaaagctagctagtactagtccaacacacactccacttaatttgtacgtgcagatcgattatccttgtcatttagatattcttgtcactctgtcagacttccaccatgcatgatatccatgtctgaatattggagtccctttttacagctcaagctgtaacactgattggccattaattctgctatgtggtaacctttgatcatcccctttacttcattatatctcatctggctatgattaattgttatatttttaattgaccgaaaggcgttttgatcgatcgagtccatgtctgcatgatcgaatgcagctcaaatcattctgcactgactcgtttttctttctgtttatgtcgaggccaactaagtgtagtggaatggttaattgataggtaacctaatcaattaataattgggccggtggatctctgatcaacgaaccttgaacgaaaaaataatgtcaattaatctatatatacgacatactccttccgtttcagaatataacatgtatgttttggtttttgtctgaagttaaactttttaaagtttaataagcatacagaaagatataacaacatatacaatatttttataatgtatttgtttggtgttgaaaatgttacgttgttgtgtttatttaaacctgattaaactctaatacgtttgacttacaaaaccaacatcttacatcctgaaatagaggagtaattagtcaggagtgcattcattttgcctatttccttccggacttggatttccttaatttggtcttatttaggaaaaagttatatgaattaaaaatgtgatgcatatatgaacagatcatggagagtatatatcttccaactactctctgaacatgcttgcctggaacaaagtcacaaactatagtgtctcagcttgcagatgattgtccacgtgcacacgattatttatgatgcacttttagttgattattattggagctacctagagccttggagattaattaattattgtccagcccgcagtttaattaattaattaattagcacagtatatatactactctaggtgatgtacgatcaagtcgctttgattagttgtttctggtcctggcagaatcatctacagctcgacgctttattcctaggacagatcaagggacaaggagaaaattgcatatctaccatcccatatgaatggcttcgctagaataccattatgaaaacgggcttcgctggaataccatcctcaatcagagtgtcttcgccaaaatgccatcccggacggaaatgcccctggctcttcttcttcctccatcccgcgcgtgaagagctcgccgacggccatggccatctccaccgccgcgccgatgccgccttgctgatggcgattggggcgctgccctccctgccatccccgccagcgcctgtgcagatgaggtcgtcgcggaaggactccggcgacgacgtgtcggatccagccagcgcgcgtgcgcgtggggccggtggcgcagctcctggccaccacc

SEQ ID NO: 5432 - DNA, 3853 bp, Oryza sativa
tgtcaacagccctgtaagctttaggatgccattttccttcagaccaatcaacatgtgtcactgaccaatttgcaattccagttggatcaaccatctgcaggtacaataacggcctgaaatcactgggaagtaaacacaactgaaaaacatcatttaagagtttttgagagttcttacattaaagagggttggcaaatagtgttcatcagaatagcagttatgccattcgtttcccggctgcaaaagtgcaatcacaagatcagtaaagagctaaaattcaggaaacaacagcaattcagtggtcataaagatgtagagaaatgaaccaaagcatttcattggtcatcggaattgattaaaaacaatagtagtacaagtcaaaactcaaaactactgtgtaacaaatgcagtaaggggatttgcactcgttatggtttaccagtgctagaccatataatgctgcatggtgtgcagaaaatacaaagtggggctttctatgtgcattcactgaggaaaaatcacaaggacagagcaagtagcctagtacaagttacaactgcaatgaaatagcatggagatttccataatgcattcactgtgctagtactaaaccaatacgatgctgtctgtaataatattatctaatggcttacacttctaccaatacaccttttaaattcactttacccatttgaatgcaattttaccttacagtaccgcttgaactttgcatagtaaaggaaatcggaaagaataagaactgcatgctgacgtttcactgtgaaccactgcaagaggaaaacatatcagaatgtgtgaggttagactgtatgacaatatagcaattctttagagtataatacccaggattattgaagttccacagcacccgctctaaacatttgtaaaagggaagaaaatgaaaaggcaaagcaacagtttgcaatactttctagaaaaattatgcatattaaagtatacctgtgcaccttttctccaatctctcttaacaatttcaggtagcatatgatcagaatatctgcctgctccatgtggaccaggatcgtcaaaactgaagaaaaagcagttggcgtgtcagtggagaaactataatgtctgttagcaatcatgaatgaaaggggcactggagatcctgaatcaaacatctgttcaactttaagtgtgtctacacatgtaataacattcagggtttaaaggcgtccacttaccagtcaacaaagctgatatttgtttccataagatagctatatacataatcaaagttatgaagtggtacacagctgtaatgagaacaaagtattagggtatggatctaagatatgattaaggataagaacaaaagaaaatgattaacctctcagagagcaagacaaaatgctggttatcaggatcttgcagtgcattagccaaaagcctcctctctgcatcaatcattgaaattgtgccccagactacctacaagaaaagtttctgttgttattgttgggaaccagtttttccagtggataacgggagcttagtgctccttagggcatacgctcttttggtactgtttaaaacctacttgctattatatgttgttttatgaagatttttgtagaatctaaatggaagttacaattaaatttggtttcaaactagaacagaaatcactgccgttgtctaggaaaaatattcaaaaggaatgtttaaccaaggatctgactatgattctgtacctatcagcgattaggcaagacaccaactattttggggggcaaaatgtactagagaaagtgagaaaacgtattgttgcaaaaatgaggtcacctctaaatcaaatctagcaaattaccttttcacttcgaatatctctgccattaaatatcggactagcgtgaacaggcctttctcttgatgcatgtacatatatggtatatctgtcttcatgcccctgaaagtacacccaagtatctggattcagtaccatccacgtgcacctcagcaagtgagcatatcttataactttcatgagattggcatgaagctcttccagaaaataaaacgtgaacaaaaatcaataacatgcattcctgataagaagaaattagtgctacttataattattacataatgcaagattaatcatcaatgagtaaaaagtgcaattaagatctttattacaatagcgtaaatatcataccatgaagaacttttcccaaagcttctcgaatggcaatgaactgggtgtcaagaacatgaaagcaatttttggattctttgactgaactggctgtgccaaaatgatatctcttatgacaatacgagcagcaatctcatcatcagtgtaaaccctagcaggttctggaggaggccgagaactacaggaatttgatgacaccaagtaacaaggtgtgtaatgctggggtgtataaagataggctccaatgcctactgcacagacaaaagcaatcaagatgacaatccagagaggccttctagctgaagacctgttgcgcggtgccatgataaaagtgtatatggccgtacgcaggaaaggagaacttcacaatctacattcagcaagcttcatttatgcaatcatccagtgtcactctcctggcagaactgcccaagaacccccaaaacctgaaaaacatggggaatgagaattgcagcttaatgatttcaatcagcatttttcatattctggttaacaatatggaccgaatgataagggaaatgtatagattatgaaacagctttaatcctaaaaatgatgtcaactcagcatttgtctataattctcgtgtttctttctatgaaagttatgggcatatgctcgataatggaacaaggttcttttacagaagttgtggtgactcagatgaataagatgcaactcctttgttttcgagagcagaccttattccttaggtgaaaaggaagaaaatgtatgcctaaaactgtcattgaccattgactaatgttctagcagacaaagcaaaggattaatctagggtttgatcattgcacagaaaactctgcaagaagagttgcagatcttcagcccacagattaagccacagtaagacgaaatcttgagcctatagcttacactatgtagcacatataacaaacaactttgcttttgtttcttgctggtttataaaacatgtgtaacttgcattttaaggtatgcacgctgcctgcgtgtttcagatgattatcccacattcccctttgcacatgagaaagcaacccccttaaacccctaaaacctcaccaattaccaccaaccgaactagttcgagctatccaatctgaacaaaaagcaaacctaacatctcacatttttcctgttcacatgtattttatagcaagaaacctctcaaaaccacttaaagattccaagcattcactgaaaaatcagtaaattcccgtgcttccgcgcaagcaaagggctaaaactacttgaaagaaacactaaccgaagaaaaagatagaaaataatttcaagaacagaacaaaaaactgttccttcccccttcttgcctcaccaaaaaacccccaactccacaatattagcaacactcccaaatcacaaatcctcgcaagaacacaaacacacaacacccataatcacaccaacgcaggcaagaatcacaggagagaggccctaaaaatccctcctttcccatctccgcatcaagcagaaaccacccaaaaacccaaaaaaaaggggcctttaactgacaagcgtagcaagagcagaatcactcttatcaccttcttgcgaagctggatctcactcacccagggcttgggattaccgagttcttggcgagatcta

SEQ ID NO: 5433 - DNA, 15299 bp, Oryza sativa
agggtacttgttacagttacacagaggccccatgtgtcgttggtttttcatggagtgttttcatgcttccccttctttgtatcaattactggtatttttcttctcgtagggctacgatgcacatggcaggaggatctggatctgatcttagaccaatcttcgatgaataccttgctaaatggagatatactgatgatcaagtttatgttttagatgaaggaaagaacagctcctcaaatgggttggttgttacatcggttatgtcacctgaacaatattttgaggtggcagagttgtacacggtaacattccttagtgttgtctcccatgagactgcaactgctatctcatggactgaaaaggctgagttgactgaacaagatcggcaggtaagtttttgttggcgccttgtagtaatagatacaacttaggagtttcagatttctatattgttttttttctgaacttctattgctgctctgccccttaagttttgctcctgaggtagagatgcactgtcaattcttttgcattattaagttgtttattatattttcctctacaggacctattgagaaaacttcatgcgttacaatctgcagctaataagaagtccaccaatcagggtgcaaaactatcagaatcagcagaaagaaacctttccacttctcagaatggctcaatatcaccagcacatgaggatgctactaaaagctcagcacctacgcacaatgggaatatacagggacttagaaaggctttgccgaaatccattcaaccttcttttcaacgcgtcacaaatcaatttgatccattgttctggtggtttcattcatttcgcataaaatttggaaaggtgcatgtggttctaccaagtggtaaagtgatgtttctattttcactgctgttctcgacattatacatccttaggaggaaaggtgctgcgttgaagaggtatggatgtctcacacttgcaatcgacattttcaatcgtaatgtttttgtgcctctatgacccaaaagactcattgggagtgaatgtgctttgagcaggactgcattccaacaaatttcatctctgcgacggggcttccttgatgccctgcaactcgccttctccacccagataaatccactcgcagctgttcaacaggtgccacaagccccgcgtgctagctggtgatgtagtgtaattattttacatatttatgccgacatcagacttgagatatgagtgtatgacaaatgtgatacctgattttgtgccattgaaaatgtaaggcaatggtaagagagctgcttaatacttccttgtaaggatccagattgagactaatatatatgtttttttatgacttctggtacctcctcttggcctcttctatgttgtcctagatgttaggctgacgggctcaatttggactaaaaaaccaagcaaaaacagttcaaacttgttgttcagtgattctgtttgcatttatagagtgagaagcggtttgcaataagtgacatattcatggctgcaagcgatatgtttatgtgtaagcctggagcatatggtggatgatttgccatggtaataatatgaagtgtgtcaagccacaaactatactgccttcctaacataggtgtagtaaaccaacagatatattttaaatattatactattttgtaacacattttgtaacacgaagtggctgtagtttagtggtgagaattccacgttgtggccgtggagacctgggctcgaatcccagcagccacactatttttttaattttttcttaacactttttattttttatttttacctttcagtcattaacactttttaatttttttcttcagtcattagccaactaataaagccttgatttgattcattagccaccctttgattcataaactttttgaaaaatatattttgccttgattggattcaatcattaacactttttaattttttttcagtcgttagccaactaataaagccttgatttgattcattagccaccctttgattcataaactttttgaaaaatatattttgccttgattggattcataaactatttgtcattaaccacgctaataaatccttgatttattttcagtcattagcattctttcttgatctttttcttcaggcatcagccacactaataagttttcagtcattagtcatgattatggtaaatatcgatcgaatgatttttacgtgttcgcttgacagatctagctttgtatgctatcgcctcctggttgagctgccccgtgacagtttacttgagcatcttcgtgctggcttctattgaaagaatggctgaaagaatgctaatgaaagaaggtggccatcttctagggcttgcttacctgagcatcttcatgccggcttcgactcacttgtcctttggtctcttggcaactgtggaagaaacgcaactgtaggggcttcgactcacttgtcctttggtctcttggcaactgtggaagaaacgcaactgcagggtttacgactccgcgctctcttcggtcttagtggttctaaagtccatcatcttagagagtcatatgtgatcgttagctggcattgctacttttggggattcctcgggagtgtagtgtggctttgctctctcccgccgatcggatttgtgtttagccatcctagtagtttctttcttcttccttggtttttgtctttttttctctcttcgcctggcataagccggtctgactgattgcgttgtgtaacaaaaactcttttcttttaggtaatatattgacgtgcaatttttttcgcgtttgtgactcttttcttctaatatattaacgtgcaattttttttgcgtgtttggaaaaaaagttcgaatgattttgttgacgcagtggcctcattaaaattcgttctttgctatgcctaaaccgtgcgtcatgcatagatagatcatatataaagaccctataataatattacgtaatcaatgatgaaattaattaattcccaaacatgtacatctatacatataaccggccggcggtggcggtggcggcggcggcggcggctgccggccgtgcagcggcggcagcagcaccggcgtggtggtggtggtcggcgaggacggcctcgaggacgtgcacgaccctgcccatggtgggcctgaccttggggttctggctgaggcagtcgtaggcgaggcgcgccacccgctcgacggcggcgtcgacgccgccgccgtagtccgccgccggcgccggcagcgccatccggcggtcgacgatcctctccagcttcttgggccggatgaggatggggcgggcccagtcgacgaggttgcacttgctgcagccggcggccggcggctcgagcgcgcggcggccgacgagcatctcgagcaggacgacgccgaagccgtagacgtcgctcatcgcggtgaggtggcccgtggcgacgtactccggcgccgcgtagccgtacgtccccatcaccctcgtcgacacgtgcgtcttccctccccgcggcccctccttcgccagcccgaaatccgacagcttcgccttcatatcctattacacccccaaattattaagctaaattaacatttgaaaattcagattgttctctcaatttatagaaatactaaaaaaaggtattaccgttttaacggaatagttgacatcaacctagtaactatatctataaggtattcatatacggtaccgatatcaaatctggtacttacgaagatacctatacctacaaactacaataccctactgatgtcagcatgcataaaactattccatccatttcagattatacatcattttgacttttcaaactattttaaattgatcaagtttgtagaaaaaaaatattttcaacccaaaataaatatattatgaaaatatatttaattatagatttaatgaaactaatttggtgttataaatattattaaatttgtctataaatttagccaaacttaaagtactttgactttaactaaaatcaaaataacttataatttcaaacggatgaaatattttgttgcaatggtatagcgttatgtagtaaccctcatgaatttgtatttgagtaagataactactaactgtgtcaagcaaaatgttggaggtcttgaagtcgcggtagatgatcggccggtcgccgccgtggaggaaggcgaggcccctcgccacgtccaaggcgatcttcatccgggtcgtccatgagaggttgcatgaacctggccgggatcgttaaccagtttcaacctttgcattgcatgcatatgctcttgatcatagtgatcattagcaacatccttagcaaaataaattaatggcgagaaattaatttaagctcacgtcggaagaggtggttctcgaggctgccattggccatgtactcgtagaccagcagccggtgatcgtcctcgcagcagtagccgatgagctccaccagattcggatggttgtactgccccaggtagctcacttccgtcttcatttgattaatttcaattttatttgattaaattagtgcaacattatagcaagtacaataaacacatatcaagaaaaaaaggaagaaaacgggctacagattgtagccagttccaacacagactccattatattttatgtgtatgagagatatgaccgattaataatggtgtagtatatttataattattgcatgaatggactattaaaatagctataaatgattagcagcttgcatgagcacaagaatggcgagatgatgatgtgtgcacactgaccagccattccctgtcgccctggtggcctaaggggttgagctgcttgacggcgacgacggcgccatggatgaggcccttgtagacgacgccgaagccgccctcgccgacgatctgttcggggctgaagtcggcggtggcggccctgagctggtcgtaggtgaacagctcgaggttggtcccgtacgccggcatggtccggaactcctccacgtccttgggcacggccagcatcaccgccgccgtctccgacaccgtcttcctcagcctcggcggcggcgacggcgacggcggcgccgacttgggcgcaatcgcatcgcctgcattcacatacacacatggcaataatcaaacaaacgacccgaggcacctataaatcgggcgctcgatctttttttaaaaaaacggacggtgtttcactaagcggatcgaaattgtttcattaagtagatcggaaatgtttcgatcgtttaaaatgctgaaacataaccaaatcatctcatgagacattttgctacaacgtatgaaacagcggtttttaaagctgtttcactatatataaaaacaatgtttcagcaaatagtgaaatgatgtttcaattcactgcaacatttgatctatacatagtgaaacaacatgagtatacttgctgaaacattgttggtagaaaaaaaaatgaaacagatccccttaataaaccgtttctgtaatatatgggtgatttgttgcaacggcacgtgtgatggggacggcgcggaagcgcgggcatccgatgcatgcggtccgatttgaagaattttcgcaaaccaccgattcagatcatcggaatgcatgcgtggcgtacctcctcggcggcgggatgagcgcgccgccgccgcacgtatgtctccgcagctggcaatgaaccaccggtgcatcttgaagatgaggaaagccagcacgccggccggttgattagtttctcacacgcacgtagttaatcaatggaggtcgttggatatagcaagaatgtgatggcggtgtccctcctcaccggcgggtgcggtggtgggggcggccaatgaatggcaacctccgaccaccacacgccgggagggaaagggaaggggggagaggaggaggagagaagcggtgggcaaaagcgcgcgatggcaaaacacaagtcatggaggggatggaggttgagatggtgtcaagagagggaggcgacgggaggaatggtcggagttggcgtggttggctcacctcgccccgcgttgctagccgcgcgcgcgcatgcatgcagccacccacacttgccatcgtcagttttttcaggccgttcgatcgcaagcagagacagacagctaggcagaaaatgcttcaatccagtcgtccgatctcttgaaaaaaaatcgaacctcttgctatgactttgctgcatgcagcctttttgtcagatcctctctttatatacatgttatatatgcttccttactgagcagtatgcatgaaggagagatgacacgagatatttgcatgtacataatacccttttagcaaacttgaaaatgatttttcttttagattactgtcttcaacgcaatcattgccgccatgtcatcgtcgtaggataccacctccgttgagctgtcgtagcttatctcgccaaaagtctacaacgctacgccgtcatcacattgcacacaaaccatcatgctgccccaccatcattgctgcagaatctcaactccaccgagccaccgaagcatatatcaccagaaaatcgccgctgacatgtccgggcagcgaaggcagttggacgtactagttccgtaccttgtttttgctcatggcggactgaggagctcgcattggtagcgagagggcgtggaggaggaagggcgaattagttccgcatctccaaaatttgcaacaactaggaaaaacttgaagctagtcatatagtctttttcatttcggttatttgtttttctttgcatcttagttttgagatgttgagtgtatgcactcgtataattttgattgtgtatatccaattatggatatagatgccggatttctatccattgtctaaaaaaaatgtcaagttctgatacaatggcaagttctgaatggtaagacagccagggaaatttatttttcaggttattctcgagtctttgacttcaccacatgttatttttcaggtttacgatggtgcagggttgaccccatcggtttatagttgcagcctcgcagtgaaactcaattacgacactatctacagtccagggggccatttacggcctcaggggattgcaattgtaaacaagattccagagaagtttcagggaggtatttccagttgtggggatcatttacaatcccaagctcatcgctatatatccaaaatagtttgtgaacgttgagttgtggggagtaactaacaagcatcattctgaaaaaccatatatatcaaccaggatttaaacttgaatataaaacttggggcaaccgtagtagattaccaattggtcaccattgccaatttttttttaagaaaaaacactcaccattaacaccatgtttgtgaaaacatacagccttattgaaacagcagtaaacgagggcgggcagggatctcaccatatatggacgtagttcactgatgactaaatttattttgaaagtagttcactcaactctgatttatgaaacggtaaatattcagaacttgcacagcaaatatatctgacggccacaccgaactgatgaagctgtgactagaagctggccggaaattacagcactgaaacagaagcctggtatggcgtacacacaagaagtaaaaaagtttggttagtgacgctgagggtgatgatgaatacttgaaacattttgcaatggaggatagaggtggcacctgcctgtggtgagtgaagcgaacggatcggcgattatggcttagcttcccccttgcacgacagctctggttgacgagtggaagtggtgctggaactctggaaaatgcacgagcttcttggttgctggcttcatgccgtcatagaatccttgaggcatttgagccaaatgcacctcccggaggaagtttagttcatcaagcttcggcggcgggctgctgagtcttgcacatttagcaaaaacaagcacctcgaggtttgccatgttcttggtgccaaacgtgcactcattgagctttcccatcgcgatgatggacagcttcttcagtttgtggtagccattggtacaagtcaacttctccccttcgtagacgttgtataacgagaggaggagaagctgctgaaggccttgcagaagctgtagtggatctttaccttctactggcagtttgctgtcccagaggtagaggtatgttatggattgaagctttggttgtagacggtcaaatttctgcatacgacccccaagcttcagcttacggagattcttgttgacatttagataactcaaattgaaccccctcttctcaccagcagcacatgttatagtgagcgattgtaggaggtccatcttgttgattgcatcagagatgcctttgctgcatgagattgatgccttcttaactgatagcttcctaaggagcttgaggtatagcagttcttgctcgaaaggtaccatgcctgccttttttcgttcagaaggcacctcgtgtgttgcacctgacagcgtctgcagatgaagcagcgacagcaggccttccttgatgagcacggactggtcgcggaaggagtttgcaagatagagatgcctcatctctttaaattcagacacatcgttcacctctgtgatgccagtgtccctgatatcgaggcacatcaagcggcggaggctctgcagagtttcagggagatattccagctgtgttcctcgcaggcctaggtagcgcaggcaaacgaggcaggtgatactggagtgcaagcgggtgagccgagttccctgaagatccaacgtgcgtagaagcttgtacgtccgaccaaatgacagctcaagcttgggaggctccttcctctcggttctgaaatacagcagggagcgcagccgaatgtctttactcatcgcactagacatttcttggacagcttcattgccgtctccatctccatgcacagcgagtacacggtagcggtgcaacagtgctgtctttctgctgaacaagctcgagctgggtctggttcggggtgccgggtgagcggggtcccgtgcaaatctgcagattttctgtgcctcacacatttccagagccagggatcgcatgtgctcgttgaccttgcatttcagcacctcgccatccaagcctgttttcttcaccacgagcagtttgtagtcaatgagtctttgtagcaggttctctgcctcttgctcttggctctgaagtgggctgtcgttcggtgggaagccttctgccgtccagaggcgcacaagcttccgtgcagggatcaatgaattctcagggatttctgatctctctggaaaagccaggcagtacaagaagccgagccggatgtcagcgggcagttgggcatactctgctggtatgagtggatcacgcttcttatctcctattaccaaatcatcaacttggttttcctcgatttccttccatttatcgacgcgattagcaccaagcaacgctcccacggcccgtatgttccacgggttgcctctgcatttcctcaagatgcctttcagagtctccaccattggcgtcaagtcatctccatcgatgttatctgtctctgtcttccccttgagagccttttccagttgatcgtattctcctcctccttgctgcccatcattgtttctatcgacggccacaggagcaggggtgtcatcagcattgcgaaaagctacatgcaccagtagctgctgttggtaagccagttcaagagggcgaatctcaaccttggcatgcaactcttcgtactgtatacgtgtgttcctggtcaggcacacaatcttcccctcccatcctcctaggacatgtcgtaaaacatgcagcgaagatgtatcgtcgacatcatccatcaccatcaagtagcgattgcccacagtccgaaaggtacgctggatctcttcaattatcttcaattcatcaatggcatcgggatacatggagtttgtctcacgctcttcgtgtttcagcacagcccgcagcaagtcactcaaacatctagtttttgacatgtcgaccttggaacgtattttgaaatgattcctgacatcgatgtctttatacacctggttcatgagagtagtcttccctgagagctgctctccactgacaaagatcactggagcagcatctcgcaacaatatattcttcaattcttcaattttttccataaatccaattggtactgtatcttgttcttcacaatgagaatgtggggtgaaaggaaggattgcaggaagccgctccatcacttcttgatgataattttgcacctcagtcggcatctcgttttttcggtctctgatgattttcacaagtttgtcagttgacaacatcccaatagccgacttcatcgcatataaatgtcccacataaacaccacgcattgcgtacatggcgatctgatcttccaagcaagaggcggccttcagggcatcactgatccaggtgtgcaagcgcgacgtttgccaactctgggcattgatccttccagttccagccaagaaaaatgaagccttgttgatgcaattctgtagttcctgtagatcttgtttagccaaggtaatcttgtgtcctcctcctgatctgatgaccctaatatcttcctttagcaaaaggtaccaggacagttctacgagtttgggtaataaggtagaagacggcagcaatgcggcctccatggagcccaaacgaatgtatgccactccctggactattgaaaaaaaaaagagaggcaaagttaaattcccagcatgaaatataattcattttcttttgttgctcctaaatatttcacgtttttgttgtcaccacacatgtaatgaaacaattatcttgaaggggaaaaaatgactataagcaaatctggaaatacagaaaataagtcctgaaaagcaccctagacacatagtttcatatgtgtgtgctgtaattttattagtgacattactatgaaatgatcataattctgttaaacagattttcttatatgcataaaacctgtcaagtatcgctacagctcacctacattgtttacacagacaaagtaagggacacaaagtaggcatatatgttcaacatggaaaagtagttttgtttttctaagcacctgaatttatgtccacaggttagggatgcatttgtgcagagctagtgtaattccctttattgattgtttaattatataaatgcatatagaggaatttcctattaagccattggaagttgaattcttgtatgccactgatgatcatgtgtcatgtgaacttggacccaccatgcatagagactaaaatttggtggcatatatcctttataaattactagctgaatgcccttgcattgcaacaggacattgaaagtaactatcatatattataaatcccaaaaagcgaaaagtcaatccaacggaaagctccaataactccttttctttttttttaaagatcaataccaagttagctacggtttaatttactaatttcagacattggcgagattggttagctgatatcaacactaacaagtgtgattagtaaagtgtgactcaatcattttctttgaaaggaaaacagtagctcttctatgcattaaggatagaaaaaaagtttgcaatattctccaaattaagtttcgctggttctttgaagtgtgattcaatcattcaatggggataccgattggagaaaattgaaggcaattgttttttttttggggggaattgaaggcaattgttgatggtctacgacagtgtgaagcctcttgaaatcatgattggaaggccacacaaatagccgaaaccttaggcacaaaatactgatcttacagtgagagaagaaaagaatgagttcaccatcattttctgaaacaaagatcatagcaattcaaataagacagttttaatcttatctactgccacaaaaccatgctataagtcaagtagccaactaaagttagaaaaaatgttcgtctcaaagctggtagccaataaaagcaggacaccacagtggaagttcatttcaacgcatgtaacagaattaggtccacgaaataaaaaataaacacaccatatatcttctacagaaggtatataccgcaaaagaaataagaataaaaaccacacataggctagcgctaaagcacggccatacaaagagagtgaataaagaactacctgaaatcccccgttctacagttgagaaaatatacagggggaaaagcatagcaagcaacccattccagagaaggaattcatgacactaatctagtaatttactcaggatgacaggccacacgcatatttcgtctacctgactgatttgcatactgtgtaaatggcaaatatagtcgaaacaggaacacagctacccttctatgcgagctaagaaaattagttaaatggggggcataacataaagcagcttgccgtatgcactgaattagtcacactgagcgtatttgatcgattcacattctcattagtcactatccgtaaatccctgcattcctctgaagcggacaaactctctcaagcagaaaaacttggcataaacgagttatgagtgaactagtgttgcctatgaggactcctggatggcgtcaaaatccaacaggctctgacgagcacccatgaaaccctctgattgaacccccccccccccaacccctaaaatcctcacatagatcctacttgccgccacgaaatgcttaatccgtcgcaggtcggcgccgagcttgatggtcgggttggtcatctggggaactcggagtcaatggtgatgcaagtgaaaaatcgaaatccacagggggatagaaagttggaaggtcggggtaaggtagaagctggggggcgcgtaccatgtggttgtcgacgaaggcggacggcggcggtttacttgactccattgctcgccggcggcggcgggcatgccggcgtgatggaggctacttcagcgaatgacagttttgcccctgtctggggaacggggagtgtacagtggcaattccaattataccttttttaaaaaaatcaaaaaaaatatcttcttttttcccctccttcctctctccctcttctcttcctccttcctcatcgccacccttagggcgcttcatcattatcgtcaatatggcggggcggagttcgacggacaaccgacgactctagatctagagggcggccgacgagtgcacactcaagccggcagccatcgcttgcaagctaaggtgatcattgtgcagtgcagtgcacgccccattacagttcaatctcactacctcactggcgtccaggggcgtcaacgtgcatggagacgaccaacaagaagaagatcgatgtcgtcttcaattgccttaaatcgagtaggcaccaagcacactgggcggcatgatcgtgtcggaggataagaagctggagaggatgtgctcgtggccgtggaggtaagctactcggcaactgcttaaccatcgatgccaccatctcctccatcttcgatggttttgcgtgcggtggtggcaaggaggagcttgagctccacagtgattggaggagtacatcctgacaaagcaatgaatcgcaagatcgatctaggatcactacgacgctgtggtgcatgggatacggtatagcgattgaagtgtggaattaatctcgtcaatccctttttcttgtggattggattaattgaacaagctactccatataacggaacgtgatcctcgtgaattcttctatgaggggatgagaaaaacgttaaccctgttagcttaaatggcatgggaacagaaaggcatttccatggaggataatcccatatttccgttaattgcagtctacttcatcccatgatcccatctcaaactaaacgcatggatgagatctaatcctaaaacgtttcagttccatcctacttgttgcagcaactaaaactaccttactactacttccgcttcaccgaggtattgacttttctttctttcttttttttcaaaatcaaattatttaagtttgtgtaactttataggtaaacatagtattattttcaaaagaacaaatgttggattcaatcatactaattttatattagaaatattactactatttttataaatttgattatacttaaataagtttaactttaaaaaaaaagttatgtgaaaacgagaaaatagtacttacaaactatttgctataatatttactttgaggatggagcgactctcgtagcgtaattttaaggagcggagcgatagctccactaaggatattgaaattgtttaattcacgagtcacaacacactatagtaggcctcttcttgtcaaagctgcttgcctttggtgagctcggcaacgatgacttttgtgaggtctcaatagttgctttcttttccttttctatataggtttttgccggtttcccgtttaattaaccgtgcttgttcggtttttgggcccgatttcccttattaactgggccaattcttttcttctataaatttcggcatgagaaactcctactatctgttccttaaagaaaacaagagtgaataagttgtcctagtataaaacaatttctgtgcagagaacaagaaacattgaatgttgctgcctctctctgctcccgttcacacgagaaatgcttaatctctctcctctttcaactagtaaaccttattaagggatgtacttgatgagggtatttctgacttttattactaattttgaattgggaatctagggatcgtgttttataggggcagagggagtatggcattgagggcttgtttagatgccggttaaaattttcgccctattacatcgaatgtttggacacatgtatggattattaaatataaataaaaaaatacctaattacacagattgcgtgtaaattgcaagacaaatcttaagcctaattgctccatgatttgacaatgtggtgttacagtaaatatttgctaatgacggatcaataaggcttaataaattcgtctcgcagtttacagacgaattctataatttgttttgttattagtttacgtttaatactttaaatatgtgtatgtatacataaaaaaaaattagccaaacaactaaacatggcctatattaagtagtgtttggatccagagacttaactttagtctctttatttagacactaattatttagacactaatttagagtattaaatatagactacttacaaaactaattatataaatgaaagctatttcacgagacaaatttgttaagcctaattagtctataattagataatgtttactgtagcatcacataggctaaggggtgcagg

SEQ ID NO: 5434 - DNA, 18822 bp, Oryza sativa
gaccaaacacgacctgtttaatgctgcagacccccatccaaagaattttataacggcattgtggatgcccttaatctataaaggaggctccagtccaacagatagagggttctaactcttagcagctagcactcttgcaagattctcatctcattgtaactcattctcaatcgctcatagtccatatacagaagtaggtagtattacatatctatgtagcatgaacatgtataattcctcgtgttcattactctgggattgggacctggactcaaattgccaaatctccaagggagagtatatacacttccccgctagagaagtttcacactatgataaatgtaattgcattctctatttggttagcaaataataatagggagtagtctagaaccaactaatatacatcttcacatgtcccagtcgtgacaaactttggaggcatctatctagacgggtatatgagccttttccctcttttataaaagtgaaaaagtttgtttgcaaatgcactaataaccatctactagctagcactagtcgggacgggttgatatacagagaaggcatatagtagcttggtagccgacatgatcatccaggtccgagaaaatgataaaaaggataagctgctttagtttgctgcacgagctaaggagagctagctagcactcggcggccacacaagccacatctatccatgaaatgacagcaccaagctagccatgtgtgatatgtgcgcatcttactaatttggtaaggtgtgattgactgagattgccgtatactccctccgtcacattttttaattgaagttgtgggtttatatatctaatgtttgaccattcaatttatttaaaaattttataaaaaattataaaaataagtcacacataaactactattcatgttttcttatctaataatgataaatataataattataaatttttttaaataagacgaacggttaaatgttagacatggaaactcccaattgcacttaaaatgggatgaagggagtagatatgtgtgctaatttccataattaagacaagtgatgattaaattaactttgttttgactctggatgcatactatatatgctacaacagatttttttaattagaaaatgataaacataattgggagttactttgtgcactactctggtccaaaacaaaaatctgtctttaggttttctagcagaaattaatgttaagagaaaagtattggcaatctatattctatgatgctgtgtttgggagaaggagaaaggaggagaatgggaagatacgcaaaacgaggtgagctattagggtatgattaattgagtattaactatttaaaacttcaaaaattaatggattaatatgattttttaaagaaactttccatagaaaatttttgcaaaaaacacatcgttttagcagttcgggaagcgtgcgcgtggataacgagggcaatgtcctctttctcacaatccctcaaacgcataagtttgttctaattcaacgatttctattgacactgttcacttctataatatatataccggagactatcaattgtcctataatatgtcatccgactagtatttttttttaatttttttatccaaaataccttaaagaaatacaagattaacaatcgattgatttatacccttagaagtttcaatttttttatgtaacatccttacataacatagatatttgtatataagttttaagtttttttggggagtttttatccttttaaaagtttttggggtatatgagagcgaaattgctcacacaaaatataatagcacaaaaatattatgtgcagcatatgaaagattatttgcattagaaagagcacggcaaaaaaaaattctatatagcatataacagataaattatattaaaaaaataaaatgcataaatcttcaaatttatacataaactttcgtatatattgtgtaatataaaaaaagactaaaaaatcataactttttctaatctttggataggataaatcaattatgaaacttgtatgcctatataagagtattttagagcaaatgtaaatgctggaattgtttatattttaggactgataaatggagtaattaacaaaaattaactgacccagaggcacaagacaagtgcttaacatttttctcatttgtgaaaaacatacatgctatttgttaattccacaccggcctaactatttcttttccagtatgcaacccttggtagttgcatgcatatacagcagcttcgatatgatcagctgcttgcatgattatatgcatacgcgcatgcacgcttgcattgtgcaatatcattacatccgtacgtagatgaagcacgtcatggagaaaaatatataagcttatttatacagtcaaactaatcatgctctacctctagatcattattagctaggtcaagtccatcactaaatagtaattaattattaataaaagctaagctaaattacatatactagctgcttgcatgttgtatatgtgttttgcacgcatcaaattgttaatggttatactgatcattagctagctttaggacgcaaattaaactaagatagttaggatacttagctacgtagctggtggacacaactaccgtacagagtggcccttgcaactgcaaatgcaatcactgtcctggctagctaagcaaatcagaagggttgttcactaagctaatcccctacgtgctgcttttcaatctttcatacagggaaaaaagacagctagcatatatgtacagaaaaggacagaatttttaatatagtggcatgtgtatgattaattttacttaattacagtagtactgtgtgtccttcccttagtaccactactccattcgttacaaaatataaggatttctatgtgttttcaaaacatatctagacaaaaagatatacatatacatttttaaaagatgtgcagaaattattttgtagtagatgtagtaatatctctactattataaaaattgaatatgttttttcggtattttggtacattattcgtgtatgagtcggttatttaagttcgtttgcttttgaaaatactatccgtatttgatctgtttaaaaaaactcgcatgctaacttgagacgatcggacttctaactacagctcatgattttctaaaaatatatatatccaagcgaactctcacagtaaattttatcgtaactaaaccatataacaataataagattaaaatagagttcacccgttgcaacgcacgggtatttttttctagtttagaataaaatttagaaaactgtaattacttggataaaacttcactttactataattttaactttgtagtacaccacaagattataacaataacaaacgattttgtcagaaattaaactgtaactttatctcatatgtgtgtatgatatgtgaatctaatataaaacggtatgagcattgcaaatatatatatgacaggtggacccaacatcgtaagacactctctgttaatattttagtacacggttgttgcatcagcaagggccaaagggcacctcctgaaccacacaaatgctagagtttttttacccacgccatccatacatgagcacacgtgaaatatatgcacggtaggaatttctctaatgtatgtttgtaacaattttagagataaatttaagttcaataaattttacaaagaaatacgtgaaccgtaggcataaatgaataaccatgtctctatcctttggagcgactaaaattgcaccgaaattcttcggcgaagaaagtgaaactaaaggcatatatttcctcctctgttactttatttttttaaagtccctttcatttataaaaaataagtttatttttaaagtaatcattgcattataggttgtgaaagtagtgaataattatattggaaatagataaaagcgaggaatagttacatacttaatttaataaagtaggaatattttattttttttaattttgtattggaatacgtgatatatgcgaaaaataagatttattttgagacggatgaagagtgataaaggtgaggacacccagaatgcaaaagcaaacattgcatttttccatcaacagcgacgcaaaacggcacgagggcaaacgaaagcattggaaattggaaaggatcggatcggatcggatcagccgctgggattgcgagacttgtgtcctcctgtccactgggtgatattgattcaagtgacacctgcgtcttgttctgccgctgtcatcctctcgtctgcttttgccgacacacatgcttaattgggctgattaattaacccctctcgtctcttttgccgacaccatattaacctcacggctagcttgtcatccaacaaagaacaacctgtcaagattttaaatctcgactatagcagtaactattttcgaagatatctaattgagtagtgtctagctatttgttcttataaaagcaagtttaataggagagcttactaccagctactctctccgtcctaaaataagtgcagttttatactgttcatgttcaacgtttaaccgtttatcttatttgaaaatttttatgattagtatttttatttttattagatgataaaatatgaatagtattttatatgtgactatttttattattattttttataattatttttaaataagaagaacggttaaacgttagacacggatatcaacggctacatttatttttgggacggaggtagtattagcttatttaaaagccaacatatataatagattagctatttgtctttatagagtactcaattttatctgctattagtcactataattttatttagcctgctatgagttatttgagaggacctaccgttaatatatatcttagtccgttatctaaaaaacttaagtcatgagaatttcgaaccaattcggtatatatgtaggagaattaattgatcctgcctgctaataatgtctaatagtagctagtacgaaacagtgatgatcagatatatatatatatatatatatatatatatatatatatatatatatatatatatatatatatatatatctgataatatacagcagcatatcgctctttgtcaaagacagatcgcgcaacatgtgcttttaatccggtatattagctgagagcattcagcatttcgatctcttttctcaagtggtgtcatctcatgctggccactgcaataattcacttaaaataactgaaatggttgtttttatgcttatcaatctcaattagaaatgggtcatggtcatggattatttgttcaatctcctttattcggaaaaaagtgtattcatcctcgagaggatatcttctcatttatttacatgttacttgaatagctattaattttcttttaaaaaataacaagataaatttgtataagatatatatcactatgcaaacatgtaagtgacttctatagaaaacaaatatatataactccctgtaagtgactcatagctactccctctatttcatattataaatcgtttgaccttcttttagtcaaagttctttatacttgatcaaatttatagaaaaaatagcaaaatctacaacaccaaattagtttcattaaattcagtattaaatattaaatatattttgataatacatttattttatatttaaatgttactatatttttctataaatttgaataaacttaaagatgtttgactaagaaaaatagttaaacgacttataatatgaaacggagggagtactattttaattccaactctcaaatgcatgctacagtactacttaattaacccaatccacagttaaagacggcgagaaaaatatcgatcggatgtgcaaatttgggtatgaagattacgcatccacgacataggtaggcgacgtgattcgatcaccgattccggcacgtacgaacagttgcgagtgacgcctagtgcatcacgcattcgctatcgccagatggatgtgatttctctgcgctacggtgttttgcaccaagagatcagtggtaagattctggcaagatttgttggaaagctcccactttgtccatccgaattggctgacattgaggtgatttgggcctaacctttttctgctagatacttgggggtttatgctccagggagttgataccaacatgtagtgtcaagatgcacttgatagtgcagtgttaagggatatatggttttaaccccgtgatcctgtgttcaatctctaacacgctcacaatttcttcttaaaaaatgtttggagggacgtcttttcgtctaaatctggtttttccaacatgtcgtgtccattttaattttcttttctgccccacttcttccttgtggaaaattctcaagctaggagtgaactgaacttgtgccttagctatggggaatccagttaattttatggccctcacaacttccattttaattttcctttctgccccacttcttccatgtggaaaattctccagctagtactgaactgaatttgtgccttaagagcaagtttaattgtgtaaccaactactagctccaattcatctatagccaatctcgatagctcattcatataatagttacatactacaatattaatatctggtcccacctgtcatacacactgttttggagtccgtgctacagctggctataaatctatagcccgctgcccttctctctccttatttatcttcttaaaatatgtttatagctggcttatagcctgctattgtaactgctctaattagctatggggaatccggtttaatttgatggcctcacaacttacaaatgtgctttagttttggtgaaattaattttaggttgaggtagctagccaattaatgtcgtcgttgatttggtcagagatacatgactgattaaaccatggttgttctggcgtagacgctgggctaactgatctgtgatcgtccttttagctagtttcgttcttttttctccctgtagtaaattttggcagaatagcgaggaaacggcaagtgttttgggttcatcctccgtcgcctaattagccgtaaatgcgagcactcgtatcaaatatttagaatttaaatctggatgggttagttccactaaaagaaacctaaccagttgagacactttcacttcacatctaattattgatgtgatatagtagttagcatgatacaattcagtttggattagatgtgacccaggaagcacaacgtcatgccactgcttcgaccaaccagtatttttattaaagctatgttagataagccatggaaagaaaaacaaacgaaacaaacaaaaataatttatgttcaaaacaaagctaatactgaaaaatgactggtaaaaaggaactaaaaaattaaattcaaacaaaagatatagaagttaaattttttttattgggccgataaactaatgaacagaggagacgaggggagatattacattcctgttgcttttttgtttgtaaaaataattccctctctgtcaatagcttggtatggtagcgtcacacaagacaacaacctcacctgggccggttgacatgtttggcaggctcagctcggctcatcggagatgcggcccgatctgtgtcaacaaggcctctgcacacgctgatgggccaggccgaacaaactactccctccgttttaaaatataagactttctatcattacccacatacacagagatattaatgaatctaaacacatacatgtgtctaaattcattaacatctaaataaatgtagacaatactaaaaagtcttacattgtgaaacggacgaagtaagaaataagttcgctttagatctctcaatttgtcggccagattgattttcgtccctaaactgaaaaccagatataacccgtccgccaacttacaaaaccagtgcaaacgatgtcctaatgtggtttggacggtggttttagctgatatggcgcctatgtggctagtttgacttagtcatcttcttacatgacgttgacgtggcattagaagctagaattaaaaatttaaaaagtaaaaacaaaataggtgggttccacctggtactcaaataaaaagctaaaacagtgggacccacatgtcagtgggtcaaccccctctcatccctcttctctcccccttcctctgctcgagtgctccatcaccgcccacttttgccggtgcctggatcggctcatcgccatcgtcaagacccccacgaggaagaggagatcgcggatgcagattctgcccaccggcgcgatgggctgcggctctcgatgcgaggcagataggtgtcgccggccgtcgtcctctcctcgatttgcagccaccagatttcgcgaatagtagtagcatttttctaatacggcaaaataattgcattggcatggatccaattgggttctaacccacaaaccaaagtaccaaaccactaacctttcagaagaatccagtatttcacattttcacagttccacacgaaagcaacccaacgaattggctgtcacacgaaatctacaattgcaacgactgtgccccagaatggagcaattaatcaatgaacgaacaattgcagttgacaggatggcacaatgttttcaatcaacggtcttgatgaaactcattgacagaccgagttgcacgacaaactgaaagccaatctcttcatttggcagcaattggtgacgaggggcgtcgtcggatcttcaggtagccgaatttggcagcgcctggggatgatccatcgaataggattggtaggtagccagttgctgccttgtacctttgctgaatctgcaaatgtccaaggcaaagcataaagctaatatctctcgcatgatacaaaaagaaactagtgcaagagtgtaacacttaattctgatgttagagttgttttccagacgtaacgtagaacatctcttattactgattatgatcgtagaactggaattccgaacatacctcgatgatctcctcactgcttttgaggcagtttttccccatgacgcaaactgagcctccggaacctcctccggtaatcttagcaccaaatagactaggactttcaccttttgacatatttctgtgctgcatttcttgtaccagattaactagcagatcagtcccatcagaaccaagaccacatgcattatagctgtagtggcactgccaacagtatgggatgaaaaacatgtcagcaatatacaacaaatgtcatcaactgtacgtttagatggtcaatcttatggtcaaataagagtacacgatacacaaagtagtggagatgctcaaattcacctggtacataagttctccaagggctgacaattgctcatcggtattagctgcttctaagagtgctttgaaggtctatatgccacaaattaaaacaaagttaataatacaatcaacattttgttggacacgtttcagacccctttttctaagtaaaatgttctgtaattttgatggtaaaaagcacagagcatgtcaacaatatcaccgcagcatgtttccaaaaagagtaaattcaaacaacaaaaagcttcataagggttcccaccatacaaatgtattgctgcctctcagtttcaggaaaagaaaaacaactgcatcaaaagcaaatagtccaaatggagagatctaacctcaactcgaaagttctcatatatgggatgcctagtaggagccttcacattgtaagatcttttagggtcaattgctgttactgtatcatcgtgatctccatatttcttcaaaaatgcatctccagtaatgacctctggaatatcttttgcataaatagcttcatatctgaaattgagatgtaactgtaagatatcattatccgcgcaatacctgaaacgatgtgtgttttggtgaacactatgataagagtgaacctgtgaggtggtatgttgcacaaatactccagggaagcttcggatttcagtagttctatggcattttgtttatagtcattagattgaacaggagcatcagaaactgaggattctgaagctaagtcggatgctgcacacttgatcatttttcgtcccatgtaagtgcctacccttacagatccgtaatctcccccaccaacactaccaattcaagcaatagtagaatactgcaattagctccaattcttgcaatcacaaaagttcagccttgataaattgataacaaaaggcccggtctggaaaattttctacctatgccgtatccctgagtccagaccccaaaaccgcatatgattaggaatggcaaccaattccttcacttctgcaggctgcagcaaaactgcgatcaaacaaatacagaagcaacattgtttttttcactgggttaaagatttgatctaccttgcaatgaatattgaacgctactaacctggcaaaccatcgcaaggagtttgttagcttctccacaagcagatgtcatttggtccattactccacatggagctccgacaacatgattctcaacctgaaagaccataggcccataaacgttaaggacttaatgagttgtattttaccaccaaacatttcttaagaccataccttctgacaaagcaaagcgaggtcccttggagcaatgtttagacctacataccagagcaaaaaataccaaggatgctatttagtacatgaaacagtgtttagttaaatatatttcagaattacacagaattggttataagccctaagttaactcattgtctactctatcccgaaaagagaaaaagaaagtagtggaaaagtaactactgtcaattctacaaaccataggcagctgcaatagcagccatagttgcaacctccactgatgcagaagaagaaacacctttgccttctggcacatcagacgaaacctgagtttcagtgcataacaaaagtaatcactattggccaaaatatcattgtcgcatatgggcaaaaagaaaaaggaggaaatgtatgtctgtgcatttgtcattctacttgaatccctaaaagagagtttagaaaataatttccctagaccaaaaaaaaaaaggaaaatcacacatgcacaataagggaagacaaaaaagtgaagcttaggtgtaccagaatgctcatgctgtcagtgaacttcacatctagctcagtcatcaacactagaattgttccagcgacataagcagcccatctgaaacaggatggagttaacaaacatgtcaacacagttgagcagtttaagcttctgtggggaatagaagacatttacttctgggatgggttgcgacaaaaaaattctctggctttctcgtaggatattggtttgtcgacatccattaaatctgacaatttcatatcaaaagttggtgaacggttactcaattcagacccaaatgatacctgtgagagagtttattggtagtaagcaccatatgaatttcataattgagatcttttttctcatgtaagaattagccaggacaagcattttcagcatataactaatatgcagtatccacgttcactgaggattaataaaaaaatatatttggatgattgagtagaacatactatttgtaccacaggttccatgcctccgttctcaagccgtcttgcctgtgtattttcccatagcttctgattgcttgggtggttcctctgtacagcaacatgacaggcttcccgaaggggcagctagtaattgcaccaaaacttttaattacaactgactaaaacagaagatgtattgttgtgatgccattagatggttcatttgctaatacaccatccaccagtgccaagcaatgcttttggatcaaacaaggagaatcacaaaaaatgggacttatacatcccaattattaattatttaaaagtcggggggggggggtcaagggagaataaaatcgcctaacttaaagatcaagtacagaaatatgatttttcacctgcaattgagcatacctgcaagactagacttcctgaatagtcaccaatgccacccatgacatctaaacgaccaggtgcccttgctatatacatttcctcctgaaatggaaccacgcaaaaaacaaataagggattatgattactcagtcatttattaagcattttgaatgacttccttcaattgttagaacaaaaggttaacaagaataattgattaatcagttatcaaagctcagtttcgataagagttgagaaaaagaaagatcggttaaagaaacaattcaatggccaaaaaaaagagagagctgtttggacatgttctgcaccatgtaatagatatggaaattacatgatacaaatcgtggtcaacaatgccaatcacaaaaaggatctgcaaactgtattatcttaaatgtttcccttgaattatatttcgtaagaaagcatgaaactaacatatggtgaattgacatgtgaaactcacaaggaccatgtatactacatcaaaatgagatacgatttactttgatcaaactaatatagtagcttagtgaaacttaaaatgaaacatcacaggatcattgttgatatattttgtgcatttaggaagttattagcttattatctgattgtacattgttgcacctttatgcactcttgcaacagctacactctagacatgctacatgaacagaagaagcaaaatttggtgcatgtggtagtatagtttagcagtaaaatgaatacagggaattccaagtacctcccagtcaaagagcacagatgcagcaattctctcttgaggttgcttcccattactctttaactcactttgattaaattcagataagctcttcaaaaaggacatggtgtctggtaatccttgcagatccccatgaagtatctcaaagtcttcaaaacatctaccagagttaaacttgttatgtcagtaacgaagtctattgttcaacaactacccaaatatgaaaagagagggcatttaactcacgattcggtgctttcttttgttttaatattttctgagattggacaggcaccaacttctgtctcggaaagagaataccagtcaggaatcgctacatctctccctggagccctttgtaattgataccctaacactatggcgtcttgcaatcgtcttgctccattgaactataattacaaataggatatgttgattggctcagatgattgtacaacagggtttccaaaacagatctaatttttttgacaatttaaaagaaggaaacagaagttcccagttcaatgaatgctggttttacatagcatggagcatagaaagtttcaaaagaagcttactgtcctctaacctccctgagaaaagttttccacatgaagtgtaaaaactaaagagctcaggatgaaaacaggcatatgagcaaaaaggtagacatggaaatccaaccctgttgtaactcactttgtcagaaatacacttcttcccaacagcagtgtcctcgaggattcgtgcagccacctgaatggacaagcattagtttatcattacaaataatacttatacggaatacaatcgatttagtgactatgcatctatccttctcattttggtctagataaatgagtattgcttttatcttatcacatctgattctgaacaaaaaaacaaaataaaatgttgttgcattaaccacataaatattgtgaattttggccagtttgcatgaaattatgcaataacctgggaaatcagttgcaaaattacctcaccaccatttgttggaccatcatagcatggttgaagtgtgagagcacggagtagataaggtttccagtgcccatgaaggaagtcccttctggtcatttcaatactgctctggtagtgctgaaatagaatgggacatggcggcatttttagcatagctgtacataagttattcctagcataacttgatgattagaaatgattcaacctcaagtaaattccgcaaaaatggctcttcattaaaataatctctgcggacaaagataaatggcagcttgtaggccaaagcctcacttgcagttccatatccaattttccctatagggtagtgagagtaagcagtgcatagcaaaatatagaaaatatggactagtattaaaaaatgaatatatcatgttttaccaagcatgcagtcagatgctgccatagcatcaggtgtgtaagcatcttttgcaagcttaatgaagtttggaggaacctcttgagaatcagatgcaccgcagacctttcatgaagacagtgctaagttttagacaaccacaccgggcagatgctttacttatttaaaggatagaaatccagtataaaaatctataccaaacagatccagccatcaggcagccattcttgcttcaggttccatcctgctggctggggacaatagtacattaataatttcgttttatttgtgatcatacttctttaactcaaataaaaacataggagcattcagtaatgaagtcaagattgggagctttcaacaaagcatataatatgaaacatgctgttaaaacagtactacagtgcaatcatggttttttttttctgttgcgggaacatcacgcgatgatatatctagatactagctaaaggcaacatagattcaaaaaaaaagcacaagatttatttcaggataatttaaaacacagagttatataaaacaatatcaaagggggaaaacagaaacatatcacctaagcttatgaaatttaaccatagggaacgcccacctgtcccccaaaattaaaaaccaccaccttcgcattttctgctattccaagttccttcctcacctaatagatcaaaaaagggaactgtaaattaagaaagcagaatgttgttcaagcccatggagcatcattcatcagtagaatcacacaaacctctgatctagatttgcgtagccctcttaccacaagaggcacatcagtgacatcacggaaagccggcactatggatttaaggaaaactcattttttaaaaaaattaaaactgagaaatgaaatactgacaattttgtccgttcgaaatatgaacattttaaagaaagaataggaaaaacacaaatgaacatactagggcagtatccaggtagtcgaagtaagatatcacaatgagaataatcctccgctatctgcaaaatattgagtagatagttggatattgagcaggtaatcgtatctgcacatggaaaagggagattgctaaaggagacaatagtgcagataacctaaaggccagaatttgaccactctcaacaggaaagggtaatgagctgatgtgggaaaaaaacaaacctgccaaacaatagaacggtgatgatcgccagatgccacaatatattctgcatatatgtagtcccaactgcagattgcacatatagtgaaacaatagcgtattatcagtgttgcttgattccgcaatgctaaagtatgcatccttatactatgatatgcaattctatttggcattctaaagtttggcaagacatggaactgaacatgaggtagagataagttgtgatgtgccaactgattcattcaaaacagatgaagtaaagcggggaagagacataaccccacctaaaattcccaatgcagaccgaggggataccaacatctgcagccaccctgcaggccacaggaacaacatccgagatctgcaggccccaaaagcaacaacagcacccacattcacttcagtccaagtaaatttcactcttaacaagtaacatccccctcctaaaaatagcaaaatgcatcgcaatgagacaagagcaatccagaagtagtagtaccactaggtctgcgttgatggaggtgagccactccgcctcggtcctcaaaatcgactcgcggggcaccacggccgtctcatgatactgcattccacagcaattcaggcaaaaataggtggaaaatgaagagagaagcagcagcgtggaaagcgaggagggcgtgggtgaaaaccttgaggagggaggcgagggggtcgacggtgagggcgtcggtctggacggcgccgcagtcgaggatggccctgcggatgtggaggaggccctgggaggacggggagcgcggcagctcggcggtgaagacgaactccggcaccgccgtggccacgtgcacctcgtgccccgccgcgatcaggtgccgcaccacctgcgatgggaagcgaacgctactgaactgctccagtgaacacgaagcgcagcagcagcaaacggagtacctcgatggcgcgggtggcgtggccgaagccgtggccggtgaggtagaaggcgaagacgaggcggcggtgcggcggcggcggcgcgtgggcggcgtctccggcgggtggcatggtgtggtggcggaagggaaggaagcttttggatcggaaagggaagaaaaatggatgggatcccgtagcgttggtggttgcgcctttttgctctcgttttggagggacgcttgcttcaactgccaccactccgactattcgcctctcataacagtccactccccctgtctctctctatctctctccccaataatacgtactccccgttttattttaaattcagttatagattactatgcttaacatttgattgtctattttatttaaaaaatttaaaaaaataagtcgtacataaagtactattcatattttatcattcaataataataataataataataataataataataataataccatattaaacacagaaactaataactacacttaacatgggatgatggagtaccaatttttacataaattaataaagtactaaaataacttggggcataaaaaaaagatattcccttcatttcactatgtagcaatttaggacgagattagacccagacttatcctagatttatgaatctagacatacctgtgattagattcatgatatggtatgtttatattcatagtcggatccatagtagattggtatatattgggacgagaggagtaataggtcgagggataaaataggaaatagttaacatatgggaaaataaactagtacacaaattaatagataagaaataaaaatatgtctcgagattataaaaccccatatatcatgaaacaaattagaatgtcaaaatcacttaccctatattatactacctcacctcatctcacctctcttgttcttctctaatttttttccaactacatgattacatccctctcacactattgtgtctttcgttttcttaacaagagaaaaatatctcacgactgctgactattattacacattcattaataataagaaaaggacgcgactacaccgagagtgctagctggatagtactaaagagagacacacttctttaaaaaaaaaagctactagtacactcaatatctatgtattttttttctttcttagagaagtttctcttaaattacttatccgatttataatccgattacaccgttgtgttcattgcaattaaatatttacaacaagatctcacataattatattttgatgaaaaattacaaattacttttatgatatgtctaaattacttttagatttcattaagttactttttaaattataaaagtaaattctgtaagtctaaaagtaatttatatatatattatagaagtaacttagaacaaaacgaatgtaactttggcatgtcatttgaagtaaatccgttgtagagataaaaatatgactctatctagaaattaaattaatcagcacaaattatggaattaactaaaaagtcatattttatccctacaacgaatttacttctaatgtcgtgacaaagttacttccgttttgttttaagttacttttagaatatatgtaaattacttttagactttattgaatttacttttatatgtctaagaattaatttagtcaaatctaaatgtaacttatatatatatatatatatatatatatatatatatatatatatatatatatatgataaaagtaacttatgtatataataaaagtaatttacaaatataaatattttttcatcgtaacataatcatgtaagatcttgttgtgaagatctaattataacgaacacaatggtgtaatcggattgtagatcggataagtaatttgagatgaaactttatttgaataggaaaaatacacccacgtgaactttatttgaaaggaaaagacacccacgtggatggacatcatgacgacgtgcacagttagacagctctgagatgcgtcacgctatagagctaaaccgagagcgctcttgaaatagatttcgcgataaaaaaattatgtttaactctctgcatctcaatcaaaaataaaacagaacaaaaataactatttgggcccccttgcaggcctgatctttgaggaataagttcactttgggtctctctatttgtcgcccagtccaatttttcatcccttgaccgcaaaaccaggtacgacccgtcccccaacttacgaaaaccgggcaaacgaggtccctcggcggttttgatagcggttttggttgacgtggcgcctacgtggctaatttgacccggtttttatctgacatggcactgacgtgacgcttacgtgacaattcgatatggaaaaataataaagaccgtgggacccatatgtcatcttcacacacaaaataataaaaaatggtgggacccacgtgggtcccacatgccatattcaccccatcatcttcttcctccctctccatctgtctcctctcctctctccagcctctaggcgccatgacccacggggtcacggggaggtccggcggtggcggccgcccaccccgacgagttccacctactccccccaccgc

SEQ ID NO: 5435 - DNA, 41459 bp, Oryza sativa
  unsure (1)..(41459): unsure at all n locations
agggagaaaacgggagccgtgccactcctctccctcaccgccttgccacgccgcgccgcacgctactcttctagccgacgagctcgccgtcacgccgacctcctcctctctcgccgccgccgttgcaccgactgactcctctcctcctctctcgccgctgccgtcgcgccgaccacctcctctcccgccaccgccgttgcaccggccacctcgcgccggccacctctctccccctcccctacagcccccgctccgtcgccagccacctctctctcgtctgccgccgcgcctgctcaagagaatcaggagagaagagaagagaaaaaagaaaagaaaggagaaatgtgaggcccacactattttctctcacttacatgtgggccccatatgtttatttatttatttttgctgactaggatgccacgttagcgaaatactgtctcgggaccttttttcgacggttttacatagtttaggggtacacattctggtattgcggttaggggacctcaaacagactcggcgtaaagtgagggacgtccggtgaacttattccagtgcgaaatactggagacaatttcaacggatgcatcgtaaggccggccagcccagtccaatatcctctactaccctattctgggcctctatttctcttgcgtgtgggaagtgggctcgttttgacgggccactcgctgacgcgagctttctcctacgaaatcaggcccaaaacagagtgccctgcccttgccactgtctactaaactctcagatcgatgacacgacaacggctgcaggtcacgccaacggcaataagaagatgcaaatgaatttatttgagttgctatctcagatttgtgttaagttggagagagaagagaaaaaaatatcatatatatgtaaccagatatagcagactataataaaataatttaataatatagcattagctagacattaatcatgtactacgtttctatatccacctactaaaaaagcaattaaattggttgtaaatgatatgataatagatatattaagacatatctaatgaaaattaattatcaaataagtgaaaacccgttaaaaacgaaacctataagttttgtaaattcataaaaaaaattttaccagagataagtatagacatgaattacattactgccaaatcttcaaatctcaaagtccaaacttaaatttatctctctcttttttacctaaaatttgtctcttttttacctaagatgtggccttttgtcgccattggtttgtaatgaccttggatgggatgagatccatcctaaaataacgaatctacacatatctcatatgtctagattcgttatcgtatggtaaatcttatcgtatcctgttactacattctcgaacgaagggagtatataattaattagctaagctagctaggagtacctccgtagcattcatcctagcaagtgtagtgtgtcatccagcatgtgcaacgacattggctggccactataccttgaaccaacctacctagttagctgggcacgatcagcaacggttatggcagtttatgtatgcaatgcgcggcgcatttcttggtcgttgcagtccaattagtttataatgccttcagctaatataactcaatttgatccctccccgttggagttggacacaagaaactgcatcatctgcaactctgcaagcatgcatgttctgtatttacaccatcgtgtaaacatatactatctccatcccagaatgtaaaatatttttaaagcaggcacagatattaaaaaagtaggtagagataattgaatgagggttatcaatcatacattttcattttgatacggatgtagtacctttgcttctttaaaagataagagcaaaagttactagtaatttactactccatccgtcccattttaagtccagctatgagtttctgtgtctaccatttgatcgtccgcctcatttgaatttttttataattagtatttttattgttattagatgataaaatatgaatagtactttatgtgtgttttttaaaacttttttataaatttttaaataaaacaaatgattaaatgttggacacagaaatacacaactacacttcaaattggacggaggagtactgatgggcagaagttcagcagcgtatctgcagttagatatcctcggttgccgttctctgaaactactgtgaatgcatgcaagcaagcatgcctgtccaaaatgttcagtttggtccctactctgctgctttgatctgctcgaccaccgattcctgatggttgatgctgccgttatcccgcactagctagctacattcacaagctacagcattacatcaacggccggcgcggttaatatgtcgtcctaaattgtaataacttttagtatttaaaatttatccggagtatacaatttctgttactctcatatctcagctaatcgcaacaatatctcatttagtttcttcagctatatatatacccatatcaatcgatcacagccatttttcatttaattccatatatacttccttagcttccgtttatattccgagatagaggaatagatagatggatactctgtagatagcactactgtcctaaatgctagtacatctatcttatctgcaattccagctacaggacagtggtttgctagctcatcttaagaagaaccagagtaaagggggggggccttactggcagggccttattttttccgagagaatgggggttttcatttaaaaatggctagcttgctgctggctgttcaagcataacaaactggtggtctgggccgtacttcataccaaaacagaaatgcagaagtgacctgacaaaattttgttgcaatttgacttcacatgatcgatcacagatgcccttgctagttgctacaaacctccatgatcgcttcacatgcgcatgcaggtagcttcttccaacaagaaaatttggtgtattatattgtgcatgatccatggttaaaaattaattaaggtttcagatttgtgttcagagatattaacaaattactccactccagtagtgtagtggtgatctgcatcggttcttgattattgttgggctgcgagaaagggaatcttttctttgatcgtacgacaacaatccaaaccgtaccaatctattgtagttaactgtaattaatttgattaagctagcacggcgagcagatcgagcttgaccaactacgtacaacacaatcttcagcttcttgccaccttaactgaaagggaagaaataactaatcgccactacttcgtcagttgcctctgccctttgaaatttcggttcttcctaactcccaggtctgacctcgagtcaagaactcaagattaattacaatgtgtttgaatccaaccgttgacgcttgatgatggatgtttgcaaattttatttgggagcaggacttgatcagaattcagaactgaagattgttcatttttttcagaagaagatgaaccatgagaactctgacgaactaaatcactacctggctagaacataatgaagtccaatttattcattacaatgtcagctacttgaatagttattggaacggattatttattccatgtgtataaaaaatattttttagaaaaactatcttctattgcattatttataccactagcttgtttcaaactatttattaagtttattttttaaaatatttaaattatcgatatgataaagtggataatttgctcaataatctaaatcaaacaggtttaaactatggatacaaaagaaagcaaagtacaaaaatgagatattcaatgtctacactctacataattgtactgaaacgtgcatgcaacttattacaattgcagtttatattctacctagagcaccaggacatactgacttagtccctttcaatccatgatccggccatcttcttgcacaatgattagagaacaaaatcaagcatatggtagttcaagatatactaattgggttttaggtgctgatcgattgctcatttgggtcctcctgctcatgattagcatggtggaggaatctttcagcaacttggattgtacctgtaaccttcagaaaacaattattttgtattcacatgaaaactataacgatacatagaagaatgtgaagtctaactggttgatacaattagggaatcttgcattaaatattttcacacttgatcaacccattttattgaattattcaacacaattcatgttaagaaactttaaaagttcaggtatgatcagaactaattaatcatattattatgcatcagaggcatcttaatttgcagtgcttccattgttcttttcttttgcttagaaagtagtaggacatatttttattgatgataccatgtgaagcctcctcacatgcttgcaagcatgcaactccctccacactagtcaggcctgccatgttctccccatgcacacaatttgaaactgagaaaaaagaaagttagaagccttgaaccaagatcaagtaagaacataggcactagtcagagaaaagtacaccaactttttattatatgaatctaccgatgcaatccaaatggcaagttgagagcctcaaaaacaaactttgtttttgtttgtgatatgcaggctaactgactgaaaaccactgagcattttgttttggttcccaatgtttttcagtttgcttgagcagttcgtttggcgtttcattagttggatacacgtaaggtagatgattctctgaattcaggtcttacttttaagttccatacttacagccaaattgatgctgatcaggtacatacagatttgtagatttatcatttatgctgctctactaattcaaaatgatacttcagagaaatggtgctttttttttttgaggggtagagaaatggtgcttgatcaggggaaatatgctgtttgttcaaatgcaaagaagcatctagctagtccttgataccatacagtaaaactataaaagtgacatctgcagcaatttcactctgctctcttcacactaggaaaaagttcaggagttgtctggttcattgaacagaaaaaatctatcatcgttgtatagcaataataggagttcttgagcaattgccttcacccatacaccacagaaaccaaggcaaaaatattcattttctttatccaccaccaactctgcatttctttctgaactgtaaacaaaagcccatgaattttccacatcacaaccagcaaatgagtgatcttgtacttgagagaatcaattgccatacccacaatcttgactgactgaccatgataggacaacacccatagaacattcagcttaaattctactcaatctgtcacaaaatataagagattttgaatgaaagggatgcaatctagtcctataaatctagatagagaatatatccatattcttagtgctagaatatgtcgcatccatccaaaatttcttatatagttatattttaagatggaggaagtattagtaagtactaggtaccaagataattgagtatttgaatgcagtaaatctgtcaatatgttcagatggggtagcatttctctttcagttttcaccaatcaccttgacccacatcatgtatgcttcagttatagtgatcccgtagtatcaatgtacttcctccgttattaaatataagcatttttcggttgattactaaatgttaatattaagggaaaagatttattttcaatcacctggttggtcaaattttaaactgcttgaattcctctcctaatcatctgattggctgaaaatactttggttcccacacattgaaatcttataatttgcgaacgaagggagtagtaaaattataagagtaaaagaaaaaaaaacaccttttcatttgtgcagttggaaacagatcctctgcagtaatgccctatgacttcaagtgattgacatatggaccccacacgggttgggcccatatatcagtgacacaagtatgtactgcagaggagattcatctttgtggagatctgccgtactgtaacaggtagagagccctgccaaacaggtatctcaatgacatgtaagacccacataaatcaatgacttgtgggtcatgatgacatatcttaaattttgtaaaattataatggcatggttccaattttcccaaaaaaaactaagggtggagtttctgacaattgcatcttctactataatagctcctccaaacaatatagattttagcagttgtagaatccaaaaaatgtattagttgcttctcagaattttaagctcccaaaccgggtttaagaatcattaatctctaccattaaaaaaaagcatcgatttgtacagttaaactaaccgaaaaaggagtcgagagctcacgagacggcggctcacagccagaggcagcaaaccccctccttcctataaattctcaccctcaccaccaccatctcatctcctccattccattctccttcccaccattcaaccaaccaacctgcagctgctcaagaacacctcactccaatcagcagcaatggaggatcatcagggtggcggtgtaggcagggcgagcaacaagatcagggacatcgtgaggctgcagcagctgctcaagaggtggaagaagctggcgaccatggcgccgggggggaggagcggcgtgcccaaggggtcgttcgcggtgtacgtcggcgaggagatgcggcggttcgtgatcccgacggagtacctcggccactgggcgttcgagcggctgctccgcgacgccgaggaggagttcggcttccgccaccagggcgccctccggatcccctgcgacgtcgccgccttcgaggccaccctccgcctcgtcgccgccggcaacggcaacgccaaggccaaggacgacgccgccgccatgtgctcctgctcctccgacaccgagatcttgtgcagatgatgatgatcaacaccatttcgccatttgtgtgtgcgtgtgtgttttcctctctctcctttcttgcgttcgttcgttccttctcgctttctttcttcgcggctactttttttttgctgaagaaaggagaagaggttggctgcaatgcgatgcaatgcaacagactgagagtcagagacagtaattgatgatgagatatgtaaaattttatggtttgtacaaggggaggagatgaaggattcattcttcactgcaatgatctaatgcaaactttaggctactaatttatatatttgtgtcacagagtactctcatatgtatatgttggtttgttttgtttgctgcattcttggttcagaaactgaagcctataagcaactgaaaaagctgaaaatggcttacacttcagtattttctcagtgcagataacaataatgataattactgaccaaaatacaagtatctaaagagattagcaatggtaggtcacaagagtgcaagggattttttttttaccgttttaaccttctgcacaggcagggtaagacctactcttcacttgaagtaaaaaaagaagccatttttacttactgcaagctccattctgaagaatcttgactagtgatggtactagcatattcttaatcatgtgagtttgtataatgtttaagattatagtacatgctcacatggcaatcacacctggtcctcaaaggaacacatgtatgggattgggaccaaactctctccatattttggtgaatcttaattaagctaatactaattaaactagcatcatctccgaatatatcatctcctgtagagtgtagaaacatagccgtgatagcattaaaagaacatttttttgagtgaaagaataagatcaatatcattttggtggtatctcagaatctgaagttacagctgaaaacaaccaatctcaatggtactctgaacttgggcgagttcctgaaactgaattaggtttctctaaataatattgacaagacaaatccatcaggcgaaactgtctggccccaactggtaaggggagtacaatgattgctctatttggagatttgttctattggcagcaccctcaaaattctgggaaataagtacatttttgcagagataagttagtgacagtctgactgacagacacaaaaattccctgaatttcaaaatgcagcacagagctgcactcattgtgatcagccaggcattcttgaattgcacagatccagatccaaagttacaaaattgttaagactgatttatcaattctgttttgaaaatgaccagtttacattaactaggcatgctgccaattgcaaaaacccattcagttttaatggacatagagggtactgcatctgttcatccatgatccatgacgttcaattgatgggtgagatagatatactatcatcccatattcctatcgcctccaactaccaataaaaacaaaattatttcttcagttataaatatattcagcacggaatttcagtacttgaaaaacgcaaaagcgcaagttcctaaaaccctatagatatttatatcttttgggtttatgtacaataacctgaaccgaaattcctccaagttcagatcaaccaatcatcatcagaaattcctctcctgcagatgcttttttgcagttcacagctttgctgtttcatctgctaatttgatttgtctctctccaccatgaactatatatatatggctcaaagaaagaaactagaattaattaatctcttaattaatcactctgtcaaatgtactactccatagattaacttgcatgcacatcaaagctactgtctaagccaattgcttctccagaaatccatggattgaaagcaaaagtcaccaagaacacgccatgcatctgcttgcagcatgatgcaactatgctagctacccatgcatattcatgctaattctgaattttttttctctcgtctctacattatattttgcacttgcacctgaagcaatccagtattttaggtactatataatccataaaattagtgtaaatacgtacgtgtatatatatatacggtatatataccgtatacgtacgcgtggctagctgatggctttcttagccttggcggcggcggcgccgccgttcttgcggcggaggcggcggaggagatcctcgaagtcgtcctcgccgcagggcacgcggaggccgccggcctgggcgaagccgaactcgtcggcggcgcgctccatgaggtcccggaacgccggctcgcggaggtaccccgtgggcaccacgaaccgccgcgcctcctcgccgacgtacaccgcgaagtaccccttcggcacgccgccgccaccggccgtcggcgacgacgacgacgccggctgctgctgctgctccagcagcgtctcccggagtccatcgtcgttatcgccgtgatgcgccgccgccgacggctgatccttccccctcctcctcctcccgcccttcttgggcgccagcaagtagcccatcaccatcatcgccgccggccggcgaggccgcagcaagatcaaacaccacaccgcactacgtttcttggtcgtcgtcgatcggcggcgattctggtcgtatcatgagttggtggcggccatggcggctgctcgatcgatcgatcgagatcgctagctaagctcttaatttgattctttggatctttcggattggtggtggtggagaagcacaaccaccacgacgacgacgacgtggtctcagcttttctcgatcacttcaattcctatacgtggtggtgtcaaatggcaaccaaactcgtatgattaggaggttgggaagctaagggggtgagtgttttatagttgtaatttgatagggggttaattttttaaatatgagattaaataaactcagttgattttagccggtacggtagtcttcactctggtaagaaagaaaatgttattttaattaggatcgacgtgtgcagtcaatgtaaggtgaagttactcgtgcttaatatcatctctgtttttaatagatttttttagataatggaatttaacatcccggcctttgctcaaaaagagctacagccaattattacattatagcaatctagaaaagagcgtagttcagctaaataggacacaccaaacaaaaacagaggaaaccaagtcaaaataaggagaacacatttattgaagtctatttgtgaacctccatccataattggcaaataattgcataaccattgactccaacttgcggcatgcaatctttaggaactccccatcatcctcacacctttgtagctgtgcccaaaaccggagctagtgcattgccctgaaaattacctgcatatatgaaatagatggtgatttattaaaaaccaaatcatttttactcaaccatagagcccaacaaatggcagaagctctaaccagtatcagtttactctttttcttatcaacccccaaaagccacccatcaaatatatgagatatattagttggaagattaaaaccaaaaaaaactaaactgctctccatatgaattttgcataatgacaatctatgaagagatgttgaatagtttcatttttcatacaaaagcaacatcttaagctaccattccaattccgtctcgccaaattatccttggttaacacaactcccttaagcaagtaccacataaagatcttaatcttaagcggcatcttaaatttccatgtatatttgtttctctcaatataaccgttgttaattaaagctagatacattgaccttactgagaacctatcattctgatgataattccatctaaaacagtcagaagaaggatttaattgaatatgtacaatagaagcacacaattcatgccaatatacaagattctgaccaactaaagctcttctaaaagaaacattaagcggaacagatcccataacagtggcaatagtggatgatttacttcggactatagcatataaagatggaaatttatccttgaaagccaagttacctagccatttatcttcccaaaatcttatttgttccccatcattcacaatccaagagcctatatctaaaaaagtacttttgactttcataagccctgaccaaaaaagggaatcaccttgtttcttgtccacttgggttatagacttgttataaagatatttccttttcaataagttctgccaaacccctttctcatttattagcttgtacaaccacttactcaaaagacatttattttgtaattccaaattatgaatcccaccgttaaattttttttatcacgcgtttgatcattcgtcttattaaaaaaattacgtatttataatttattttgctgagggttgttttatcactcaaagtacttaaagcatgatttatatcatatatatttttgaataagacgaataatcaaacatgtgtttaaaagttaacggcgttatctattaaaaaacagatagagtataatttaaaatgtaatctttattgttcatatgaaaaatttattgaaaaaactttattatagtattacacttgtatatttgattattgttttcaaataccttttttaaggaaactatgacagtagctctaccggatatattgaggaggagtaaagttcaaaaaaataataagaaagaagtttagaggctcaaggggattagaggataatcacaagtccacttagttaaaaagaaaaaagggacacccttcagggcggtttaaaatgagctgctcaacctcgatcttgttccaactttttgcacgaaaaattcttatgtttctttccaaccataagctccaccatgtggtcagtagcataccaagattatttgcctttgcatggtcagtttctttccctttttttttcttccttattccttggcaatggctgatctttagctgtaaccaaaaccctgctttcttctaatatattagcgtgcagtccttttacatgtttgtgaaaaaatggtgggggtgattgtttttcaatctatgtaaagaataagtggttttagttttgttttgttaactttttaaagtccaaaaaggtattcttttgctatcgatatcgagtggagtagatatctatttaaggagataagatgcaattctaggagtgttttacgcaattttattaacttaaaaatactaatacgtacgtgtgaacttggccacagcccacatcccaattaataatcgtcttaccaaatcgtgtacacaatactcctgctgtgttgactaatcatcatgcatcaacggataagtggccagatgtatcgatgagattagcaatgtacggccggataattaagtttataataagtacggttccgtagtactaatgacccattgactctataattacttgcaggattattagatgaactaaacggacataccgaccacttcatctctctttttttttcactattcaattcgctggtattcttttatgtactaccagagttatgcttctgcatacacgtatccctttgtggatagcaacattatatactaaatccggattcaaatatgtgaagcattttctaatccatcgtgtagaatgcggtacataattaagaaatgtaacactcatatcaccgcacaccgtgttactcccgcgaatatacgcttttgaattgttccattgtgtttaatttagcctgttctaagacaacctttttttttagatttgtctaaatttatagaaaacataataatatctataacaccagattagtttcgttaaatctaaattgtattttgcaccaaggaaattgtatcatgtttcatttaacactaggtttactacatacttttactttacacaagtgtaaataattaagtttcactttgcactataggtggtgtcatacaattgaaagaaaatcttataaaatatctaagtggagcttacaaaatctttcgaatttagaccatgttttacgaaagttcattcagatttcttgaaattttcatagttttgatagtgtattaaagtgaaatcttttcaatgcaccatggtgtaatgtgaacaaagtacatgataaaccggccctgtgcaacctacctagtgcaaaatgtaatttacttttgaatattaatatattttatagcactagctgaatgcatgtgcttaatacggataaaagaaattttattataatattatgtgttacacatcatttttctatagggtatgttcttaccataattcaattttatatgtgcctatccgattatttctcaatattaagaagtttgagtagtaatttaaaaaaattacaatgaaagtaggtggggtggcatcaccatatatcttcctttaaattaaggagtacaactatttgtttgtgttgaaaatattgttaattcatttataaacttagttaaactttaataaatttaacttgggacaaacataaacagcttacaatatgtacatatatgagaaaaatatgctttcaagtgccaagtatacataattaatggccaaatcaattattgtacgtgcacacatgatatatacatggtaaataattcaactaattagctagatggacccggatgcaagaaagaagtaatttattggtgatgcagcagacaaagaggagtacgaaattggggacgactagagtacggcctaagatcagttggccggccactttcaccccccttaatctatgcaaatatcttaattaatcaccaatccctcccttaattaattattgtaatctcatctctaatcccttcatcatctcgcgtctcccgctgcgtgaactgcacgattgtcagccagccaagccagtcaaccaattgccaagcaaaattttctaatctggtttagtttgtctgaatttccgcgtagtgacagcatctaaacgcaactgtctggataaactactaaattattattgctgcagagaatgattgattaattaagcaccacgcaattagcacggttcagaattagcatcggattataatttggacgttgattatattgcatgtcgccgtatgactgatggaaccgtggcgccgaattcagagagggcgctggtcaaattggttgaaatgatttgagtggagatggcactaattaattaattaattggggttggatgaacagtgttcttctttgaacagttcagattcaaagcaagaagatatacgcgcacgcacagattgatcaaccctgatgaagatgaagaaatccttttcagtagagttgtaatttttttctcgcatgcatttgattaattttgtggttcaggtaaactcacactgcacgtacgtgcatggatgcacgcattgcaataatcaagattaattttaagccaagaaagagatcaatacattgtgtctattgatacaagccaaagatcgatatgtaatctattttcactataaaggaaaaggagagaactcgatcggtgtacgtaatttatttttaatctttttcgcgtgggagttgtccttctaggttaatttatcttagacttacatgagtgctcatatttaagatcgaccatatatatacactttcagtaataagtgatgtgggataaggtgtgcagttattacgggggtgagtgtataatatatacattggtgttcgtattgagtttcaaaaaaagaaatttaagccaagaaatatcactgttagaaggggggccattcctatggacaagtggggcaactgttttgttcaaacacatacacgggttgtatagttagtctaacaatgacataatatcaatcattttcagcacggcccctgaataataatcttatgtctcaacctgttaattctacgtacattttcttcagacagttttgtacgttgtcttcagtatccaggacggaaatttcaaactccaaaatccaaattatgtttgtcggtgtgctgccggtgaggtttaatttcacacgatttcttgtttattaggcaactgacaacaacaaggtcgagctcgatcagtgagtgtatatatatacagatggacatatgtaggtataataattctaataatagcaaagcgagtaaagctcaagtgcgtagatttcttaccgcgattacatttacagatagtaattctttcaacggtatatgtcgatagcgaatcgttcgtgataatttcgttaatatcaaaatatacgatatgtgtgcgtgtgttgtgacttatgatgtgtttcttaagaaggcttctattaattaattaataagatttttgagataggtaaatggaattatcttgaagattgggttcacgcaaatgaataattaattagctgcccgcagacaagacccgtgactttggccgaggaaatgacaagctgagattagcgagcctttctccatcaacttcctagttaatttctttttcttcttcttcagatattaggtagagctatatggtcttgtgaatgcatgcatgattgattgatcttttcttttgcgtctctttcagttgaattggcctgttgatcacttgtgtgctagtagtgcagaattagcatatggccttaattaataatgtttaaccactatagatttattttctccagtaacaaaatatcatcctgaaaatcctgtcctgacatgcattatttcttgaaggaatatactgcatgagatcctatatatgtcgagaattatctgatctttttctagacgccggcaaagcactaaatatctacatgtaataatataatagaaaaggacgacatatatgttgaaatacatacaattaacaataactgaattgaagaggcatattctagcagaaatagcttcatcattctctagcagaagagaatatatagcctttcccttttaaccaaaaaaaatgtagcctttttgcaacaaaacaaaagctatacattgcgtcggttacgttagctaggcaatcagatatggtcaaatatatacataaacaaattattattataattctgcctccagaacctgacgtgactaaaatcaaaagtcagtagaaaagcagaggagcaaattgcgttttgggtgtccgtacgtacgatgcagtggaggcaggccaaatctggtcagaaaaatacttgtctgaagatttgaaacggtccatgattttctagtaacacaattagattaattaagcaagcttggcatatcattagctcaagtaaccaagcaacaccatataatggagtagttaaaagagatgctgcaaagttcagagaatatgaaaatccatggacctgaagctgtcgactgataatgtgaccaaaattcagaaactggttagctaactgaactgcaagcaaatgcgttcagcacagtggtggaccaaaattcacgatgatcgaccaatttttacatatatcagccttcaatcatgagttcgatcgctgttcacctacctgaattttcaccgattatcatgcttggttttgcatcctgaaaccagaggctgcaaaaagaatgtaatgcacatcagttagcagtagctgtcccattccagatacacgagcagtcaacagcaacagatttcggtgtcaggtctcacgttcagacccacggcgtctacacgatttcaagaatggctgcaatggcatgtcaggttgggtggtgaaagcgagataaagagatgccattacatgcatgatcaacaagatgattatgatgcccctgcttacagaatgattacaaagttgtgaaggagaatcactgggtcgtacgatgctttgagagccctgtgatcttcctctttctggtgcaggaaaggaacttgtgttgttcatagacacatcattttcgtgatatactctgcaatttgcagcatgtgacatttttgcatacatgtggacatggttcctgctgaaaaatggaaaaatgccaaaccatttggttatcagtttgagatttttttttttcatcgatgtgaattgtgaactactaattgagagttgctgcttcaggctcaacctcaacaaccagcagccatgaggattgacgctggcaacctaaacgagatttggagggagagacatccctcaaaacatttttaagaagaaattatgagtgtattggggattgaacacgggatctcggggttaaaactatacacctcttgctactacactatcaggtacatctcttatcctggcaacctcaggaactgttgctaacaatcataaactagctgcagattggcgccgttaattttcatctccaaattccatttgagctggccgaaatagcatataaacaaggtgttgcaccacatgtaatgagtaattgtgtaattgcacttgcaacctcgtatggaaccatgtactggagattaattgcatgttatcgccaacggattgttaaacgtaaattaatgtcgatcaaaatgcagtatgcttttctcagtctatatataacaagttaaagtatggccttaagagttggaattgttgtgtataaatacaccttgaggcagatctggctgggttgattagttagcatggtaattagccaccggacttcgcattggctagtcatatccttgaatggcgtatactctatgttgatatacagacactcgatctgtgtgagatgccgggtttgtgacagcctatgaaacgccaaaggatgaaaaatataagtcaaagtggttatcatgccaagtgagccagaacttatagacgaccaaagcattaatctttacttttcaaacggttgctgttcttcaattaggccggtaagaataaatagattagtttgacctttggtaagacacattgaggcatggatcgtttgttcttgcccaatgaaaggaaccaacgattttgataattgtcacatggatcatggatgcagggcgccggtcttggttgaattttgcaactggaaatcctcctcattctgctgagatcttatacatttaaaaataataccgtggacctgctgaaaagttgttgtttgcctatgtatcctactacaactctagaacacaaccgttaaatttccgtataattaatttcgattaatcatttggcgggacctttttgtccgacaaccgtattccgtttcccacgtcgacactgaataagagttcatttaaacccaatcatagagaacaccccaaagaccccaagcatataaaacttagaggacaaaattcccctctaaaaactctcatcggccaaataatgcactacgagtgtcatgtgccaaacgcactagaccactagcggagtgtcatatggtaaaaacatgctttcaaatatcctaccacaagtgccacataaatatatgctccctccgtcctaaaatataggaatttagaatcagatgagatgtttgtccatatatattgtactagcaaacgtgttccaggttcttatattttgggacggaggtggtatatcacaggccatgtcaatcacataagagtttcttccatataggccctgttcttttctccaacaagagttggataaagattaagattttctccaacaagagttggataaaaattaagattttcgtggcacgttttttaaactgctaaacggtatgtttcgtgcgaaaactttctatatgaaagttgctctaaaatatcatattaatctatttttcaagtttttaataattaaaactcaataaatcatacgttaataccacctcattttacgtaaaatacttaatctttatcttcatcttcatcttcaagagaaaagaacaccaccatgttcttacactggactacgtataccatcaaatctttcaggagggctcttgcagcgatcatacggtaaagtactcagctgcgaggggcttaattaagcttctcttgtgatgaccaatagatctgcacattagataaacataagatttttcattcacgtacggtgttaagtttgcacagatatataagtcatgaaataataagctcacctgcagtgtgccggtgatcagcaaacatactgatcatctctgcgtctatctccctcgtcttcgtacatgcgcctgcgtcttaaaagcaaatgagtatacttcgaaacagggttcaaattgtcgttttcaggttatactggaattaaatttcggcctgaaataatttaaaatttgatcaaaatttagtcaaatctgaacaaatacacaaaaaaaaattgaaaagaaatccaaaaattccgggcgaaatcatttcatatctatagacccgaaattctgaaccctgtttagaactccatcctatagatcgatcaaggtagttaagctagcttgcacagcgatgaggcggcgatcgaggagagaacgggacgtcggtcaccagcagcggtggaggagcttgcacgctggtgctgctgctccggggagtagaggccgtagcggcgagtgtcgccggcgtgggggcggcggcggcgcgggtgggaggtcggggacgaacatggcggtctagggttttaattttgttttggaatggggaatcgagaggttgacgacgtggggtggttggagttggagtaggagggggaacgcgaggtcgcgaaatatgggccgggccgggcccatctcctcctcctatatggattccgaatgggccttccagaatacaaatggatctggtggaaggcccagcacagcaccaaaatagaacacattgaccttttttttctctctttttggcaaaaacattgactttgttggagttatggagtactatcatgttttgtcagattttaaattgggctcaaaatatttcaacttcgctcaaaaagaaaacggaacaggctataggcataggatggagcgtagtttgggccacaccgcaactcccctctttaagttagatttaggagttaaaactctactaaatgcactcttaaattagactttaatcgcacatatacgtactagcatatagtgcctagctagctactcgaggtttggtttattttgggacgaatggcgtatatctagatttataatactattatgtgtcacatttcgtacgaggttgatttattttaaaaccatgggtgtaatatgcccagtaaagccaccacggctcgcccataactccatattctttatgaccggcctctgctatgataaacataatctagaggttcacctcaagatttggcttcatacagcatatccgggcatttgagatactctcttcggtttttaatagatgacactattaacttttgaacacatgtttgattattcgttttatttaaaaattttatacaaatatataagatactctctccgttttagattataagttgttttaactttggtaaaggcaaattagtttaaatttgaccaagtttgtagaaaaagttaattaaattttcatctcaagaaaaaatattatgaaaacatatttaataaaactaatttagtgttgtaaatattactatatttgtctacaaacttgatcaaacatgaagtagtttaagtttaaccaaagtcaaaataacttataatatgaaataaagggagcataaatcatgcttaaattactttgaatgataaaacaactcacaacaaaaaaaatataattacgtaaattttcttaaataaaacgaatagtcaaacatgtgacaaaataacaacgacatcatctattaaaaaaaatacttcagtacctttatataattatacaaaagttttaaattagtaaatgatcaaatgatttacaaaaaatctaacatcaacgtttattttaaaaggagtagtactctatagtagagcaagttcgatagtatagctaactgctaagtctaaattatctatagttaatttaatagttaatatatatagtagttacctacaaatatatacttatagtgtactgatacatggtctgatacttggggctcatagctagcgcgtgcgcgcggctagcaagcacctccccttaagactttaactacatctattaatttattagttaatatttaacactaatgatactagtagtaattagaaaagattctgaagatttttaagagatttttttactaacagattgaaaatttaattttttaagttagatttgaaaacttttgatttaagtttcaaattttaaagtcaaattttgaaaactttcaaaatccagatttgaaaaatttgaaaacttttaacttgagatttaaaaattttcaactcgagatttaaaaactttcaacttaagattcgaaaactttcaagtctagatttgaaaattttgaaaactttcaacttgagatttgaaaattttcaactcgagatttgaaaactttcaactcgatattcgaaaactttcaagtccagatttgaaaattttgaaaactttcaactaagattcgaaaattttcactcgagaattgaaattttcaaggctagatttgaaaattttcaagtcaatatttaaaaactttcaactcaaaacatttgaaaaaagcacatttgctattggctaggaaatagtggggatggtggatgcatcgagtttgttgctagagtaaatatagtatgagagagttattagcttttcttggtcttagtgtacctatgaaatatatagatcaatttggaatggagggagtacttaggtgcagaaggaaatgatataacttttccccccagattttctgttacttcatgttttaggtataccaatatttttgtgtacttggttgatctgtgcactagcatataacaattatccggccatcaaaatggatgaattttccatttcatcatgtgaaagacataataactggaaccttatcaaagacatatacttattagttattgcatgaggtagttaacagaattgattgctttcattccccagctttcactggtgatgaacttcaacttcttgtatataatctttttgatgctgcagttcatgtgatgtactgatttccttctggtcattgaattactatcatattgtattgttttctttaacggggaacagaaagggataccctttctgaaatcatgctgctgttattgaaccctgtgttccttattacaggtaaaagacagcatgtcatgaggactttccaaggtcataaccccaacactatgaaagttcattctcgcaagtctcaaccttcaaaaaagaagcctcgcgagttctatgacactgttgaggtacacattattgatgatgacagtgatggtgatgcgaatatccacaaggattactcaatggaagacacatcaaagcaccttgtcatgtacaatcctgagatcacgtatgacaaacaaggggaagttgaagttactgagcctatagataactatacttcgctgaaccaaagatacatgaagccaagacacggatataacactgttttaccatctatcggtgcttacaccgtgcaatgtgctcactgcttcaaatggaggatcatcccaacaaaagagaaatatgaagagatacgtgagaatatttgtcaggatgtgtttgtatgtgaaagagctcgtgaatggaaccgtgttatatcttgcgttgatcctgaagatatatcacaggatggaagtagggtgtgggcgattgacaaggcaagcatttcccagactcctcctggctgggatagagaggtcagaatcagaggagagggttgcagcaagtttgcagatgtgtatgtcactgtttcctttcctggatttgcagtagtacgtgatatttggtaccatatttttggccgtttccatattcggatatcaaacttctttctttatgtgcctaatagcatcttcatgttaatcgtggcacactggtcctgtttatttatgccttgactagctgctaactgctaagattagttaacactttctaaataattagtgcgatctcaagtttattcatactagtaccacctatgatcatgaaacttctacagttttcagttaatactttgtaacaccatagcaaatatctcactaattccttatgatatgcctgcttgaataatgcaaacagccattattatgtttgccagtttcctcaggaactttttcattatatgatatttcgaacagcaacattgcttgtaggacacacaagatactcgaggttgacatatgtgaaatacttttcttttttccttcaggtactacacttctccaactgggaagaagttgaggtcattggtagaagttgggaggtgggattcatccatttgtgctctttttgttgcatattttgtgtggctagtgtattacttggggtacctagttctagttggtctggtacaacaaaacgaagctctggaaaagctctggaaagttcttgaaatatttcccaggaaatgatgtaattattatgtccatattctaggtacttggcagagaacccacactacattaggcaaggggttaacttaacccagttctctttcgccacccccaagcctctgcaagaagactatgtcaggaagcatacatatgcagcaactcctgaattaccagagcttcttgagactgcgcaaggtgtgttatcagtcctaggtttgttacatctattctacttttttttcatttttaacttcttgttccccacattgttggaaaggaggcgtgcttcaaacaaggtaagttgctgcgcaaatggcacagttggaggtatctttgcaatgcaagcatgtctagttattttcagtcaaatgagctgtgagaagtcatgtactcatgatgcccttgcattttgctactttacatcctttcttgatcttagcaccatctaaatatcatttagtgttgtgatattaactgaatatattttcccccagtttcatcccatagctatatcctgtcaaaactacctgttcttgggagcttttgctgatatatttgttattgagtatacattgttatttttcagtggatccactctgctgggcagcaccccctacacgcagcgaactgcttggtgagcttggtgcttcaacctcaagatctgttgatgtcagccagtctgaggtgtcataccctgtagacttgcaccagcccgaggagtctgcgccactacctccacgcacaaagaagaaaactatgaaacgagggcgagtgtcagcaacggggtctcaatcgactccacctggttcatccaaagatcagtctggaggatgcgtaagcgacgtcgagtttgtttcgctgtgaactctggatgcagtgcctttgtctctgtcagtctgccttttggttcgtctcattgtctatacctctcaagaaacataaacttcgacctatatgcccaatgttttgggtttgatcagatgcgctaagcatcgaattttggtaatctaactacgtcttaacatggccatgacataggctgtagcatccacataactaggtagccagcactagtctgatagacttggcagaatatgttagccagcattagtctgatagacttggcagaatattttccatggacagcctgctacatatgttgatatggtagttgtactggtattgtaacatggaagtctggagtagacagacagtgttatcagtgtaccagatgttttatgcttcgtttttctgtctcttgtctttggatgctttgtgttgatgctcgattaaccagtcagatacttaaggattcatattcaggaaatcctgacactgaaaatctgcttatccagaaaactgaaagaagagctacgcatgagtatgtgccaagaacattttgtatttgcaagggcctgtgaatggaaccatgttttatcatgtgattacccagaagaaaatgtcaaaagatgaaagcagtgaagttcctccgacaatgtcactaggcttacactgaaatgccatgtttgaaaatttagcatcatcaggtccaattaacccaaattctagaatcaggcaaatggttcactgaagacagcagagtgaacccaatggcgtgcctcagtcacaatcgatgccgggagaagctcctcaacaacaccatcaaccagattgtgtgcatatacatttgtgatggatttctctatcaaacctcgtggattgaaaggagccatcttcctcttctttccgtttccaagatcgatcgttctgctctcaccccacagccggtcagggcagaacgtgtacactttcctcccacctttctcctcccttaaacgggaggatctaccacggcagaggaaccagctgaacccatccagatcgccggcgtccaatggcgacggcgccattgctatatccagcttgaagaacttgaactcgcagaactgatcatcgtgacggcgacatgagactaggatgacctcctcttcttcctcttcctcgccaccgccttcgccagaggcggtgacgaggaagtgatcctcttgccagttccaccccggcgagggcaccggcgtcctccaggccgtctccgtcatgtcgaacacggagatcctcccacggtagtcggcgcagaccacctgcttcccgcgcaacgccgcgtccacgatgaatgtgaacgcggcgcggcgccgcccgtggcgagcttgctgcgggggggaggtgttcgtgttcttgtaggttgtccagtacacgtcgccggggcaggatggtgggataatcggaggccgtctcgacgcaggccaccaccagtggctccccatgggagttgatgtggaagacgaagaggccaccggcgacggagcggaacaccggcaggtccacccgccggccgttgccggcgtggacaggaagacggttcgcagtgttttctctcgccgggggctatggcggtagttctggaccatgagcagccacccgcggttctcgaacgccaatgtcgcggcgtccaggaagaaggcggccatgtcggttgctccacgggtctgcttggtggatggatcgaacaggaaacatttgttgctgttgcattccagagttaacaatgccaatggtagcttggattgcttggaacaagaagtggtacttgttggagaagcatctggctccatggtgaatcttaattggtactagctagttcctccagatctgagataagcaaagggcagaggttgatcatttggtacaatgaaaactctacttatattacatacagtgtaatactatatccaaatctgtgagatataagcaaagaacaaagattgataatttggtacaattagagtagtgcttatattatacaaatgtaatactacatggcacactatctagcatctaccatcctgtgcagccaagttgtagcatgctaatagatagagtccagaataatgtaatttaaccattggtttacataacttgcaatgcaatgctattatggtcacaaatagtgagtggtgaataggtttctttaacaatgggttcgaatcctactaatgcttcctaattccaaaatacttactattagctaccaaatcccacttatgttcagagcgaaagggcacgtagagtagcactccaaagtcctaagtgcaaatctccataggagtaaattttagattggattatttgaggggctaagttttcgatttaaaaatatcacatatatctggttggatatagataccgggtaaaaaacagacaaaagaatatcacgcgccctaactacatcaccaatcatgggggatcgaggccaagaggacaattaattaatctacacagcgcatgcagagcaaataatcgaccaccggatcaagagagagacctaaccctaatactcgcgcttggcacaagggatcgatcgagggaagttcacctcggagaagagaagcgaggcgaagcgaatgaggattccggcgggggcgcggcgccggcggcaaggcggagggagcgatgaggatcggaggagtcgctctcgctcgccgattcggtgatgcttcccgtggaagtagggatgcaaattgggaagaagaagaagaagagaccgaggcggactggtttcgtttgggccgggccgaaagtgacgcgaccatgtccgtattccaaagttttttaatggacctgacctgactggcttggattagaatttggaaacttttgtttgcctagtaccctatcctttcatattattagttgttttgattttttttattttaagtttgatcaagtttattagcagcatttaaaacaccaaattagtttcattaaatgtaataaggattatatttttaatacgactaaaaaaatattcgtatgttgcaacaggtaaatgctattttgatattataattgttatacggtttaggtaagctaaaattcactgtgttaattcgcttgaatatttttttaaggaaatcatgagctgcaattaggagtctgtatttcatctcaagttagcatgagtttttttaaagagatttcttatacgactccttttatatttctaactcaaacacggatttgtatttccaaaagcgaatgaacttaaaaaccgactcaaacacgaataacgtaccaaaataccggcaaaaatatcttcaatttttataatagtagagatagagatttattttatgttgaaaatgctgctatgtttatctataagtttgaccaaacttaaataagtttgattaaaaaataattaaaatgacttgtaatatgaaacggagggagtgctagacatgggggtgacaaatttgcctctaatatgtattggactacgaattcagccaaacacggattttttttttgaatcaagtcagatatgaatggcttggatttctttttgtctgttatttgaataaggatagcgtatgcggacatattttggatgtattcacaatatagatcaactaacaaaaacatcagacattctaaagaaaaggtcttcatgtacttctactgttactccatcaatgcataaaacttcaaaattaaattcatttcattttagcggtaataaaaaaggaaaaatcagaaattgcaaaatcttctattgcctgctgctctttgtgtaatgaatccaaacttgaaattttttacttaaatggaggatgagtacatgtagattttttttttaaaaaaaaactgtgatattgtttagctactgtgtaccaatggacaataatcttgtgtgcacaagatatattcccaaagaatagataaaatatgcatgtggcagccagctaacatgggtttgaattaccagcaattcttacccaactgataaatccattttggatggcatcaagatgaattgtcatagttactctgataagtcggaggacatatccggtgaaaagagctaagtgttgaaaactcatgaaaatcatacctaaaagtttcgtaaattcatgaaaaaaatactagagagaggtgcagatataaaatacattctcaccaaatctcaactccaaactcaacttcgtttaagaggaaaaaaatttcagatgaatagtgtcatgttactattcacctgaaatttgtctttttttttactcctaaataaagttgagtttgaacttgatatttagtgagaatatatttcatatctacactatctctagtatttttttttatgaatttataaaacttttaggtatgattttcacgactttccaacacttaagctcattttcaccggatatgtccctaataagtcggggcatttgcaattggaaagagggaaagaaacaatatgaagagaggaccccagcagttgagtgaaatccgacaggccatcccaaaatcttagttaattttctcaagataattatatttataagagaatatccctaaaatatacgctatactactcagtcatggttgagctagattaccaaggtcgaccttaatcaagctcgaacgaagcctactcaaaagctcgggggtgaaatagactcgtgtcgagtttcaacaaacgagctcgctcaagctcggctcgttaacgtccctaaattcagccatattttaaggtttgacatttaaaggttcacactaacattctagtaagagagaggattagagccgaatgggcctaaatgaaccgagcaagccagcaaagactttaggaataagttcactttgactcccttaaaagtgacccaaatctaatccgtgaccctcaaccacaaaactagatatctttgaccccctaaattgttaaaaccggtgcaagttgactccctgggtggttttggagagtggtttcactgacgtggcgattatgtggtggtgttgacttcgtcttcttccaacgtggtgttgactagcacttatatggcattagaattaaaaaaatatatgcgggacccatttttcattcaccaaaataaatattatgggccccactaacatgtggaccccacatgttagtctctctttgaccccttcttcctccctctctccccctctctcctcgggagggacgcgccgtcgcagccgtgggcggtgaaggcagctgcagactcaacgctggcactcacggtgagggggcagttgaggcggagccgcaccatcctgctgcggcaccagtgggatgacgacagggagcggcgctgatgaggctgccgacggcaagcttcgtggctagtgagttgggaggaggaaggagagcctagagcagggggcggcatcctcctcgctcgtcgctccgccccacttcggtcgatgggagaggagtcggaggcgacgacttcggcggagaggtcgtcagcgacgctgacgtagccttaggagcagcaggtgcactagcctacccctagtcaccgtcgtccccatcacagccggcctcgccgccctagagctccctcaccaagcttcatcgcgctgccgcctctgtctctctctctctctttctctctctctctcaccacccctccatctcttccccccgatccccaatcctgcggcggcggcggatacccctacctgccggcgcgctgagaggggagctacacgaggtggtgttggaggaggaggagaaggaggagagctccaccgccttcgtcgagtcccgttttgtcctgccgacgaagctgggtccgagcctcggcgtgcccgtcgcctccttgggattctctgtcagcacgggcgacgtcgactccgacaatggagagaaccggagcagcagcagcagcagccagcaggccctccaccgccgcgagcgctccgtgccgccatgactcctcacccttcgtcgcggcgacaggcggtgatgcggtccaaggggagagaaagagtcagagagagaagtgagagagtgagaaggaaggagtgaggataggatgacaagtgggtcccatgtgttagtgggcccacattttctttgtgtgtgtgtggatgacaaatggacccacattatgtttttaactctaatgccacctaagcgccacatcaacgccacagacaagtcaacactgccacgtagacgccacgtgtcacaccccgaagttttcctcccaagtcaaaattgtaatttataattgaccctaagaaaatgctggtgaaatcaggagaaaaccctaagaaagtaatgcaaataataatcggatttgacatgtggaatttttcttgagttctacatgtcgaaattcattaacaggatttttagtggaattttcagagctctagaaataattttaaccaattaaaaatcactaaagtgcaattgttaattccagggaaaatcctttttccttttctttttctttttcctctcttttccctcctttttgtcaagtgggccgtcggcccacttctcccttccttcccctcccttactgggccggccgcaggccgaggcccagcccgacagccggccgcccgcctccctcctctcggggtcgccgacaggtggggcccacctgtcggacccgtctccctcctcccgccgatcccgctcgcgccgccaccgccgcaaccgacgccgcgcccacgcctccgtctctcccgggccacgtcgaccacgcccgcgcgtgcgccgcattccccgcgcccgttcccctccctctcccgctcgcgcccgcgcccgagatggccgggattcgaaaaccgaatcccgcctctctctcctccccactcccccacgtcggccgtcgaatcccgccgctcccggccacgtccggttcccccatcccctatttaagcatcaccggcaccccctctcgctttttccccattgcgccgacctctcccgagctccccaacgcctccgcgccgtgcaaccacccgccgccgccgcttttgctactccggccgccgctagccgccgctaggctcgccgccgtctcacgccgtcgccgccgttagcttcgcgcggccgaggtccacctcgtccacccctcctccgtcgaggttcgtcgccggagccctcatctccacgcgcacgggtgagcgccacctctaccgccgccttcggccatagatcccgatcgccatggtccatctctctctctctaatctctatcttctccttccttagggcacgccgaagctcgtccgctagccgacgccgtcctcccgtggcttgccgtcgccgtccgccatcgccttcctccgcgccggccaccctcggtgaggcatcccctcccttcttttccccttcctctcctctagccgccgctctccgccgccgtcggtcgtcgctttgcgccgctgccgcatgtgcgccgccgccgtgtgagcgccgcgccgccggcgccatggtcgccgccgtctcgcgccgcgcccgcgcgccccggccgcgaggtcccgcgccgccgtccgatctacccttgggtagatcggggccgtcggtccggtcgccacgtggcgccgccgcccaaccttttcccgtgccgctgaccggtgggccgcgcgccgccaccctctttctctctctcccggtcgctgaccggtgggccccgcctgtcggcgccgcgccccctcgctgacgtcagccctggttaatattgcgcaataaattatttaaggatttcttttatagtaataaacacagtgaatcttctaaaattcatatctaattcatccgagctccgtttaatcccattcaagtctcagtaaatcaagaaaaatgtgtagaatccattaaaaatggttttgttctctgtttcagtagtcttatagcctgtttgcaatgtttgctttgtatgtcgctagattccggttctttcgacgctccggtgtacttcgaaatagtcgccgaggtacctccagcagcagagcaaggcaagtcatgcttgtcacttgaacatgttgatcctatattgcaaatgctccattgttttctttcaaatattgcattgttttataatatcactatgggatggatacctactgctacagccatgcttttggatatcatgctcctttgttagcttgggttataacatgattagactttggactaggacttgcttagccatgcttagttcaactagcacacattggggatctcatttaaaacctagactataggtttatatgataatgttggtttaataccaccgctctggtgttggttaaataaaatgaaccacatggtgggctgtgggtgcacggttttgctagtcgcacccatggcagttaaggaccggttcgcaggatgccctggaagaatttatcgtacttaccacaagccagcgtgggcaacggctgggcttgtagtgtagctttcctctagtcgacgcatccaggcaagggtgggcgtgatggagcggggcgggccctgcgacggcctctgtcgcttccggattcacctaggcacgagaggggactgcccgtcgcccgctggggacgggggtgaaacctgaggtgtggtgtgcttggctagagggggttatgcgaagggtcctgtcacggcctctttccggtatgtcgtggtggcatgtcggcgcacggaaacgtgtcgtggggctgtgtcttgtgggtacagttgtacacctctgatcagagtaaaactattcgaatagccgtgcccgcggttatgggcggtcaaccagattcaccgtgattagtctcaccctagtgtaatctgttgaacttggatagtttaggtggatggttgggcctgtcgcaacgtgggttagcgttggacagcggatgtttaatactgcttaattattacaactgttttcgcattaaattcctgtttataaatgccagtatttatgcaaatgaaccactctagctcttctttgttaattccctgcatcatacccctattccggtatgacttgctgagtacagtgggtagtactcagtcttgctctacttttcccaaccccagaggacgggtatgtgtcagatgaaggtttctccgaggagtaggcttcgtccgtgccgtcgaggatgcctgtggagtggtgttcccgctgccgttcaagtcaaggcttagctccagtttcttttgtttttccgctgcatttctgtcagacctttataatgtttgtaagacgtggatctgtatgtcaacattgtcgtttgtgtaccccggctggtcctggacgggggttttaatacacattctgcttggaattctattcgggaatttctgggcgtgacaccacgtcagcgaaaccgccctccaaaaccatcgagggagtcaaattgtaccagttttaatagttgaggggtcgagatatccggtattgcgattgaaggatgcaaattagattcggtcactagttaagggagtcaaagtgatcttattccaaaactttaataagtacaacttttaagaggggagtttgcttcaattaggctttaggctctaaccaattaggcccggcccatgaaacatcagttcgaaagggcgcgccaaatctggcgctgaccgtgctgcactgccctgcactcctgaaaggcaaagcttaatttggacggttcgtgtaaacctgaactgaacagctctagaactgctatactttgtgagaaatatgattgcacttatagaaataaatgtaagagctttactacaagaaaatactccatccaattctattactagaatacaaccggtataaaacgtaacataaaagagaaatattattaagtagtaaagtaaaccattttcaataatttaggaggtaaaatgagcttaacaatagtttaggatatcaaatcatctaactaattagttttggggagtaaaattgacgtttttctatatgaaatacacacactctctcttttatattataatttataaatcgttttgatttttttctagtccaacttcttaaagtctgactaaatttatagaaaagatttagcaacatctacaacactgaattagttttattaaaactaatatttaatagagtttgataatatgtttgttttgggttagaaatgttgtaatgtttttctatatacttagtcaaacttaaaaatgtttgatcaaagaaaaaaaattcaaaatgacttaaagtatgaagtacaatattacaatttatttacactttttaaaccaaaagattacaagtgtcaagggaaatcggctacagagatcgtctcagtgatttcagtcagcagtactcccccaatctatttttgatggacatatttccaaatctaaaaaaattatttttgataagcatatttcaatccaacaatctatactcttaatgattttttcggatttaatgcgtgactctccattcttccacacaatattagctacatggacatcgagaaatgtaaatattaatgtcacttgtttacgagtagcacatttaaatagatgataattagaattacttattcttgatatgtgtgtaaagataaaatataactattaaaagtatatggagggagtagtacatcagcagagactaacacggtcaactgatcaaggcggtacaggcacacgtataaacgtctttctgacacggtggggtcggggtggggcccacgggtcagtgactcctggggttttcaaagtttcgcgaagccctctcggttccctctctttttatcctcttcgccgttgcgagctcgcccccctcctccgcctctcctcgccgccgcgttccacctctctctctctctctctctctctctctctcggagtcgagggttagggtttcagccatctgcggcgtctccggcgagcgagcgcgagggaggccggagcagaagccggccggggcgcgcgtcctggtcctccccgaggacgcggcggtttcgatcccctctctctcggggttgtccgcttcgccgtcgggagagaatccggccggagcgcgagcgtgaggtgcgcctcctccgccggcccgaggaagcatgctctcgatccctcgggttgttggaggaagcgcgcggcggcggcgctttcgatccatcgggttctcgatctcctttcgcagccgggcgggcgcggtgaatctgcgggtgagttgccttctttgcccccaactaatggagatgaaactctttcgcgatcaaattcctcttctttttcctggttcttgcgcgattgtgcgttcttgacaccttcttcttggatggatttttttgctcatgcgtatgcgttgcagggacggggaacgaacgagatcctacttccttgtagtgcgatggcgacggaaaattcttcccctgcttttacggacttcttgccccgtgcgctcagcccgattccgtttggtcggcgccattcgtgtgcgcgacatgtacgtgttctaattcacctcatcctctgcttctagttcttcccccaattgacggtttacctctgaatcttgtgattaggcatcatattttttttccgcccgatcaactgttagaaactattggattcctgactcctgaggtttattcctctagttactgatcaaataaatcgcactagtggttctttgatccatataatgccgtattttaacgaatttgtgtcattttgtcccaatacaaaagttagctctcatgtttaatggacttcgtccttctcaaaaaaatgtttaacgaacttcgtgcgtacttatcttttgtgttcttttcgttctgatgtatatgctgtatacttcagttgataaagtaagtcactatacaggaagtcaggaacatccttgtgtcaatgtagtttggatggctgtgttcttatcattttcaattatttacattaaatggttgctcagtaagatatttcaagcttggaatttaagtgcaattgtgatcccggccattattcacaaaggaaatcccgcatttagattgcagcctttctgtttcattatggatgcttgtcttacatgatttcttcatgttattggtcatgtactcatgtcgtctttcacatttagtcatgcattctttcacacaagagcagatgctttctctcaaactggaaaatgattcctagtgtcaatattgttctagttgaaaatttactcctcaacaaaactagggagcaggttcaaatataatggtgtgtccatactggattgatttacacagtagtgaatattcacatgaagtacaacaacatgatcaacatcatttgagtaaaagaatggcaaatattccctttccatttggcacttactagttatcacatggcatgcagtttaaatcatttttaccttccggttatgtacattaggctaatttgcatctttatggagaaattatttgcacacagttgatcttagttgttaacaaaactggttctgatatttctctcttttttatttgaatgatttatattctatgtgaattgggaggtatattctttcaaatgtctttgcttctttactgttatgcgcatatttggcactttctaaactctggtgtcatgtttaacggttggattcctggatgcaacagggggacataatgatgaatattgatcaagctgaggattcatgcagtaacattagtggtgcttcgagatcttctcagtctcatactgatcaaactgaggattcaaaaggttagtctacgcaatgtaaatcaccaatgctttagttgtatgccttgcagcacatactgatgcactctattaggattagagatggaaggactgaaaatatgttattatgctaattgtgctatgcttctgataggtatagcttcgtttggtcaagttcttagtttcttcatgttggtcttccgtatttatgtttaatgcatattgtcatccatgtttttgaagggccccctccttttcggagttcttgctatggttattccatgagttacattcagtgctctcacatataaattactgcatactgtgtatatattcaggaaatgaactatgtactcgtgtcaaggctgttacggatgtatcatgtggtagtgaattacaagatacttgtgaagaagaaggcatcatattatggccaggtctcaagatgagctttcctcaagcccctctagtcaggatccaggacaatgaacttgattacgcgtacgtcgatgtttctgaaacttctattggcaattcatttttcattacacagttcaaccttcctttgtcacttcctgtttatgttgtcctctgtctatcatttcctgtgtatgctgtttagcatagatatgtcatgtactcaccttaagtattatatttgttgcaaaatttcaggccctctcgaaatgcatgcaaacaactggcagctaatcctgaggcccctctgtttcgcctgcctcctttaggatcctatgaaaaagaaatgtgcggacctgtattgcttatatgcaacgtccattctcctggaatgagttgtttctctccatataccaagagcaccttctacagggagaatatggagattgatattgacgatgtgttgtactccaatggtagctggttcttactaagggaggcaaatataatcagcctttggaatgttaacacagagaagcgatggtttgttggcgaagctgaggagattattcatcagggatattttatcgggaacccaccattcgatgtgacaatagctcttgcgcgacaacatcccccaaagctcggagaagaagctataactgcaatctggctcagatcggttaagattggtggctggagcaaagggtcggtgaggtgtgattatgagcacagcgggttgaatagcctcaccattcatcagggcatgcttttttggttaactgacagcggttcgttgtgttgtgcgaggcaaacatctgagggcttagaacttatgatttggaacggctcagtgagaatatatgggatgaacttttcactggtaaagcattttgatgacctatacattgtgaacggtggcggttttttcccaaatgaagtagctaaatcataccaaatcgtcgttggagatgagcttcttgttgatgaaaagaggttgaaggggaaagacgtatttacagtctcaagacaaggaggttttgtactcccatcatccgaagcggataatggcaagttattcactggaaacatgataccggatgtcgactgctctatgtaagtataacaccgcctgattacttgatgcaaaatattttgattggataaaatatacttataacatttgaatgcttatatttctctgcaggtacagctggaaaaacaatcaaaatgaaattataaagccctgccactttcttcgccacgctacctgtagcagtgtttgggctatgctgcgtaccaagaggcgaacctagcaaaactccagtaactaccttgtgagtatcttctagttgtatttgttgaccttgcttcaatcgcagccataggaactacccaagagttagtaattatattgagactgcacatactgtactagtgtactttaattttcttaattagttaattatcagaaagctaaactggactacagatgttgattcatgtccataatcataaaatgcttctctattctcattgagttgataaatttttttgatgcatttccatatgaggaagtccggatacctttgaaactaattactatatactgtctgatatcgttctcaataaaattctgacactgaattcctttgatcaatacaggtagaggcaactcttgccagcctgttcaataaacctgggccatgttctttgcgctttatccactgccagtgcctgtcggctgtcgcaatactgcatgaatcaactgtgagataacatttggaataagctgtttttcctgttgggctaccacttatcatgattggatgaatatgtgctcttctagtcccgtacatatatgtcctatactggatgatctgtgcttcattctataggttgatacactgtgatcttctgcaaaacatgcagagcaatgtaactctcacatactggatgatgtatactgctcgttttctttagagaatatatttgaacaaagtaaaacggttgccagttggatgttcaattttattctgcctcctgacaacataattctttgtcagtgaaccagttgccacagttttccccaaactcggatactttctcgtgataatttttaacatctctcttcctttccaaactttttgaagtatatgcatggaaaccttttgatgatgagagtgtaaaggcatttatgtgatttttgggaggtacaaatgtagatttgaatattgatggtggttggctatgatttttgtgttcacttgaaaagtgtgaacttcaagttgagagtatagtttttgagctgaaagtcgggggaaattcaagatgtaagctcccccattttgttgacagattggaaaatttgctgttcaaggttgagagtaagatatcaaatctctagttgaaagaggatatatttgcctcaaaagacattgacccacagttataacttgtaattgaaattatatgtagccatgtaggcagaggatttgggatggtgatgaagaaacaaagacaacagtaattacccatgctcaaataatgagtttacaaaatagcaataggaacaaaaaccataaagattcaccactgatcattctgtaaccagtacaattacaaagctgcttacatgtatatacatggtatgcctccataagatgtcaaaagaaatgataatgtttcctacagagaattgcacaaattcaagacctataagaacaaaaagtaaaagtagaatcaaattcaagcccacatgtccaatatgtggcactatttagctcaagtagcgaatgtactagggagaatccaacggtgcacttctgtaacgattgatgctggtatcactgtctcaacagtctcatcaactaaatcatatgcataaatatttgtgatggacttcagtgttgaaggacctaatgaaccagtgaaggtggccacctcagttccattcacgattgagccggcacatttatttggaccaaataagtagactctcctcttcccttcctccttcacatggtacgattggcccttacaaaggaaccagctggtattatccaactccctgtcatccagcagtgaccactccattgcttgtagatccagcttaaagaacttgaaagcactccctgttttacaaggatgcaatatggccacgacttgctcattggacgcaacaagaaaatgagaatcttgtttactccaatcaggacaagatgacactgttctccaaatcatatcagtgatgctgaaggacaagatttgcccatgaaaatcgacgcacacagcctgtttccccagcaacaccacatcaacgatcaaagcactctggaccttgtacattgcttctgacatttctggatcactaatatgcttatagatgctccagtacacatctccaggacaggcaatatgggcagttggaacagcactcatgatctcaatgaatgcaaccactagaggcattccatgagaaccaacatagaaaacaaagaacccctcattaggagaacgaagtaccggtaggtccaagtgcgtgccggtgctaggatgaacaaggaacacgatctgatcttggaaggacaacggcttgtgctgcgccattaggagccacccaccattctcaaattcacagaaagcatctggaaacaccgtactggttaccccatggatctttcggcttgaaacatcaaacagcagtcgcttcttgctgttcaattccacagcgaaaagggccaagggtaccatcaactctttggaacagttattcttctctgtaccatttgtttccatggctcaacctggcacaaaaacacctgcaaagaagcaaagtgtatggattagaagaccagctcattgttcataagatatggcagtaaacccctatatattcaagtctgatggattaggaacatgtacttttttttctttttctttttccagataccaaactagcagaagtgtctcacccccatctagtgccaagcgtgccatctgaaacctgaacagaaccgctcatactactagatttcttcctagtgtgactttgggtgtctctagtttgtgacttttgagtgctcgatggcacactgcttccactacgtgcttgcatccaagaacctaaacatcacnaagcgcnggncgcagggcggggtgtggcggtggactggtggttcaccctgaacaccccgcccgtgatcatggttgattcgactgtttgttcaccacgcacacgcagcaaaaataaaaaaataaaataaaatggagcca

SEQ ID NO: 5436 - DNA, 11747 bp, Oryza sativa
ctgtactctattctttgtcatggttctctcattttcccctatgagtttttacatgacaaagtttttaacgaggcagcatgtatcattgtatcctgtgatgatatgaacatcaataaaggtcattactatttttaacaaattcttttgcaatattttcgcaagtgtggatttatctttaaattatttcaaaataatgaatcacaatctatatttttaaatttttcaacacaacaaaaaaataccattttttcttttttttaacattagcaaatcattacttttttaaaaaacttttatttccattttttaaataccattttttcattttttaacattagtaaatcattacttttttttaaacattttatttccatttttaattttttttccttatacatttcctttgtttttttttttaaaaaaaacactgtgcactgcaggctggcggcctgccttcacgggccgccgtgccccgaacggcccgtgggccgcaggcgtgccgtgccggcacgggcacggcccggccatccacgggccgtgcttgggccggcggctcggcacgtgggccggcacggcacggcccgtttcatcagccgtgcctaacgggccgtgccgaaacgggccgtgccggacccgtgcccgtgccgggccgggccgtgccgcccgtttggacacctataaattgaagtgctcgtctcagctgttttgtacttttttgttgttatatcatactaggattatgttgatttagtactggcaagaaaacacatcctctgcactattgtgttctgattttaagtggttgctacgtactccctccgtcccaaaaaaaaaaaagacaaaccctggtttccgtgtccaacgtttgaccgtccgtcttatttgaaaaaattatgaaaaaaattaaaaagataagtcacgcatgaagtattaatcatgttttatcatctaataataatgaaaatataaattataaaaaaatttcatataagacggtcagtcaaacgttggcacgaaaacctagggtttgtctttttttttggacggagggagtaggtcacacatttattatgctcacatgccagaggatccctccgtctcaaaaaaaaaagataaatccaggtccggatgtgacatattatattacagcgaatctgaacagaggtatgtccagatttatagtactatgatgtgtctattactgtgttggttttttaatgagaccgaggcgtctcaaaatataagtatttttaaactccgacacgatctctgagatgttatttaactaagaatatatataaaactaagatgttgtaaatacaaagagttacatatcatgatagtttatttaatgataaatctagtaatatcaattttacatgattaatcttttttttctattaatagttaaacttaaaaatgtttgactcgtcagtcgtcactatgctaaaaatatttatattttataatagagtattaaatactctcccttcacttgtctagagttcaaaatttgaatagagatcaaacacgtcatggcaaatctttaaatgatgttacaccgtatataaaagatatttacgaatgtttcatcactcgatgaaataatgttttagtaaaattattataaatgtatcattactcaatgaaaaatgtttcatcacttagtggacaatgcttcaaatagatgcaacattggaaaaaaaaaacagctacttgcaacatcaaaacatttatatgtatcaaataaaatacatcgctcgtcgtatgcaatatctaatcaaaaagtcaaaagaggatgaaacactcaaatacaccagaagtgcaacaatgttactatccaccttcttcctttgctccaatgactggatccactttctttctctattatggtggctggatctatcttcctcctctaatccgatgatcggatccatcaaagatcaccatttcttccaaaacataggccgagtttagttccaaaccttttctttaaacttctaacttttccatcacatcaaaacttccaattttttcatcacatcaaaacttttctacacacaaacttttaactttttcgtcacatcgttccaatttcaacccaacttccaattttagcgtgaaacacacccatacccccactccccccccctacccccacatttagatatatatatgctagattggtttccattatcaaaaatgcagaccaacgctagcatagatgttggactagggtgcattcctttggccaagtaggataaggttttcagtcccacacaaaacaagaaagcttattaatgcacgattaattatatactaactaatataaatttaaaaaaatgagtttatttgattttttgaagaacttttatatagaatagtttgtagggaacgaaccattatattgcttcgttgattcgattccgctgaaaaaaactcaaccatttccattagagtatctgtctacaaatataaagaattttagaatactacttgtcgatagttgtttcactagatgtgatcttgtgatatttctagatcgagtaaactcaagtagtaatctcaaattaaccttaaacttttcttaaataaaaccagcaattcctcatatttgtgaaactaaaaaaccctgaatctttgcacggttttcaaaactaatgtttaactattaattttacacggtacaaggtttgtagtaacaaaatcatatagtcataggagagcaaattcaagaggcaatcaaataacattgttttcatcgaatagaatttaatttatatttgactaattgttggtcaaatgtttcaaaatctaaagagtttttggaagcaagttaatcccagcaccagctagtcctcccgctcccagaaatggcagatttcatgcaccttctcagattcttacaggagatgatgcctcgatcacaaccgggaaagaaaaccacaaagcaggcttatacatttcatgattcaaacacctgcttcgtctcaaaaccagacacctctacaaacaacatttttttctttagctgaagcaaaagcagcacgactaaaaaaaaaaagatcaaacgcatagcagcatcggctttttctacatttcgccgatgacgaggttgctatattttctgatgatatgtgcagacattgctgaatttcctactactccactacgatctcaggcagcttcactatgctgtggctgcagcaactcctgctgggcctggagcatttcacatagctcctgcagcaccggctggcctggctggtatgatgatccctgtgcaagctcgagcaaatgtctttacctttgctggtattgctgcaacagtttctgctgatgcagtcagttggaggtggagcacaatctttcggcttcggatgatgtccgcaatcttcggctttgtgttcttcgttgtggtgatgctcatggtggtctgatgattcttcgatcgagatcgagtgctcctggactggatgagtatcattcttgacctgatcatgaggttcatggcagcaatggttgtggtggtgaggtggttcagcatggcagtcctttacttcctcgacctccaggttgtcatggtcatggtcatggcaggggtgcaaatctgcggtgtgcggagtttgctgttcatcacagcaatgatgctcatgaacctgttcatggtcatggcaagcatgcttatcagcgcaatgcgagccgattggctcgtcacagtggatatgctcatgctcatgctcatggcaagcatgttcgccggtagagtgcagagcaacgggttcttcacagtggctatgttcatggccatggcaagcatggtcattggtgggaggcaaagcgttgagttcttctttgcaggtgctatgctcatggccatggcagtcatgcttcttggtgtcgtgcagattgctcgtatctgcgcagtggttatgaccatcatggcaagcatgcttgtttgtaatcagctggttgcttggctctttgcagttgctatggccatggctgtgatcatggcaaccatgctggttcgaagaatgcttgtgggctggctcttcgtgatggttatgctcatggtggtgatcatgacaagcattctttgcaactgatgattctttgcaactgaccattgatttgcacggaccatccgaacaatggtgggaaacgccatgatttttctttgcatgagatccatgatgagaagaagaacagcacttctttggagatccgtgatgagaagcagcacatttcttcgcctttcgactgtccttctctctcagcaacagcatgctgtacatgatcaccagcaagcatgtgccaacatctgcaaggacggctgcccagataagtggatgtccggcaaatgcaagcccaacgattgcaagcttcgtaatcaccgagaatatgatgttcacgatgattgtccgatgcgtcctccttgccagccggacagcctttggaatcctgcggatgtcatttgacatcagagcaacgtggcttgtctccattgcaacagctgaaccagatacacccatagagactccaacatcagctttagccaatgccggggcatcattcatgccatcaccaaccatcagcgtagggccatctttttccttgagttcaccaacaattctcactttgtcctctggaagaagttcagcatgaacctcagcaaggatatttcccagctgccagaaaagaaaaacaagagcaaaattagatgctgtaatatgcaaaaccgaacaacagtaaaaacagccactcacactgaaaattattttacctgattctgtgcatatgtggcagcagcgctactatcacctgtaagcatcactgacttaatgcccagtgatctcagttccttgatggcctcagctgatccagttcggcaggcatccgatagagtgaatactccaatcaattcattgttacatgccacatatccaatggtaactcctttcatatctttcatgtccggaactacaaaaaaaaaaaattaaaaagataaacatgagagttacaaaaacgcaagactgttcaacaggatatctcaaagatcatgttttggtcaaaagaaagtgaagcaaaacctctattcacaattactagttctacttaatattcctgaggcagaacaattttatttactgttggagtgatatttttcttatttaacaacaaattcaacagtgactaaccgtaaactatcaacagtgttctaccacatttaggaagccttttaatttcaccaacctgtttcgcatgaagctcttgacaaaattcttttgttcccaatatatatgcctgctccgtcgatttcaccataaatcccctcaccaggatatatttggaattcactaacattctctgattttggttccacagactttgattgagcataatcaaccaggacagatgccatggggtgacttgatctgctctcaacgctcgagaccctgtgatatccatataattaaatgcaatacacaagaagaaattttaagtgaaagtttcgacgagtctcaccagtaaagaagttgttgcaatgaaacacgttcaccaactggctggaactcctcaacactgaactctcctctagtaattgtaccagttttgtcaaaagctgcaactttgatgctagccaaggattccaggacatctcctcctttgatgagcagccctgtccttgcggcccttagtagcgcgcagaaggtggcaatgggtgtggacagtaccagtgcacatggacaagcactcactagaagaactagagccaattggaaccagtgcttaaggttatgtgctttcgctattgcaggaattgctgctactgatcctgccatgacaacgaccgctgcaggtgcaaacaacgtaaacagtaagaaacccacctgatccaagtttttggtgtctaaatttttactaaaagcctagtctcttttatttagcttaccaggtgtgtaatacttagcacacgtgtcgatcagcctctgtgtactggatctgctgttttgtgcttcttcaaccaaccttgccattttggccaccgcggagttgtcagccatagcagtcgtcctcacagcaatgtaacctgatacatcaccagtacagaattgatacagaatcaatagcacaccttgaaattttaggcatatcagggacatcaaatcaactgacagttcatcatatattaccgtcaatgttgagtgtgccagcccagacctgggagtctggctgcttggacactgggaaggactcccccgtgagggtgctctcgtcgacctcactacgtccatcaacaacaacaccgtcgattggaatgacttcccctgccttgacagcaattactgtattgaccttcacatcccgggctgcaaccacctccccggtctctgccagaatagccttttgtggtgccatgctcattagagctgacatcccagcggtggcctacatgccaaaggaacatttaattacagagattaagtaaagagaacaaatataactaataccaatatacacatgtgtgctgactattattgccttttgaagactattgttttagtagattcaccttgctttcctagatcatgctttatatacgcattatgagtgtagatgcatgtttgagtccactagatacaaaagtttatttgtctttcccttgacaattttggggtgggggtatatgctaaaatgatgataaactgataactgatgatatatgagtaacatgggcctgattctggtccaaccagttcatcagtccaccaatcagtggggctagtgcacatccaaatctataggcccagtatgctgcattagcatgaatttgtgcccataaatgtgacacgtcataaacaatagatccttctcggttagtggcctgatcatgacctcagcaatcaaacatgaatagtgaggcaaaataaaatagctaaaagagatggaaatagaccttgtggctggccctagtctcaagccattcagctgtagtgaagaggaagacgatgaacccagcctcagaatagtccttgagagctattgctccagcaactgcaccaaacaaaaaaagtaagtacagacatacaaaactctgggttttgtgttgtcatccatctcctaccaaaattgcctggatttaatggcatgtagaaagtaatctacccataggtgctggcaagatagcatgggtcatccaagataagaagatagtgccaaaaaggatatagaaatcacccggcgaaaaaaggatatagaaatcatggttcatgataatatttgttaaaatataagatattcacatatacaatttgccttcttcttagtagtaccaataaaaccccactttttcacttcacttccgtgtcaaataaaacattatatacagaaatcatttgatatattcacctaactaagaaaaccagaaatgttgtcaacatacgacaaagaaaatttgcactttccttttttttttaccaaatcttccaaatctttttttctttttgaaacaaggtatttcttgtttcttttgatgattctttcatgtatcccatattcccatatgcatatcacaatagagctatctcaatgccacgatattagtctagaaagaattattcgaaatatgtgtagcttcttgataagaaatatgttgcttgttctaaaaggaatctgatgccctatctgaggtgacatcgccacatggaggaaaagaagcagaattgttcatctagcacgtatattagcatcacagcaacatatccttttgatgtgatggaaagtgagggaccctctagaaaagaaaagaaagcaaaagtttatgcaagtgagacataaacttttgagagatggatttctgcttctgctctcccactaatcacccaccatattggtcctcgtgaagaaacttgcttttgtctctttttttttcacaacccattgtcacactggtagaacaggtatcaataatacccacaacttcaatccgtagttgaatatttacccaaagtggtgttgtatttgtgtcttctacacacaagagaatactatggtaaaaaaaggaacaagtatactgttgcccttttaatacagaaaaaaaagcttcaaacccatggcatcaacgttaaaactcaatgctctactactaagctgtgtcaataatttgttttcttatttcaaatgagactattcaattggaggatatccttaatggcagatgtgtttgctaccattcgatactatttaaacgttcatttcttttcaaaaagtatggtgggacctctgcttttcatttcattaaagagagaaagtaggttttggtacaagccaaaatgcatgcattaggccaccagatgaaggaagcctatttaaaattttataattcagttatctcctaaagatcaaagggtcttcgatcgtcggaggtgatggtcagggccatcctccaacaaaagggagcttctttttttttcaaggtaccaataacaggaaacatcattaatgtcacaggtgaattataggctgttcttaccagcaatcagcatgagtatgttgacatccagggtgagtctccggatggccgcaatgctcctcagcacgatcggcggcaagccggcggccgcagccaccagcgcgaaccacttgagcgggtgccagaaatgctcgaacagcgacacgaccagaagaagtccgcagaggagaacatacgggctcggccatttgttggtgatcttctcactgccgttcccataagcccgaaccgacgcctccaaccttgcctgattcagcgccttgactgaaaacagcaaatatcaaaatcaaatcaagctttcaagagttttgtcatgctaaaatcgtgattgattttactgtccatctgtcataattggtatacctcctcaaggacagtaacatttatctaaaattatgtaatgactgtttcaagaaccaaagatgaaaaactggcggtttcattgagtgtgacagtattgtacagtaatcaagttccttaattctcgtgacagaaactgcaaaattagcaggatttcgggggtgctgaggtcagaattaacgagtcaagagatatgtccaatcgtatcagtaattgctccctgcgtcatgaacaatagcgaccactgccaagacggttcacttgtcgctagcaaacatcccattttagtagagttggagtatgaaattttgcacttattttctgacatggtaagtggtccccagcctcgagccatgaaaacaaacgaacacatgacaccacctttgcttggctggctagttattgaatcaagcaacgattagaaatgaaatttattgtgaacaaacaaacaaacaaacaaaaaaaaaatacagatactggaacaactcatgaacagcaagaacagaatgagaaacgcaagcaactttgcgtgatgctttccatcgctcaacacgctatatatatgttaagatccaatttttcttgcgataattaaagtaagattctgattaaactagcaagaacagaaataaaatcatcgaaaatccaatgaacaaacaagcagccatgacaaagaaaataaaaaagatcgttttcttcaaattactgagactctggtctggtctagtctcgtgtgacttcttgacccacccaaaaactccacaaatcccacaagatggctcagtcaccggttgcatgattggtatcattcattgatcacaggacaatgataagtgacaagtcaagatggaaggagagatcgatcttaatcacgaaagggagatgaatcaatccactcggaaagcaaaaaagaaaaaaggggggctctcaccgatttgggattgggagatggcgtcgacgtcgtggacgacgatgaccgtcctggagggaacgatcacggtgaccttctggacgccctccagcggctgcagaagcttctcgacgaggggaacctccgacgggcagcaaatccccagcacgtcgaagtagctcttctgacacctccctccctccgccgccatctctcctcactctctccctctttgcgtgcctttgccctctctctctctacaaacctgaagaagcaagaacaagaacaagagtgagaaggacacagcagcaaaagcaatcttggcgtgtcgaccaacctgtcctttggttggtttcaggttcaggaatttttacttcttgtcagaccaaaaaaaaaaggaaagaaaatgagttcagtgaattcagttctccatctcacttaccccccaccacaacacacacttcttccaacctccaaaacctcgatcaatcgatccacccaactcccaagaagaacaagacgcaggtaaaacaacgcaagaatctctctaccaagaatcgtcgtcggcggcggcggctggaggaggaggaggaggaagcaagaagagattggctgtgcgaatcggggataggaggagacgaaggtggcgaggaggagtatttattaaggattcggtgacactcggcagtcggcagcacgcatcaacgagatgtggacgatgacgaagacaagcatcaccgccaccgctaatggcaatgccgagtgattaatcacctataaatctataattaccagtgattaatcccaaaaggaggtagaagaagaagaagaggggagattaatttgcattgatgattttgggggaggggattaataagggaggaggatatggattatggttaactactactactagttggtgtacacgcgtgtttttgcaactgctcgatcgcctcatcaccgtccacgtgtctaatctctagctagcacgacgcacacgtctccaacttattagcactaataataatcttttacctttaatttttctttttgggcagaatccagggagataaaaccgcagatacagcatcgcggatctctgtccacctacattgaccaaaaatgagttcaaggttttaacactataatccagggagataataccgcgttgacggtgttgtagttgtggttttcgctcagtttttctaattaattagacactagggtttggttacgttttctaattagtgggacactttttttctttgtataaaacatcggcaacagtctaaccgttcagaaaaacagtataatcacaaattgacatatattacccttcccttaaaaccttttttaaaactttttaaaatagggataacacgtgagtatgaaaaaatgggttttatgtttgtctaacagatgttttcgcgcaattttacgtggagcttcattttgaaaaatagaaagacatttatatacaaatcatatacatttatggcttatggtcgatgtttttgtcttcttccgcttttttttcttcaacctccccactactagatatggttccttgtttgggtaaaatcataaaccaatttagtatttattgcagtaagcattgcggtaatgtttaaattatgatacccacgaatgcacttcttctagaatttcagaagaatcaaaatcatatttcagaacaatgtagattatattacaagaaaagacgaataaacatctcaacgtagactccatgcctcgtgatactttagatacaacaatacatgaacaaaaagcgaaatcattgtttggttcgataattatgttttagaaacctatagggaaaaactttgctagacaaaaaaatgatctacatattggtgaaagatgtgttttccaaattaaattaaaaaaacaattagatcgtttctatctatctacctacat

SEQ ID NO: 5437 - DNA, 14959 bp, Oryza sativa
cacacgcgggatggaagaggaagaagagccatgggcatttccgtccgggatggcattttggcgaagacactctggttgaggatggtattctagcgaagcctgtttttataatggtattctagcgaagccattcttataggatggtagatatgcaattttctcagggacaagggatgcatgaaaaatacttaatttccactggtcgatatatacacgcactgttggtgtgtatcttaattaattaaatacggagaccgaatgcataagtttttttttaaaaaaaatacaaacacggacgctcacacttcgcgcacactcaacattataaacacacgtacaccttataactatgaacatctccggaagataattaattaaatacggagaccgaatgcataagttttttttttaaaaaatacaaacacggacactcacacttcgcgcacactcaacattataaacacacacgtacaccttataactgtgaacatctccggaagactagactgacatatcttgaaattgatgaaatcattacggacgccttactctcacgagtatgtcatctaccactaaaagaataattagttataaatataagcattcatgtcaagtttagaacttgaattcagatgagctgatttcacaacaaaaatctaaccaattaaactactctcaccttataacaaaagttatttattataattaaataagtcaaatgtttcaattggttatatgtatgaaaaaagaaatcggtcactgaaacactggaaaaataaatatatggtgaaacatctttgagaagtgaagtacaacataaaaaataaataaaaaggagaaatatggtcgaatatcaaataaaacactttaacccacatatgaaacattgaattttaacagttggaacatcaaataaattttcttaaaaatcaaaaactggttaataggaaacacttgaaatattttactctcatgcacgaaacattttgctctcattcatgatatgttgaatgtcaagtattgaaacataaaagtagtaatatactctcaatggtctcaagaaaaattaaattcaataaagcaagaaatgcaaggaactaacttaagggagtgaagaaccgatattgcagtatccataacttcatccattagggtttaaattttagtgctcatgaatatattatgtatacgtaaatagcttttgataaaaaaaatagcgatgtcagtaatatatgtctgccgttaatttttatttctttaaatatatgttagggaacatattcgtctgcacgcgtgtgtgcgtacattttaactgcgattttgtttttaaagaaatggggtagctcttcttaatttttgttgctaggtggcctagcttttttatttttttaagaactatgtggcctggcttgcgtgatgcatgcttccatccatccttgtggcacaatatcacgtcaggtccgatcgatcgactcctccagatgcatgaatacggtgtgggcacgatggagagaagaatactttattactcatatgacactttacaatacaacaaatccggatatgtttattgtccagatttattgtactataaagtgtcccatccagtcctagatttctatattatgggacggaggagtcaatttggatgattaaactgatacttttatatatactatgtagaacatacttctaatcttactcccttacatcctaaaaaattcaacctacgaagagacatgacccattctatgtcatcttctaaaacaacaaatctgaacaaaggatagtccaaatttattgtattaggaagggatttgatcctttgttaagtttatttgggatggagggattacttcctctaaaaaacgaatctagaaatatatcacatccagtattagtttggtttttatgggacgaagggaacacgtcatacatgcatgcaaaggccgtataggcaagtacaacgcgtggccggcaaagtggttgaagttcaccgggttccggtgaaaagctgtaccggccgccgccgcgtgtgcgccgtcgtgtcaccggcgggatggccggagccaaggtcgacgatcagagagacaaattcaagccgaatttttcatcgcctagctgatgagattttccggcggcggccgaccattgctgtaggaatttaatctagtatgcatggaccgacgactcactagtcaatgtcgatggattgatcggacagatcttaactactccctccgcgttgactcttttaaatatatttaattgtatattttatttaaaatttttatgaaatatataaaactatatttatatatacaaatatatttaacaataaattaaataataaaaaaataattaataattacttaaaattttaaataagatgaacggttaaatatacttaaaaaaaaatcaacggtgtagagacggctgaggtactattattccgacagatagtagcatgaagtatttcatgctgaccattgaccatccacgtcaggtacctgcatgcatgctacttctcgatctgctggagtactacgtcctttccaaaatggacttctcctccattgttttatataatacttcatccttcttattttaaatacaatcatatatttctatatccaatatttgatcattcttttgtagaaatattctttctattcagcaaaatatttctcaaacttctaaagcagtacaatttttcatgaaaactttctatataaaaaacttttagaaaactaactgttttaaatctttttctactttatatatgttatttatttaacttgtttatattcttaaataattatcacaaatcattccgctattcagattttccccccaattcgggttataattaacacacggtatatagctagctattcaactgatctccatatatctgttctgacgtactgttactgtcagcaggtagcatcttttagtttggactacaagtactcaagtagtacaatcttggtcttacttggtgtgcaaacgatcgatgtatcatgtatgcatatatatgagagaacacatatatgcatgttactgtcatctcctatcagtatcagtatatatagttcagccatgtcgttgttagataagatgcatgcatgcatatactccttctgtttctaaatatttgacgccgttgactcttttaaatatatttgaccattcatcttattaaactttttttaagtaattattaattctttttctattatttgattcattgttaaatatacttatatgtgtacatatatttttacatatttcataaaagtttttgaataagataaatggtcaaacatgtgctataaagtcaacggtatcaaatatttagaaacggagagagtatatgcgactacttgtacttggaagatctaccgatcgtcgacgatcgttgtctagctcctcgtcctatgaatttcaattattggatagccctgtactgcatgtactgatttgatgattctttagacaaattaatggagaaagaataaattgaattaattgatagtagctagtagcttgtactgttgtcgttgtcaagaaaaacttgagcgttttttctttttgtcggaatagaccagcactcgctcattcgtgcgtgcatggtagtgatttctttgataactaatggataacccggccgtcaaccagcaatgatcatatatatatctcggattaatcgagaattaagtcaaccattttatgttcagataaattactataactacatgtatgcatatgatcgatcgataaaagaattaagcacgcatcagttgatcgagctcgccctcctatacactcctcttcgtcctggtgatctttgggatgtttggagttgagatgagttgcacggctgtggttcctttgtcagatcggaatatgtaattacgcctagcggttgtcgattcggtgctaaatttcttctttgatatcagcgtgtgcgtctttctattaattaattataatcttttgggttataatgttttttacttaacttttgggttataatgttgtatttttttcatattatatcaatataaaatgtttttaaaaaaatgctaccaatgtttgtccgatgctcctatatgtactccagtcttccatttaacactgtacacatgtatgcttgttcgaaataattacagaagacttccccaagttcttttgcatgcatgcattttgggcagtttcagccaaatgcaagtggccaactggacagacaggctactcgacccgaatttaattaatttgcagcctgtcagttttgaccagagctaggtacacgcatgacgatagctatagtatagatccatccttgcacgccccaaactttatttttcatcgattgacatatcaatcaatttacctctctctactgctctctcaatctcataatattagacaaaacatttgaccaacaattattataataaaaattaaattttattttctaaaattaacattattgaattgacatttaaatttacttgaagatggttataattttgttgcaataaaccttatagcatatgagaattatgagtcaaagattagttttgaaaactgtgctaagtttaaccatgtcttatattatgggatagaggaagtatgtagaagtactaatctacacatcatcagcctaatattaatcatgttataattttctcttgatcgagtcttgtgtatctatgtcctgccacgttgcattatcataaagaaatttctaggtctgaatagagaatattatctaactacttttttttaatttttggccattgggacttactagctagccgcattaatttttgcaagaattagttctcaaatgtgcaagtcgtaacagcattgatttgaccaagaagagaagatagccatcaccatacatatacaagatgcttgcagtaatttttttttcaatatctatatatcggctcaaactttttttattaatcggctcagtctttcaaaagtgctcgatatatatatatatatatatatatatatatatatatatatatatatatatatatatatatatacatatatatatatatatatacatatatatacacatatacatatatacatatacatatacatatacatatacatatacatatacatatacatatacatatacatatacatatatgcatttataaagatatgagcgtgttatatttaagaaagaatataaatatacctgctcagttgctctcaattaacctccatttttcttaagaaagacatgctcctaattaatctcactaacaacgtaattaagcatatatataatacaaatctgtatcacacatatatggaggagaccgtctccaacttgggctctgcgcccttcccgttggcacacgtgccgtccaaacacatatattcgcacgtgggagaaaagtaaagctgaccgtcggatcaatcaatctggacggactccggtcgtgtcccatgccttgctgcgatggttcccagctctttcacgtttcactattctcttgtcctcgtgcgaatgttgcatgcatggtcaatgtcctattatgccatcccaagtaggcaaagctgtagggcacatgcctcctttactttcgggcccaccaaaatgaggttcttgtgttcaaaaaaggccaccggtttttgggtgaaaaaggagggcgcataaggctagaaacaacactgtgaagcgagtagcgtcggagcgaggggcgctagcggtcgtgggggacaggtagggcgtgtcgccgcagcgccgcccgctccgaggtcgtcccgtgccgccagatccgcgtcgccggcctggggaggagggcagcgcggcggcgaccacggtggcggtgacaaagccacggccacggccatccacgtgccgcgccggacgagccatcgccgctggatctggcgagctgccacaccgtacgtcgtcgagactcgtcgctgccacgccgctccctaacgagccacgacgcgcgaggaagacgcggacgaggcggcgggggcacgcgagaggaggggaggccaagaagttcgccgccgtcgagcgccaagcccgccgccgccgtcatccccagatccaccgacactccgcccggtcaccccggcaccgtctctgctcgtcgctgctccgcccggccccatcgccgtcgaggccgccgctccgctcgaccgccctagcgtcgtctccgctcgagcgtgagaggagagatagggaaggcgtgagagaggggaagaagacaatgttgggctcgaggaaaaggggggagagagcggaaaaggtggagaaaaaaaaggaaaactatatttttgtggaccccacttgaggatactgcattgtaaagcttgtgtctatcaatgttcctcagcccatgtggcacctcaggtccagcatattacgtgacgcattgctattgccttttatgctcgtgtcatttttcttccccgtcatatctcacctccttgtcgtcatcgtcctccttctctttaaacaattgagatatccgtgtctaatttaaaaaatttatgaattttttttaaaaaatagtcacccataaatcactgttcatgttttatcatctaataacaataaaaatattaattatatttttttttcaaataagacgaacagttaagcgttggacatgaacaattgcaaaactgcacttattttgagatggagggagtattatatagcagtatgtggtacttctcgatacagagaacctgcgctcctctctaaagtcattactccctccttcccaaattgatcattatataatataatctaaaaaattgcagtagccagctagagaagatgcatgggaaatataagcgatgatgtgggaagggcttattcctggattgcacacagttcttttattaattatggttgtattgcaaattgaaaatgaattagttgaaagtcaatatgttgtttcattttttaagaaaacaattaatttgttctctgagtgtaatgtatatgatttttgtgaagttgatacattttacctcaacgaatctaaatgagtggatatcctccaattgaaatgttattgcgttggattgagagtacaaaatcacttgcactgcaagtcaatgtacaaaatcgatcccttgaaagttttaaaaaggataaaaacaagttgtggtaactaataatgcatggttatatgtcggcatatcttccttatagtaaaacgaagggaaaaggactgtacaaacaacgatggacagtggcatatcttaattatattatctttcacggaaaaggacggttactgttaaaaaattgactatagaaacaccaaaataaagtatcaggtcatttcacgtcgtgcatggcttttaagtgaaagctcactaataaatatattaaatttcaccataatactctaatatatatttaggaaatactcttgtctaataaatatcagttggtgtatataaggggtctcttcggcatcctggctgcggctgcggctgcgccgtgtgtgtgtggcactgttggtgctggttacgccgcaaccacgaaacagacagccgaacagacccaacatcacttggtttagccatgtgtcggccctaataagtaaggcttgcgaaatcgatatccatatgactaactttagaggtggcgaagggcattgatcacgagcctttaggtctataatttatatattaacttaactctagctctgtatgaaattacgaaaatccattatacccgcgtgataaatcttttatacttaaaaggttatagagatgtgaaatttgtgacacatagctaaaacttctttttgtcaaaatatatgtgaatatactcatgtataaatctgggttccacatattgcttctatctcagaataaatcaacctaaaatatgatgagatataacataataaatctaaatttagataggacgggtattatcctatcccatcctaaatttgattattttgggacaatagagtatatatgtgcatctccggtttatctccacggattctgccaacagcaaaagaaaaaataaaaaagaaaaggatggggttagtaaagttcgagatatgctgtgtgctttgagatgacacgtggacaatgagatgggcagatggaagaacacgcgtgaactaacagccaatgcaaaattctcttccttaatcagtatataaatctctcctagcgtaatccctcttccactttgctaactgagcacgcatttatcttgctaatcactcggcattaaattagccattagggtcggtgctaatgtacatgggagtgtcactagcagttgttaatttagcagatatactaagatggtgtttggatccagggacttaactttagtccctgtatttagacactaatttaaagtattaaatatagactacttacaaaactaattatataaatggaagctaatttgcgagacaaattttttaagtctaactaatcaataattagagaatgtctactgtagcatcacataggctaattatggattaattagactcaatagattcgtctcgcaaattagtccaagattatggatgggttttattaatagtctacgtttaatatttataattattgtctaaacatctgatgtgatagggacttaaaagtttgtagtcccatttaaacaaggcctaaggtttaaaaaagatttattttcattcgtttaagtgattagattttcattacttaggttcatctctcaaacacccgattgcttgaaatatttctatgtgttagaatcaatgtgctcttgaaatatttaaattacggtataaatttaaaatttaaaagttgttatattttaaaacaaagagtgtaataaatactacccctgaagcccaaggagaaccagctaccagccattcttcttcctcttcttcccttcactttctcctctggccgtcgccaccgattttgagcaatgtctctgatcaattaatgaaccttaattgaaagaaaaccaccactagtagtaaataatcaaatcttcttaattaatcatatactcagatacttgaattcatctggtcttatttaaagaaaaagttatatgaaaatgggatgcatgtgtatgcacagatcatatatggagagtatctcctggccaactgctctcaacttgcatgtctgcaactaaccatatcgtctcatactctctgatctgattgtccacgtgcacacgattatatatgctgcactagtgtataatgatgttgattttaaaatattttattgacaacttatcttaatacaaaattatgtaactattatttattttataataatttgtcttatcagtaaaggtattttacgcatgactcatactttcacatattcatataaaattttctaaataaacatgaatctaaaagttaatgatatcatgtatacatggaaaacgatgaggtactgaagctagctaggtagccagctttggatagttagttggatattaattaattaagtattgtcaggccggcagtttaactaattaaattagcacaacactactccatgtagtatgaacgaatctctttgattatatgattctctttgacgcttaatttattcctcggacagaacgatcaagggaataatatctctgtcgagatatgtgaaaaatgagcacttttttcgtccatcgaattcaactggttgatgcatgcaattgttagagtagatcatagtagcacatacatatatcctttctctgtaaaaaaaaataatgcaattttatgtgtctagattcatttctaaattgaatttttttaaggaacagataaagtaaacattatatttttcgatgatcgacagataagagagaaattaaagcaagaaaagaaatgcaaggaactgacaattaatttagtcaggtttctggccgaatccttcaaatgcatatatacgtgtggacacgaacaatttagtcaataaattaattataagttaattaattaatagttcatatatagacgatcatgccttccagcacaaagaggttctccacagagggacctgtcacgaaaataaagaaggtaacgacaggaatccagaaacgtctctcgaagctcatctcttagatttacatttttatagttttctcgttcaatttttttttatagttttcgtttctacatgtactccctccgtcctaaaataagtgcagccatggttttcagcgcccaactttgaccattcgtcttatttgaaaaaaattttaaaaaaattaaaaacataagtcacgagtaaagtactattcatattttatcatcttataataacaaaattgctaagtataaaaaaatttcaaataagacggacgatcaaagttgggcgcggaaactcatggcttcacttattttgggacggaggtagtacaaaccagtgtttacgattctgatgaaatccgaccggatttcatgaaattttgacgttttgatgaggctcgaaagtaaaaaccatatgaaatttcgagaagtttcatccatatttaaatttgaattgataaaaaaagaaaacaatcaaataaaatcttataaatactatgataccatagaacctattgagatataaagtttcaaaaaaatgatgtatcgtgtatatgtactgaaacttacatcaggaaagaaaagaataaagaatttaaaaaatggaaaacatttacatgggccaaaaccgactggtattaaaaaaaggaaaacacttactgatcgaaatttcgtaatttcgccaaaaccgaccggttttcaagaacttgttggaaaactcagggaatttgtatccaaattttggtttatgaaatttgttcgaaatttaccggttttctaccagatttcacgaaattccgaattccgccagtgctcgaaacggaagggcctgtcggaatcgtaaaccctggtacaaactatatatttactcatgttttctctatactattttaaatgatattagtgattatgtcgagtctgcctccaacatcacaaactgacattactttgaatatatcaattaactatgcctaaacaattaactatgctataatttattcaataaaattgacacatctaatatcggttccttaaaaaaatccatgtcatatgcatgcaaggttgccggtgtgtaagtacgtggccgcacaaagttggcagttttcagtgaaaggttacatcaatcgcagtggcgtgtacaatgttgtcgtgttaacatgatcttattaattactttatccattttaaaatataaaattttttatgtgacataacatattcagattcataggtatgttttcatccaaccaaaatcttttatattttagatcggagggagtactcagcttttcaaccccagctcatcaatctgtggcaattcaccccaaatttcgatcgtcaaattatgcatttgcacaaatgactacatacatattttgttcgagaataattaaacacagggcattatattcgtgcagctaattaatataacgatgtaaaaaaaaaaactaaagtccaagaggcagacatgcagcagtcaaattaggctttgaaattaaaccatgcagctagcaattgctatagctcgcaaaactgaaaacaacaaagagagaaaattgaacacaacttcgttagagtaacgcaaagactttcttataagaggaattctccgttttgccatatatataatagatccttaattcgtcttctggggctgatcacaacgacactgccagattcttcaaacaactgagcaacgacagaaatagatcttagtatagccatcgaaccttgaccaggtttttggattttcatctgaatatatatatagagtggttcatacatattgggaaacttgcagtgactaattagcaaatagttaattattccgattaattaagcattgttgatgttacggtaattaactggagtatgtataatgtatagtatatatatccttatcttgatgaataattaagcattgttgtcagatatttcttcatgcagcatgcatacatgcacaataaatcaattggaggatcctcccaattaacttgcatgcatgacttttgacatattttcgactaatcattttatttaagataatatgtaatgattattatttattttgttgtgatatgtttcagcattaaatatatattgagtaccttttatatttatataaaatttttaaacaagataaatagtcaaacatttatctaaaaagcgtatacaggcgatcgtacatgcatgactgaagcacgctagctcatccgatacagatagatatatgtatctctaccatctagatcacatcaacctattattgataatcatccgtccccaaataactatcattctagaggtcaaggggtaaattaagaaaaagataaaatgacctatatatatgtcccttattaattaaatgataggagaatagttgggggtatggagacaaatttaaatgagatgagatttaagtgaacaactagtacttaggattacactatttgaaggtaaatttgtattaggaaatccttattattttgggacggaggcacggaggtagtaattttctcccttgatcgagtactatatatgtatatatccacccatatcctgccacgttatattaacgggaaggaatttttaagtttgagaaaatgatataacaacactgttaacttagggcaggccggtgcgactttaattaattgccttgccagtatatttttttatcagaattaactcacaaacgtccacatcgtgtaattaagattaatttggtaaaggagaagatatacaatcaccacctcacatactccaaatgaaccagattatctggaataaaagtatatgttattatcctgttctgctcaacttctaagcgtacttactccatccaaaaataaaacataatattttagatttaataaaacataatatggtatggatatagagatataagatattcattgtactatgttatatccaatcctattttagatttaattattttaaatgaaagggagtggatcgatcgcatatatatcgatccatcgtactcctgttatgtcctttatgtacgttttttttaatttccttgtctcatctttcatcgagccacactcatagatgaaggccacacacagacggtgcaatgtactataatatgtcatatctagttatagatttatttgtttgggacgaaggaagtacatggacaattagcgagtgatgagtacaacttgtagagaccggatcgatgtgtccaaattataccacattagctaaataacgaatattgaatataatatgcagctcttttttcttccgtttatatatatacaattgtactttgtaaaagattatcaatttacaacattagaatttggtcatgccctatcatctagctgcatagattttattttttttccacttcaataatgtggtaatttggtctagtggcggacccagaaaaattacactggggtgtgcccattctagttatcactccaccgtatatttttttaaaaagaaaacacccaattccgatggaagaatttttgcagattttggtcggatttttcaaaattctattgtaatgtggtccataattcatgtatattgggaaacttgcagtgactatatgtactctcagatatattaatcgaagtcatcgtttgatgttaaggtaattaactggactatgtataatgtactagctgaatgcccttgcattgcaacgggttattcaaaataggaaaaacataaaaaaaaatcttgttgaaagaaatagcttctacttggttgaaacaagattcttcatcttaaaaaaacaaaaataaaaatacaataattaagactatatttctcaatgtgagatataaaccaatgtgattttcagtacttaaatatagattgatggctacatctgtgttaacgaaatgtctatttcatatggtaatgtaatatgtacttattaataaattgtgttgtataactcatttaaaattacaatagaagccataagatgagaagaagcaaagcaatagaaatttagagagaaattaaattaaacaacattgccagagtaacgcaaagatcaactttcttataagagaaactctccgttttgccatatatataatagatccttaatttgtcttgtgggattgacaacgatattgccagattcttcaaacaattggagcaacgacagatcagagatagataatagtatctcgccatcgaagcttgaccggtttttggacttccatctaaatatatggactagttcatgcatattggggaaacatatccctatccagattcattgtataagttatgttttattttattctatatttgaaatattttgaaatgaagggagtacatgatacatcgcataccgatccattgtactcttgtcgtgtccttcacctgtgtttcctttccttatctcatcttccacctttatcgtcatcattgttctcctcgagccactcttatggttgaaggccacacaaccgatgcaatgtactcttttgtgtcgatctttcattggagtactatggttacattacatacatgtgcgtgttaacggttactgtttctaggtttgtcgacctcttatatgtgtcttggtcatctctaagccactttttagggaggaaggtcaactgtgtttcacttttatcgtacgtacgtggacaattagtgagtgatgagtacaattggatgtgtccaaattatcacactagttagttaaatatctctaggattgaatgtaatatacaactcttttcttccgtttgtgtatatacaattgtactttgtatgtaattaattatcgctatcaatttacaccattacaatttggtcatactgtgatctatctatatagaattcattttgttttc

SEQ ID NO: 5438 - DNA, 19356 bp, Oryza sativa
ttaaaatggacagattggaaaccctttctcttcggcatgtaaaatggagtggcagattggcacataattagttaattattagcaacagttttaaaaatggattattttaaaagcattttttctatataacttttttgaaaaaacataccatttagtagttctgaaaattcacatgcggaaaatgagggatagaagttgtgaaagggaagaaaagaacacacccttaagatgcattgtttcctttacaccaaaacaaatactcaaagaaaagtcatagctaaaattatttgttgaaaaatttatatgtttggtttatcatgtgggcaactattttggtatatatagaatagttttgcaattaatataggtaaattttgagttgtaatccaactggtaagggcatatttttgtttgtgcttctgccacattttcaattccactattccatagctgtgtaaatacaaattcttgaataaaaaagttgtagctgtacagctttcttcgtgtttgctgcttttatgttccactctttgggtttcggatattttacaacaatttgtgtatgatacgggagcaaatccgagttaaaatccaacatttcaacaaggagagatctgattcgcttatagaaagctgtgttgcaatctagatagtactacaatttaatggtattatatgagagtaagcatgttctataataatttacaatttttgcacttttttaaatgaacagttttagaactttttgtgtagacaaggtgggtctaagatttggagacaagtttattggtattatatgagagtgagtataattccagcttgcaacttgtagccttctctttttcttgaataaacagttttagaactttgtgtagacaggatgggtctagatttggagataatataaagtccaaagctttatagaaaagaaaaggttcagttttgttcttgtcatctgacgtcaagtgacaaggacatttcaaggcatcttggttgcttcaatactaagtgttcagtacaagcatcctacgtaacttcagttattttacattaaaatgacttggctgtaaataacggctactgtaaaaatttacacttaggattgataattgcttaattggtgaagcagttagctccttatttatcacttgggagaccaacgaatagtatcagcttatcacatatatggccacctaatgtggattattttcaactgaacattttggttgcagatgatgtaaaccagggatgatttgttcatgcaatgcttccctggctagtagttcaactctagctgttcaaccttgttgaacttgaacccgcggattctgatctcttccttctccgaggtgtccttgtgatcgacgtgctggatagtccagcctttattctctatatgacctgtaacattgaactgaaaacgggtgtcgtatgaataatccatcagtcaaatatgactaaattgtttgcgttttcggtattcatgtcatttacgagttggtaattcgaatgcgtttgtatttttattaccttggcttcatctttggcatttacgataagagtgccatccaaggagaggccttgaatggtgatgttcttgccattgatgaccaaggctgacctctgagaaactgaagagttgctatggactttggctttgacatccttgaatataagaccccaccttgggatccaggttatgcgtggccaaacctctacctcttggccattgaaagtatcaattacagggtcagctatctgtgcaccagcctggaaaaggtgtaagagagcttgtgttaagctggagcacaaacaatttcctatccaaaaagaatatttctaaagtgatcacctttcttaaaataaggctgtttgccctgtaaattgccatctctcctgaagtagcactatggtaaggattaccttttggaacctgcagaaggcatattagaagatagaagaccacatgcgcagtacagtattagactggaaacgaaaagggaagctgatgtaaagcaactgaaccaaagcagttggtataaaactacaaactgatgcataacctcttaacgtcatcaaaacacagatcaggtatgtagctagtatcttcagaagtatggatgaaatgtagttttcaatgaatcacaaagaagggcaagttgaatctgacaacaggcctattgatttataggaacaacttttaacctgaatcataattcattgacaccggcataaaattcagagcaaggccagttctcacgatgcataacttcatatgcgagcataaatatttaatgattataatataaattttcagtctcgaaaggcagtgaaatcatactttagcagaatcttcaggattattctttacaggagcataagtaagccacgcatccatcacctagcattcaaggaaaaaagaagagcaaagtgagaacagacagattaattatcggaaaaattctcgctcaatatgaactttgcattcccataccgtaaatccaacttttgcagagggaggtagtgtttttggatagtcctgcatcatgcactcaagacgagtggacgatttaaatgctgtcttggtagaatcagtatacctaaattgaaaaaatgataacagattggggttaaacatttgaaaacaaaagtattttaggaacttattcacaaaatcttgaagtgccctgacttgtatctaacaaaattcaaaacaagacttatctactccgttgactatacgaaatatttgcaggtttgctgcaaacttgttctgaagtttactttgtcagtgcactagctcagagtaccttaatggtactataggaataccttgtcgcatagtaactaagaacaacttccatgatcaatagtacaagaattggtgataccactgggaagataagatgattatcagcacatcgattggaactgactagctgacattagtgaggggaaatattttcacaacaaatgtagcagcagtatgaagtgaaaatggaaaagaagtgtgcacaaagaaatcagaggcatacaaacaagagagaagttttgcttccttaaaaacccactattggaataaaatgggagtcagaagcagtgtgcaatagtttcactggagtaagtaggcagaaaaattacttagggtttacaaattccgaaatggcaccgtgtgttttctggagctcctccatatatggtccaatctccagtatcaactgcagaagtgtaacgcacagaatcagtagaacaaaaatcagtggtcccaacaaaacatgcatggctaacagaagagtgttgtttatttctaatcaatatgcacatcgacaagtaaatagatttatcagaaaatcatatttgatcaacatctcatgttaagcaccatgtttttaaaatgtcttgaaactttcaagtcggggtttggatggtcagttggcagaaagtacctggtttatatttccagggtatggagagtaccctgtttcacaatttgcatctccatcaggatgtccggttgcacgaaggagtggatcaagctgattgtactcgacattgatgaccattgttctacctatgcataagaatggttctatgtcaatttttgacaaatgcaaaacagcaatataagtggaaaaagaaagtgaaaaaaaaaacattgttaaatttgatgtgattagatgccactatggatcgatcaattatattttttctatttacaatgttgatcccagaacgatgaatccactgcttaatccatgagtaggtggtagtaaaatttaccatcgacatgagtaagttttgttattcctccaatggcttcttttgccttccgtggaactgcaagagaattaacattataacctttggtggcgctgacacctaatgctgatggtattgcctgtaaatacagtgggaagatctatatcaatttaacagataccatatgtcaactcattccagcatttgtctaaaaaacaagctctcaattgtaagacagtagggaagcaagagtacaaacattgaagagcaatccatttgtgtcctggaaaaagagaacccatttccgccctgtgctcttcctacaaaaaagtagtataaaacacacaagatcgacatgcattgatttgaacttagcataattattttagcaatttaattcatgtacattacttctaatcttcttcaaactggcaaaaagcgactaactacgaatgttgaattaatttaccattgctcaagcaagccgcttgaataaagaagagcgtggacatctccatgcccatgtggctttgtctgtcaaatcacaaaaatgaaattaagaaacctccaggaaaagaaaaggtaacaataggtgacatatatttaaatcttaattatagagatctcgtatcaaaattagcaacctggattttgtacttgtcatttgggtctaatgcaagccttgcatcattatcagctaaacatgccactttttcctgaaaaaataataagcattagcattaaatagcgaaactaacttttgtgcctactgaagaatatattttaactaagaaatacatggaagagatagcaagatagaagactacctgcttaagaatgtgcacttgtgatggttccattccaaaataggagtttgactccaaaagtttgacggttagtgcatttgtgtcatcagaagtcataataacaaatgggatctttgtattgcattcacctgcaagctcaaggaacaaaatcaatcagaaccaaatcaacatctgaatcgtctttgagtctttccatccaaagaacgtctaaatagtgggaaacacatatcgagcaaccattcacaacaaccacaagcagttcaaagggaaataactaaaggctaacacaggcaatacctaccagaaataccacagcgatattagaaagaaaaatactttgataagattagtttatcaaaacaagaagtatcatccctgctgttagtcatgagttcattgcacatataatgtagtccacataccctctaccaatttgcagctcgcctcctgcaaagctagaatagattctatgtaatgttgaagaaagcattttccagtagttgtttccctgggaagtgcaacctgcgcaatgatattacccatgaatgcttgatatcaaggtgaatttagcacaacaatataatgtccagagggaaattacatgatcccatttctggatttgctaacaatcatatcaaaataaatgcctgatggacagtctagtttgtaagcacacaagatcaacttgactacctgtacactttgacttgctaaaacatttgctatcctatccaatttccaagctcactgaaatttgctggaactgtggagatgtaatcactttcttcctttttttcattaacatcttagttttcatatacgaattgtggtgcatgatgttgtgataggacgattcagcaattaatgtgaatatatcttagcaaaataagaggcatggaggtgaaatgtttcaaccaaacagcacaatcatactacatcctcatgactgcaaaacactagttctactaccacagcatctactttggaattgtaataaatatatgcccttttgtttgctagaacttgggtcggatatcacaacatgtcataactgggaatctttaactggagttaccagtcaagaagctagctattttcatgctttgttgcaagaatggtatttccaactggggtcacattaccttaattcctttgtaaccaagtctttcaccaagcccaccagctacaagaacaaatgctgcatggcgggcttcttttaccccagcttcttcaagcgaaacaaagttgtcatcaccaaaggtcaatacttcccctgaaggaacctgtaattatggtacctctgtgaacaccatgtagtcatttcagattgtagaaaaatgcacatgcaagtgcacacggattcagactagaaaagggaagaattaacatcattcagatttgacaatagtgagctatacaccatatattagaaagattatgcagtaggagttatgacaccacgaatccaattcatggaaaaacagcacacatcaagacttacagaaggtgagaagccatcatatggattttttcctgcctttgaatctgctaaaagctttcttgcattctggatgtacgatgccagcccaccaggatagcttgaattaaggcggcagacctgaacaatgacaattttagcagaaattcaaaataataataacaatttggttatttaagcgcctcttcagctttcttggcctatagatgatatcaacaatggtaagaggacatggtgcttcttagagtaagccgacaaaaaaaaagaaggtttataggtgcctcatatgaggcaatcccaacaagaaagcaagaagaaagtattttagcctttgtgttagtatcagtaaaattctataaaaaatattgttgttttgtgaataagggacaaacctggtcaaagaagttccttttcttgtcatcatcaacacctggttccggccagtgttcaaacaaatgtgactgtccttcactcagcagcaattttgcaagcttaacctacaatcaccaccaggcaggaagcattatggaaaacacaactcaaatatggtaagtaaacaatacattacccattccgagtaaacagttgtaagcacaaatttcaggaattttttttccaatactttgtactgtgttcccgtagaacttactagtagggtggggactgaattgatatgaaaattgcaggagtagaagcaaagtagttaagactacgttgtcgaacaaaatcccaacgaaacagaggtagttattcgttctagcgtcaaatcatctggtactggacctaaacttacgactcgtaatcacccaaaaaaaaatcaaatttgcagccgcaaggccacgcaacgcgattctagcagaaaactgcaatctatccatccgacatctaacgcaggacgtcgcaggttgcaagccaaaaaatcacctcgtggggcgcgagcagcgggagattccgccgcagcggcggcgcccagtcgtcgcccccgccgccggagatccccagcgccgccaccgccgcggcgccgtcgccgtcggaagccatcgcgcgggcgtggcgtggcgtgtggagtcagaagtgggggagcaacaaaaccgtctcccaaatcgctcacaaagtcgcggtttttatatttttttttgcggaggaatcggtggataaactgaatcccaaatcaattaggagtagtaactgcaactcatcccgatcgatccgtgaagatgatggtggtggtgggcgcggcgcggggcccacatccaccacctcggcgacgagacgagcatccgaacaacgggtgacgcggtggcaatggcattccccggctttcacgtgagcgctcgcggcggcgggtgggcccgcccccacggcgccgggtgtcggtggtggccgccgccgataagccccgtaagacttcaaacttccaaaaattattccgtccgatcaaatgtttgggcatatacacgaagcactaaatgtgaatgaaaaaaatcaattataaattatacagattgcatataaaattacaagatgaatcttttaaatctaatttcaccatgatttaacaatgtgatgctacggtaaatatttactaatgacgaattaattagacttaataaattcgtctcgccatttacatacggaatctgtaatttgttttgttattggtctacgtttttaatatttcaaatatgtgttggtatactttaaaaaaaattggcctcacgaactaaacacggccgtactagattttatctagcatgttttactgtattttggtgagctagtagattttagagcaccttttttaaactgttactccctccgggttgataatacttgtcgttttggacaagggcacggtctccaaaaaacaactttgaccattattttctattataatatatataaagtgttaacaaatatataaattttattaaagtacttttcaagactaatctatatatgtagttaccatatttgaaagataaatattttaaaaatgattcataatcaaagattctaaagtttgacctcacccttgtctaaaacgacaagtattatcagcccagagggagtaaacaatgttatatcttttggaaaaacaatatgtaaaagttcttttaagatataaataaatacattttttttaggattattgtaattaaaacttaactgatcattatctttcacgttttgcaagcgctgagttcatcctcatctagattcagacatctgtcgcagactcacgggttctaatctggaatctcaaatcatttacaacagcatattcgaattttccaacatggcatcacttggcacctcacagttgcaaatgtaaacaggaaaaatgaaacaaaaatcttgtatacatgtataatttggagtatatatgacgaagccacatccaaatggcataaatttgtactactatattgtactaatacgtatacccggaaagaacattaatttttcccctcattttgttatatcatcatgagtttactcttacctagctacatgtgtatatgtatcaaagtgtatgatgaaatgtcagtagtagtggcctggcaggttggtgctactccggcggcgcgaggttgagcaccatgtcggggcccttgtcgccggcgacggagaactcgtcgggcaccggcacgcccagctcctcgcacaccagccggaccacgcgccgcgtcacgccgcccagcgacatcttgttcaccgtcacggccatggccagcccgtgctccacgtcgcagaaccccgtcgacccgcccatcccggagtgcccgaacgtcgtcgtcgccaccttctcgccagcgccggcgccatagccgtacctcctgaacccgagcccgaacttgccgttcgggtggatcatgccggagaagtcgccgacgcccatgaacgcgtcgagcatcttggtgccgccgtcgacgaacatgctgctgccgctgccactgccgttcccggccaccaccgctgacaccgtcgacccctcgtcgctgccgtcgctggtgcggagctgggtgtacccgtccttgtcagcgacgccgacatcattcttcgaacctcccttcttcttcttcttggacggcatggtggggaacttgggggtgtggacatggctgccgagtggcggcttggagccaccaccggagtgcggcggaggaatggcgccgcctgcccccagcgcggcgtagtatcgagccagagcgcgcgccgagcagtggccattggcagcggggaggatggcgcggcggatgttgagcgtgttgaagaggacaggtaggccggtggccatctgggcgacattgctgagcagctcctgtgggacgtctggtcctgctctgaatcctgacagcttctcgagctcctccatgtcgactgtcagtgccgcaaggcgagattcgacacctgacaagggcggaaaatcgatgaacatcacatattcacatgtaggatattatctacaacggtaagaatatagcagcaatttcactcatcaaacctatggaacacatctccaaaagcgtgggtgagtatgtttatggaacatgtcaaaacaagccagagacagagaaaatgcgttctttggacaagcatcgaactcatgactgtacttcacatatgcattgtagtctcttttcaaataatctttggaacagtaataatagcaagaatatagcaccccgcaaaaaaaaggtaagtatctagcgcaattttttcactcatcaaacttatatgacatgaacacgtctcgaaaaggttaatatgtttatggatttgtagaaaaaaaaaatatccatcattatatcaatgcgtacacctattttgttgaaagctaaactgggaagttttgttagttatacctggaggaatgccaatatatagctccccgttaatgtgaagaggatgaacaatggcctcttctaggacctcttgaagcttctttccggacgcatgctattatcaccaaatatcagcgttaggattcatgaaattaagttcacacagaacagtgacatacaaacacgtgttgttttcagttatttacctctactttgccaatagcccataaccaaaaaaatataacttggtgggctgtgcatttaattaagcccataaccagattaaaaattagtataactatgtgaagccataaagatccactgatccagttaaaaaggttcagtactcccattgaaaataaatgaactcggtgtatgtgatgctcgggagagacatacctctatgattccaccacacagccaaccaaaggataagtagtgatacatttgttcagaacccggttctgtttccggcgtacacttggtaatctggtgcagcatctcttcccagtcacataccaacaacggatcactcttcatcacatctcccaatgcattatgtaaaccagatgtatgattcagaagatgatgaacctttagtagaaaattgcaaatcagagtctgttaatcccaagaaacagtgtttcaacaaacaacaaaaaaagaagttctagtacctttattagctcttttttgttagttccgaattttggccatatattggcaacagtctcctcatacttcaacttcctgaaagataacagtatgctgtcagcctgtcactaataataaaaaaacactggatatgagaggaaagattctcatatcaaaatttatcaagaggggtgaggcttgaacctgggtcggctagcccacatcttgtggtgctagccagaagaccccaggcctttctcagcctgtcactaatggattgcaatgcacataaaagcctaaggtagcagggaaaagatgctcaatgttctctgtagtaccatcactgttagagatttagaggagttgcttgctttatacaagaatctgatgctttatactttttaagcactagaatgtagataatatcaagaaatattgtgacctggataacgtggatgcaactgcaggaaactacactgcaccaatctaaattttatgtttcaacagtgactcacatgtcataattgtgaaggattgccacctgcactaacatggttcagcctaatcatgggaacactggcacccattctccatgtccatttttattgttcaacatagactcacagaaatacggtacaacaatttgatgcttcagaataaaagttgtttgcgcatgtgagtgactttgccatgtatataaagatggaatatctttattttgttagaatgttagtagatcaagaggaggcctacttaaacagggtggcatactaccatgctcgttactgttaggccaaatattatttttgatacactagtaagctactaagatgaggtattctaaatataagtcgttttggaacttctagccacttcttcatcttctcttccatgcttgaccttggcaaataaatgctagctctctcaacaaataaatgattcatatctttcatgtagtataagtgtagggtaaaatagtcagttctgttgttttcttaattcttgtgcataagtctaaacgacttatttggaatctgaggtagtataatgtactgtaatacgacggcctgcaaacatatttacactagcatgttaagaaaaaaaaaacttggcattgtgattaagcactcaccctttgtcaacaagccaatgcaccatgccagcagtgataccctttgtcactgaaaaaactggaaagagagaatcaggttgaacaggacgtggatcatacttccctaacgtaccagcagcggtatctattatgacctttccatctttataagcacaaacctggtaaaaggaagatttgtaaggcaccaatgaagcaaagtcatagcatgtaaatgaatcgcatgagattatcaacctacttgtattcctaaaattttgttgcttcccaactcaagcagaaggttccgcagtttagactccacctctgagttaacaggtgagtcataaatccactgactgttagctgtgggcccacgtgtcatactcctaccatcaacgaaggcataaataagcaataaaaaagatgctttactctaaggctcctgcaaacagtagataaacaggcatctcaccctagcaaagttgattcagcaaatggcctcatgatgtctagataaactatcctaacatttagtgatgctgatagccctgcataagtgcagataatagagagcatgttaccatgatactggatatttcaaaggaaagaatgaaaaacatacctctaagaagattcaaaaccctcatgaatataattgcatcaccagggaaagcatcaacctaaaggcgagaaaatgttcatgtaacacctatttcttggttgacaaactaaacacatatgaagtaaaaggcatgcctactcactggattgaaacgttgaacctcctttttattcattttcatcttttcttgaagtgccttgacatttcgttctctttggtcattcaatgtctttatgttctcctaaagaaaagtcataaccaaacagttaatccaaacttccaaattaatacaagaggagggatacagattacagtagtggtagcctcctacctttgcttcatttgctgtagtggactgccgaaaaaatactgtagcgatctccatagcctgctcaggcatgtcaacccgcagcttaagccccatctccgcaaaggctgacagcagtgccacatggtctccctacccattgacatgttaaatatcagaaatgtagtttaagaaatttaatcatagcatgagcaactggttcacaaacagcaaaaggtagaataaaccgaagaaccctatctcacaaaattttaattatcaaattttgacacgtcaaaatactagtgcatgtggtcacttaacgttccagtgcactttctaagtctcaaagttgattcaaggaacaccaaagcatagtagagaagaaaataaagattagttccagattctgtctttgttttcttatagcttgttaaatgtgatattcatctgccactttgcaataccacttatgagtaaagactgaaagataggactaaactaggatacaaaaagatcggaaagtaaacaaaaatccattcttgttataataaaagatcgcatctactccaatggaaatggctgcagcttgtagatgccaacaagacaaccatgtttgattaactccattatttgtttccttgtgtatgtattatttagaagatcaaagtgtcaaacctcagcgcatgacaaaaacatctttgctagtgcctgcctcattgattgagatatgcgtttagtaagcccaaaatcaaggagaatcggcttgtgtggaggttccttgctaacaagaaaattgcctacagaaaaataatgcattgtcagcacaaatgaatttgcaagaattacagatggagaataaaaaaattgaggtgacagaagatctcttcaaggcacataaaattgaaataccagggtgaggatcgccgttaaagaagccatcaacgtatatttgatgagcatatgcacgggttatctcctccacaagtctttgcttatcaacaccatatgcttctaacgaatcattgtcattcaaacgaattccatccatatattgcaaaattagaaccttatcagttgactggtacacaaagaagaatggattagatgatctgtcaactgaaccggaaaaactgacacgatgacaaacaggatgaagtaaaagaactcagacctgaataacttctggaatcagtacgtcaacagcactagagacagcaccactctcgcaattggtttttcgactaagattactggagacagcctttgtgttctctaaaattaaggattttatagcatacattatcaggatgatatgttcattagtgactagacctttacttttaaaaaaaatatggatgagtcacaagagcatgcatgttcttttatatggagagaggagtatgagaactgaaaggggtaattacctgcctcatggttgaaatcaagttcctttggtgcctccttgcaccattcatctatcatcgggttaaaattatattgaggctctgcccatgcaatccattcaactaatgattttgcattcttcaaatcctgacaacattaagaaaatgatatagcaatcctgcacattttacataagtccgttttttcagaatagaggcaaacctctaatatgatatctttgataccatcatgttggattttcacaactacttctctgccatctacaagagttgcacgatgaacctgtgctatctgacaaaagtacatgaagactcgtatgaacatactaccatgacaaaaaaaattagcaagttgctcgaggatttcgtcaaaaaaaacatactatgaatttccatcagatgaaagaagttcattccaatataacagaacttactgatgcagttgctagaggatccagcacaaaattagcaaacagatcattcatgggtttcccaagttctttctctatggttccacgaacctgaacatgagagacaagaattgagttaacgactacgattagctacatgttaatatttggattgactacagatgaagcaaaattagttatgaggatgaacctcttcaagagggcgaggaggaagcgagtcctgcaactgcttgaggacatttatgtagggttcaggaagcacatctgctcttgtggataaatattgtcccattttcacccataaaccttctaactctatcatcaggttgagaacacgacgagcatttcgctcgtgtgtttttgtccatatagcatcctttttaccagcgccaacccatttaactctcttctgaactgcctgcttgtacctcaagaagatgttaatctgcttctactagtagaatggattgagactttttattgaaagaacagcatgaagaagtgatacaaccacaccttatagtcgaagtatataaacaaggccatggaaaagactttgaggcgcctggttaaggtgtttccccatcccattagaagtcagcacaacagcagaagagataacaaaaaaactctgaaacaccgtagttaacaactctaggctcccggccagacggttgatcttctgcaatgtcacaagtacaagaaggtaaatccaaatcagcattccttagtcactaccgatcacatacaataggctcaaaacttcttcatagaaaggactgttcttctgttcttgacaagtcatgacaagataacgaattcgcgcgacagcttgtatttacattaaatcagacaaagacagagtttaaggaaagcaaataaagcgtataactacaaagaatacaggtttcttcctcacaccacattcttatcatgacaaagggataagcaagcagtttccaaggagctacaacatcagatggtaggtactggaaagccaccaagggatgcaaacaaggagtacttacttttgcagtagagcagaagaaaacaaactactactagcttgtgtagtattaaggcctttaaacataaaaagaaacgaattttttgcttgatcacatcaaattgagcggataaaaccctcggatatcctccggacatccacaattccgcaactttattacctcagaatcgaatctaaatcaggggcaaacgacctaacaacgagttcagctgaactccaaaagaactttttttttcttggcctctccaaacaatcttctaccctacatcagagaaaccctgaagaaacctgattccataatgggaggggcacgaaatcaactcgatccgaacaacaacaacaacaacaagaacacaccgaggacgaccaagaacgaagcggccgcggggttgggacggggagggtaggaagacgtccacaccgccgcgcactccggagaccttcccgccggtggtgccgcgcgcagggaggggaggcgaggtgggggactccgccgggaagaggaggagagagagagagagagagagttcagagttcagacagggtgaggcgagggaagaaagggagatagatggagaggagcaggggcaattctggcaaattttcatcgtttttctcatccttttataattttttttttgaaagttaaattcttgacactgtcaacttgaaacctgtttccttccaaaccggtggcaagtacagtaacaacaatcatatataggagtagtccctatgtcattagagaagtgtatggatggtctctaaaattatgtgggtatgttacctgtgtgtctgaaccttaaaaatacatttctggctccaaagttatcatgagtatgttcaaacaagtttcaattcactttgtgtgctgacatggcaatatcacggtggcacttatatgtcagtgtgacccacatgtcaaccatatagaaataagtttttactgtttttattttctatgtgactaacgtgtaggcaccactgtgatgccatttcagtgtatggagcagtttgaatactatttggacctatatgacttcaaagacaagttcaggaacccgaaaatccattttgaaagtttatggatgttgatgatacacctgtacaaatttaggtaccatccgcgtacttcactcttttttatagtgaaaaatggttttatgttttcggcttatgtaaatagacacataaccaataagctttagagtcaaaaatgagaaaaatcgagtgatgggaaaagtctccatctcctctgacaaaatgactacctgaactaaaagataaaacaaataaaaaaattagcaaatggttacacaggtgctacgccatctaaaatgttacaaaagataacgactaccaaaaccaataaaatagcatcattatgcataatatctatttgttcttttatccttgtcaccaaacaatattcatatttagaattcgactacttttttgtaaaaaataataaatacttaaatagatgtcactttatcgaagtgtattatatattaaacataattattaactttgttcataataatctagtcatttaaaaatacattaaagtttgccacaatactgatcaatggtgataattatataggaattgagggagtatcatttttagtggttttgagaattaatataaaagttttggggaggaggattataagctcttttttcagggtgaaattgtaggcatctaatgtcatgtttgtataaaagaagcatagtttatccattttttgtgctgtttggctgtaaagaggtggattatttttacttgagtgggatgggagaatcgaatatatcttttttgtttcatttggatatgacatgtgagcatccaatgaatttgtaatcttttgagagaacaaaaaatcatgcaacaccttaaacagcattaaagtaagtcagtcgttgatatagatagtagagcaagatgacattgaactcaatgtgaatacacaaggcgcaataaaatcgccagcattactacttgctatggccagatagctgcaaattaatcactgtagcacgacactatttatgcaaaaaacatcatgtatttggaaggccttaacagcagttaactgatggcaggagagaaaaaaataaataagaagagggggcaacaaaagtaataaaaattcagatggacaatccatagattctttttttttaaaaaaaaagaaaagaccagtccatgaaattaacctgcatataattcaatgagcaagtagacttcagacagctccttggaaacttcttggccaatttcttgacatactacgttgctgtcggcttgtccctgtctcttttatggtgcacctatattgtattttttttcccccaagttttcatttaccctttcgcaagtctcaaattaattcgattctagaataagaggagatggagacgcaccgaaggctctgaacatgcaagaacctgtaattttttccaatgggagatgatcaaggtcagactgaaaatgtgggttcatgaaaagtcttcaaaggcggccaatgacttctctcatacacactgccaattccaacagcaaagttcatgaaaaaactacggcgaccactcgaggagaaagtctttctgcccatcgagagagaatgtacactgtacatgtcaccaaaaaatcattaacatttttttatatataagatggatcaatatgcagagcgctgtagagaccgatgtgcagtactccctctggttctataataattgacgttttggacaaggttgagatcaaacttttataattttgaccatcaataactttaagaatatttagtttaaaaaaactagaaaaacatatatagatttatctttcaaagcactataataaaagtaaacatgcatttatttattgtgtatattataatagaaaaataaggtcaaagatatattttgtagaccgtgccattgtctaaaacgtcaattagaatgaaatcggagggagtaagtgtatatcatgattcatgacatagttcagaatttcagatatcacatattgtttgagtcgagtggtagcatgcagcgatatctgatgaaacatagaaaacggactacaaggggcactaataaagtagtaataaccgagtagaaattgcatagtactactacaaattaaaggaactgattcatttttaatgtcactattaagaacttgttccctttgaaagtcattatataaagcattatattccgaacttaggaggaaagcagaagaccttaagaataaagtttatgaacacatggtaccatttcaaagtcgagaagagagatcattgcctcattggtggccagttcagttactcagttgggtagttcacccacttgacttgacccatgcagttcctgtttatctgtctttttcatcaggcattgatgcccaattacccatattaccatcactcaaactcaattatcatgtgcttgatgtactatattttagcatccttctgttttcatagacagaaccacacctaccaagcaaagttgggccgaaataggatttttacatgctgggccaatataagttgggccgcaacgggattcacacattgggtgcagagtttacatgcttatggaaatcttcagtaatattgtcaactgaggcagcacttacatggcaatacatggacagattttgtttctttgaagaacaacgtagagcggtagaggacatattgacagtgtgcagcacctagcaattgtatttgaatacatcctgacattcgatcttcatcttatcagtatgtatgtttgtggattttgcaccccacattcctattacagagttcagacaacaccattgctagatg

SEQ ID NO: 5439 - DNA, 24839 bp, Oryza sativa
aacatcgatccatcatcttgtaaatattttgttccaaacacaaaatgaccacgtacgggcagcttgcaacaaaaactgctctactagttcattgctcgccaattggccattggtactcgaagagtacatgttcatcttggaaaaaaatggaaagctgaacagaatatgaaaaggtgaggatcttggaactggtccggaatctatgccttttgtgcatttttatatgttctataatcctcacattaaaaagcttgctttcgagcactaatcatgcatactatttcttttgaaacaaaagctctaatcatgatgcatgcatggtgacattggtgagtaagaaatatttgaaagggccgaaatgagaggcctgcatgcgccatgacgactccacgcgttgctgcccacggaaaaggcgccgtttagccaaaagatgagcgaaaagatgtcaaatttacttatattgattcggcgccgtaaagcaagatcacaacaactttaaaatggttcaaccgtaagaattaatattaaagtaatagtacgatacaagtttagcaatataattaccatattctttttttccataggaggagtgcattataggaaataccatacataagtgttaggtttcatattttcaacatacaagttctagaaaatagcatcgcatatagctaatttctctatgaaattatttcaccgttatggctctatcaatcccgtccaacccactaaacgtataaaaacactcttgcttgcttggccacctcctcccatagcatcgccaacattagcaaggctttatggccacctgaatcgcgctacactcttgagtggagctacatggctatccttgatgatgttgcctccatgtctcccatgctcctcttgctcagccatcgtagcttttcctccgctcggcgtgaggccaactcctagttcggcagagccaacaaacaaagtggctggattggagacacgcaagaaggcagcaccgataatacccgtccatccagtgcaccctgagcttgcagtggacaaatctggcacgcctcatcctctaggcatcccatcactcaatggtcatcagttgaccttggaaatgaggaggccgctaggaagacgaaccgggaggcgatttctgagtctattgtggatgaatttggctcgactagatcttgtaggtggtaatgtggtgctattgggagcgcaacctccatggataagagccatcactcccacaactaaaatcaaccgccagaccctgtgtaggagacgcacctcccgttggccatcgcctggaactcaacgccatttgccggatgtccgttgtctgtcgccgttgttttagcgtgtacgttgggaatttggggatttgacgttgttaaccgagtggtagaattgtatttttctatcgcctaactgacaacttctactatcaaattaacgacgatgccatttctctgacctattaatttgtaagatggtatatatttttacagcaaaacatagaatttaacacttgtcgatggtatttatttctaaaatatatctatttccataaattggtgagatggcactacgtacgtccataaatatattctgaaaagcaaactacacataaattaaatacggttacggtttgtccatacttaatacctgcattgatcaggtcggtacgcgatgcatgattggatccggccagaactttgcctgcagcgccagccagccaaaacctgagctaagcttgcaactgatacttgttagagcaagtttaatattatagcccactactagctttaattcatctatagccaatctaatagttaattcatacaatagttgtttattatactattaatatatggtcccacctgccatacacacattatgtcttggagtccgtgctgcagctgactataaatctgtaggccgctgctcttctctctcttcctttatctctttaaaatatgtttacagctggcttatagcctctattgtacctgctcttagtaatcctccagatagaatcaatagtttggtttaatttaatttggtgttggtttggatctgaaatccccaggaagctacggaacaaaaatcaaaatggcgatggcgaagcacatgatcatcctcatccccggcgccacatcgcatgcattttcttctcttcacgatgttcgtgcttgcacacaccggccattgctaaccttcacatgacagcctcacatggaatgttctcccgttgttgctaccactagagtttgttgagtcggcgacacgcatcaatacaaaacattcgtcagttgagttttgagacattagggctgcaagttggagactattatgaatgaatgaatgaattgaatgtatatattgctgcgtggaattattgttgggatgcagatctgataggcctctgttgtcgtttctaatttctaacaggggtacaatcatatctcatctagaaaaatagtactacaatctctgtttttgtggtagcattccctgtaggctgtaatgcttgttggagcttcaccatgcatgcaagctaggcagaatattttgtcatgatttaaaaaatttatccttcgatcaattttatattagaacaaaatttacaaaatctactatgtaataagtttatgatattgtgatagtatttttcaaggtaaaactacgacatctcaacatttattatgctactatacgagtagtaccagcttttaatgccataaagaatttatccaatttcttatttcttatttgcgtagcagttgagattgtgctgaaattttcaatggtgtaaaaggaattgtttttttattcttacgtatacaatttttgttacattttttcaggtccctctgtaatatgggattgagaaaatgaaggaaaaaacatagaattttaacatgaatgcacgtgtaaaacaaatagttacaaaagacatgaaaaacataaaaaatatcatttaattggatcacagtgaaaacacataaatttgaggagatataaagactcgtagaaaactttccatgaggttctacttcatgttaaatttcctcgaaaacttacatgaaatgaagttcctcatatgaatttgggattctgtagtgtccattcatttgattcaacgatctatatagaaaaatcctataaaatgaaacctcctctaaaattcctactattttcctttgaatcaaggggccttatctttaggacccatttgaatcgtagaaataaaaaaacgtagaaattaaaaaacacatgattctaactaaaatgtaattataaaacatataatgcaaaacaaaacaaaaatactggaatgattgttcgattggaccatgggaaaaaatacatgaatcaaatgagaggtagaatcaaagcaatttgttttcaaggggttagaattcttgctaagttcccttcaaaatctctatatgattgtctattccatagaaatttcaaatgatgagaaatgattcgataatctatttcaaatactttcatatgaaattgttctatagaattaaaatcctctgaaatttgtatatttttttccctacaaatcaaagaacttgttaatgtgtactccctcatcgcttgttcgtaaataagggattctaggttgatgtctttgaagtttcacaaattgaaaaggtcatgtttgataataaatgtagtggttagatggattatattgcaatattttcccaccttatgttctgagcgaggattgccatttgtatcaagtgaaacaggataaacaccggatgatttgctttgctgtgggctgttgacgagagaccacatggataaaaattatccaaatctacagggggtatttgtgtcaatcaggccattgttcatgtcgtcatcctacagttccaagctacacgaatctccaggtgagaacaaattttttttgctgtagctcctctttcgtcagtcccgactcccgacacgaggcctcgcaacccgggtcacctggtcaaaaccagagggcccacacagcgcatttccggggaacacccgggcccaccctcgtgctcccacccaacacgcctgaccagaaaataccattctttttttatttttaccaacacgtattgccaataatatttttcaatgttaggccgcatttagttgtattttttttttcaaacttctaacttttccatcacatcgtttcaattttaaccaaacttccaattttagtgggaactaaacacagccttacagcaccttacttcaaccatactcgtataataaaatactactccctcaaatattaggaaaattgatgtcctcaatttgtatagcaagagaaaatagaaaaagtcgctctcaatacaagagatagttaaacatgttttcatgcattgaacatatagtactactgcatttcagtataccttccatttcaaaaaaaaaaactcaattctaattacgaacttggacacgtaggtgttcatattcatagttaatatgatttactactatttttttttacatagtactagtgctcttgaataatgcgtcatttcatggaaaaaaagtgaagctgaatttatatatggaaatgaaaaaaatcgttttagtgcagtcgctgtcacatggaggtgggcccgggaggcgccgaccggcagtgaccacgtcagcaactgaattttatacttacgtcctcagtttaaggaatgtgtttttacaagtggcagaaagaaacaattctcgcactgtcatttctttgttcttggttatatacagtacggattaggagcccaatccctttctttaagtactcaattgacaatattttactactccagtttctgtacaatgttgatgcagtatgagtggttttaagtcattcctaaccccggatgctcaggccagttgggcattgcttgatagagaccatagtcgtaataaattcaatggtagaagtactaactatttatgccttgtttttttccttaagattattcaccaaaattttcaaaatggactagtttctccacttgcttaaataaaacattttctaaaaaaaatgcttaagctattacgactgtgctgccacagctagcacaaacgaacaccctcaatctttttggctttatattggtatttgtgggatgggtgagaaatgaacttattttgggatgaagataatatataataaagtactccctccatcctaaaatgtaggtatttttagttatgaatctagacatactgattcataggtaaaaattactatattttgggatggaggtagtacataacacatagcaataactcgctgaatagtctaaaacaaacgtggtctaagtaaatttatctttgtgtaaactttttatgtactacattcagctagtactataaatttaaatttgtagacactgtcagcactaatcaatcacgatagaaacatgggggaatttgggcaaatatcataacaagaaagtgttacactcgatcagtgtcacaccctctcttttggagacgcacacaacacaagagaaaaaaagcaaagcaaaccaaaccaaaccaaaaaaggcgtaaacacaaaagcaaggcagcgttttgcgcgtgaacccccaaatccaaaaaacgagttttgcgtgacacggtttacgaggccgtggcacgcgaaaagatctgagccgtcgatgaggagcagtgtgcacgcgacggcaaccagcgccgcgccgtgggtggcgttcacacggtgggccccgatcggatgacgcggcagcctttcccgattcggccgtggggatctcgccacgtggcatgatggcgatggccccaccggccaggggcccagggatcccttttgtgggggccatgatgtcggcgtgtcgtcctgtcgatcgatctctcgtgggttttatgcatcgaccgttatttcggttgagctcaaatgcgtacggagagtggagtggagtacattgggaatcctattgtcatttggtgcttttatctcggtttcatctcatgttacctcacttcgtcgtgaggattagaccattcccaactcgatgaatacgatgatgtccataatattaaataagctgtcacctataatgaaaaatgatatgacaagtggataaatgaggaaagagaaggaaaccatgtcttacatgagacatgatttctacacaacatacaagacatcatgtgagataagtagcattaaattcaagtatggaatagtggtgtttgcattggaagaatagtgtctagtactagtttcttgatgatgtggagtttatggaaactatgcctagtgtcttgggttgggaatagccttacatttgagtacttcggtccggttgtattcttaagtcaggccttgtttagttcccaattttttttccaaaaacatcacatcgaatctttagacatatgcatggagcattaaatatagataaaaaaaataattacacaatttgtatgaaaatcgcgagacgatcttttgagcctgattagtccatgattagccatagtgctacagtaaacaacatgtgctaatgatggattaattaggcttaataaattcttctcgcgttttcaagcgagttatgaaattagttttttcattcgtgtccgaaaaccccttccgacatcaggtcaaacatccgatgtgacacccaaaaaatttcttttcgcaagctaaacaacgcctcaatgtttcaacttcatttatcttgttttccgcaagcaagtttttcaaactgttaagtatcgtttttctaaaaaaaatctataggaacttgtttttttttaaaaaaatattcatacgtttttaacttttgttagctaatacttaattaattatacagttatgcatgcttcattttacatgtcaggaaggaggggttcccgaccccttctcctgaacacgcctagatggttctaatagccggtgagtggcaaacacatccatcaaatgtaatttaaaggagtattgtgggttttttttgcccaagtttatattcgttgttgatgtggatactatagccatgtttagttcctaaaaaattttgctaaaaaacgtcacatcgaatctttagacatatgcatggaatattaaatatagattaaaagactaattgcataatttgtatgaaaatcgcgagacgaatcttttgagccaaattagtccatgattagccataaaagtgctacagtaacccacatgtgctaatgatggattaattaggcttaataaattcgtctcgcggtttccagacgagttatgaaattagtttttttattcgtgtccgaaaaccccttccgacgtccagtcaaacgttcgatgtgacgtccacaaattttcttttcgcaaactaaacacaccctgtaatagtcaccgtagacatgtggttttttctctctctttttctttaagaaaacaaattgttatcttcttgattgaatgattgccatatatgccaagccaaggttatcttcttgtacgcttatatttgcgaagcactaccaatatgcgatcttttatgtgtttatttgaaacatgagtattctcttaattcttgtaaaatataaattaattactttgaaattttgatgaaattattgcatttggaaggagctctattaaactattaaagtaatagaaacccaaaagaaatagaaactattaaagtagtccggtaattgtgactggacaatgtaaagaaatgctttgcttttattagcacacaaattactatagtatctcccactattgtaccatttaggttctcaatcccttttagcccaacaatttaataacaacaactgtagttgtagtttttattataggaattgatgagactactattggtgatgttgttttgccctagcagatatgggcagctaggcaagggggcaatcatgctcctaaatattcccctgagcaagatgcccataacaaaagatgaagctaagcaatgtaattagtttaattacaagtgggggtgattagtttaaagatgtgcacatggcaatgatggagctggtgaggaaggccacaggagattagttggcctgtgcatatgcatgcttgcacacctgtgttcccggctttgctctctccaattatcaagggccacactctttgtgcttacatcgatcaaacccaagtctaaaagcaggggattaggggcagtaggtttggtgaaagtatccaaaaacggattagtttaatcttagattgtactagtagtagtaccaactagtatgtgtttgcaaaaataaaaatgcttattggagatgttttcaggtgacctaatggaacatttcttcggagaacatggaatctgtcccaaggcatttcttatttgtatgatagggatgtgaatttttcttgtactattacacttgacaatttgattttttatttgactctatggtgaggttacttccaacaaatgtttgtagcagtaacttattactgtgcacatagtgaggagtatttttatgggagcatttcagattttttaaggaggaagcaaacttttgctttgatccttgggattccaagttcctgtttgatttttattcatgttgattccatcaatcccccggtcccatccaccaaacaatcccaattcccaagcttcaagtaacctgtgaaagcttcaggctgcgtcaaggtcaaaattagcggcgacgatttatactgctaatgatgctcgtgccagtgagattactgtttgttggtagataaacacacaaactatactcaagtcaaagggctcaaagaaaaaaccacgaaaagttcagctcccttcacttcagcggtgaagaggattattaaaagttgcaaatgtttcgtttgttcagatgaaatcatggaacggttaaatatgataatacagtatatagtattgtactagtaatgattatatatggttaacagaagtagagatagaatggtctgaagaattgcaaaggccacatggccaattcaactcaaaaatgattctcctactctttccacaatagttcaaccgttttgttttagtagtagaacttcatcctgcaattctacctcacaatgcgaaaatacaacatactgtgtaaccataagttcttttgcagtataaccatatcttcttgtttaaaagaaatcaatcactgtactagaataactacagtcaaaccataaccgtccatttgagtactctaatatttagtgcataatatgtcaaagaacaattgactattactgttatatctccgaattatcggggagcacgtttaaccaaggataaatttctaaaagtgtgccacaactttagaaggaatccaaattttgtactcaaggaaaagagctaaattttcaacgcggagagaccatgttctttcctgcttagggatgaatggatgaattcgctttcggatcttgtagacatgcaattatttcaaaaagaataattcttagtgaactattttaagttcagttttgaccttcaaaataatagttactcctaattcatgtacttttaccctcaaatgttttgtgtttgagaggagaaccaatccctcctctgcacgcaaaacagagcggccttttaatattagttaatttttttaaaaaatagatcaatataattttttaaaacaactttcgtatatatattttttttaaaaaatgcaccatttaatagtttgaaaagcgtacgcgtgaaaacgattagtaaggtgggttgggaaaagggagcgccgaactcagccgtaacaagaaacaatatgagagttaagccattaacactaattgattatttaataattactccaaacttaaacaatactctcagtacgagagtatattaatacaatttactccctttgtccttaaaaaaattcaacctagtaggatgtgtcataatataacgaatctggacagagggtctaggttgcatttttttacagagggaatactaaataatgttttttaaaatctgatattcattgtcctgaattcaaaacactgtaaattaatttggtgtgagcctagcaggagagggtgtaggacccacacaaggcagagagaacaaaatgggagcagaagtgagagaagaagaagaggatgggtgtagctgtagctgacctccttccacctctcgcacacgcacaataacaaaccacttttaattccccgaggagagcagagagctcgaagcaaacaagaatcacaggagcgagcacggcaggctgcagcatcaccaccaccctactctctctctctagctagggttgcgctgcttcggtctcggtcttggcgccgcctgcctcgcccttcttgctcgcccctgctcccctgtccctctcgtgtcggggcgacggacggacatcctcacccgcgcgcacgtacgggtgatcgatcgattgattcctgctccgacgaagacggcggcggcgccggtgacctcgccggacatgcgcggggcccgctgaggtctttgttgccggcgaaaggggtggagtgattgactcggtcggtgtctgcctgtctggtctgaggtcatgatgaagcaggcgcagcagcagccgccgccgccaccggcgagctctgcggcgacgacgaccaccgcgatggcagccgctgcggcggcggcggtggtggggagcgggtgcgaaggtaggacgagttcttgctttgcttgctgcttccaatggcggttcgggatggagcagtggttgccttgccgtgttcttgtttctgcaatctggtccctgttttatcgcgttattatttcgccacaaaattaggcaaataaatcctttcttattcttcttggattttggattactgcatttttttttctctgcatttttgttcctgtgatttctggcgagcgtcgcagcatttactgttccacatttatgccccctcaaagtttgagtaatcgcaacataggagtacgagtagctgctactgcagtgctaagccatgtgcagagattaattggtttgtgtaaaaacctggtcgtttagggggcgaactgcaaattacacacaagctcgccggcggcgtagggcaaaatgcatttggtcatttggatcatccagcttacggcgagattattagggaaaaaagttttcactgttttgtttggttactgattggccgtggtgttttgcaggggagaagacgaaggcgccggcgatcaactcggagctgtggcacgcctgcgcggggccgctggtgtcgctgccgccggcgggcagcctcgtcgtctacttcccccagggccacagcgagcaggtgacttcgaagttctattgatttttttttcttctttgtttcattttcatagccatggatggcctcgttttgagaccctttttaattgactttttgttcttatgattctagtttttttttggtttgctttttttaaaaataagaattctaattcgtctcgttctgaatgttgatgattcttgcacgaataagttcacaacttgctgtccttttatgagttcttgagaggtggaatgcttttttttttgtttggtgttccattttgttcagtagtggtggcagttataattatatgatgggaataatgggatgtgtttctagggccaaaatgatatattttgttcacatctttatttctgggaatgtttcacttatcgcctaggagtatatgtctcctggaatcttttctgaattcatgtatcttctgttgccgaaaagtagtagtattatcttttcatgaattgttttttttggttctttgatattacagccatcattgatctatttggtaatttgattttctatgttttatacgatgtgggagatctcgattggtctgtttgttcattgtactttattttgtttcattagctaccaatttttagcttatggccaaagtggttggaagtattgggcatactggacccccttcttttatgggtttatggtgtgtggcaccattctcttgctctgtcgtttggtagatgaagcagccaagcagcttcgatttttttttcgcatttaatggtaattacattcagtagcttcttttgcaactttcttggctttggtgttggggctaccttattttgagcaagtttgaagtatggggtgatgaactgtttggatttggaaaagattctttatctaaaagctagtgctggaaggtgcctaattctgtattggtttttcctatcccttttgtgatgatgagaaaaagggaacttttttagtaaccgtgtgatggctatgtcctcatagcacatgccgatgtgaggcaagagaaagttttgctgtggcttaattaatataaaacgaatttatgctttaaacttaaattcagcctaatgttggtcatgcttttttgtgtggggaaattgctgtggttgaagtagggaacattttgtaaaagggagaagagttacatagagaatttaaaataaaacttaagcaacataaaaataatatttgtaaaaattcggttgccattttttcctgtgattttcatcgtgatcgagtaccctttggcctttgtttccctgtgactgatgattttttgttgataaggtcccagtatcaacagatttatatctgcatccttctgattccagtgtgaaaattgttgcttagagccacagatttaagtatctttcatattgcaggttgcagcctctatgcaaaaggatgttgatgcacatgttccaagctacccaaatctgccttcaaagttgatttgccttctgcataacgtcactttacatgtaatctacagacgtgagatgttattatagtttctttttacctttaaccatctatgctgaaagtatggtccatctatatttcttaggcggacccagaaacagatgaagtgtatgcacaaatgactcttcagccagttacttcagtaagcatctgatgcccttgcagatccccaacaaattttcatcgatttcccttttgttcatggattgtaacccaccttttgtgtttcaattgattgtgtattgaaaagtatgggaaggaggccctgcagttatcagagcttgcactcaaacaagcgagaccacagacagaattcttttgcaagacactgactgcaagtgatacaagtactcatggaggcttctctgtgcctcgtcgagctgcagaaaagatatttcctccactggtatgcaaagatcagagtcatatgccattgtttacttcattttctgcatctttattattaaatcactggtgcttgctgtaggacttctcaatgcaaccacctgcacaagaactacaggccagggatttgcatgataatgtgtggacattccgtcacatatatcggggtaagcaaacaatagcaacgataaaaataaagaaaatatatagtataacaaatgaaaaattctgctgttgacatcctactttatagttgttgatacttaatatttggcatgattggctgaaattgtgtgcatatgcatgttttgttctttacgcatggcagttcctgtattcaaacttcaaattattgtgtttttatgtaatatatgtggctcgatatgtattttgtccagacaaaatatttaatcgcccatgtgttttgatataaacaggtcagccaaaaaggcatctgcttaccactggctggagtctatttgtaagcggcaagaggttatttgctggagattctgtcatttttgtcaggtatgctacagcttatatgctatatctttaaagtttgaactaaatgatgagaacaagagatgcatgatgttttcttgttttttgtggttattcacatcgatttaacggtggtcttctttctttttcctttttattttttagggatgaaaagcagcaacttctattaggaatcaggcgtgctaaccgacagccaactaacatatcatcatctgtcctttcaagtgacagcatgcacatagggattcttgctgctgcagcccatgctgctgccaacaatagcccatttaccatcttttataaccctaggtcagttctgtactaaagtatgttttgataattctctagtagtaactactggagagctgttgaaatgatggtatgcaaattccgtatttcagggccagtcctactgaatttgttatcccatttgctaagtatcagaaggcagtctatggtaatcaaatatctttagggatgcgctttcgcatgatgtttgagactgaggaattaggaacacgaaggtacttttttctcacttttccataaatggaaataattgtggactgaattgccatattatatgattatacatgtcaatgacaaagctgggaatgattcttaattttctttttaaattttttgttgttgttttcttgcccttattgcagatacatgggaacaataactggcataagtgatctagatccagtaagatggaaaaactcgcagtggcgcaacttacaggtttgttctctggttaattttggcagcactataacctagtatttcttgtgcccattttctgctgctgatacaatatattttgtgttttttcattcttgaacaggttggttgggatgaatccgcagccggtgaaaggcgaaatagggtttctatctgggagattgaaccggtcgctgctccatttttcatatgtcctccaccattttttggtgcgaagcggcccaggcaattaggtgagctctcatgttacattgccattacttcttttatattctttaactgctcttgaatccagttattgatccaggagaataccccttagtcatttgttatgtctagctactagcttggaaaatatacctgcaaccaagctttacctttgagatgacaatctggataacataccttttgagttgtacgcacccaactgatttgagctaattatcgaattctagtggtgttgtgaattcaaatagatgaattgtttcactaaactgcttgtatgtatgcttaacttttgatccctaccatgtaattacagatgacgagtcctcggaaatggagaatctcttaaagagggctatgccttggcttggtgaggaaatatgcataaaggatcctcagactcagaacaccataatgcctgggctgagcttggttcagtggatgaacatgaacatgcaacagagctcctcatttgcgaatacagccatgcagtctgagtaccttcgatcattgagcaaccccaacatgcaaaatcttggtgccgccgatctctctaggcaattatgcctgcagaaccagcttcttcaacagaacaatatacagtttaatactcccaaactttctcagcaaatgcagccagtcaatgagttagcaaaggcaggcattccgttgaatcagcttggtgtgagcaccaaacctcaggaacagattcatgatgctagcaaccttcagaggcaacaaccttccatgaaccatatgcttcctttgagccaagctcaaaccaatcttggccaagctcaggtccttgtccaaaatcaaatgcaacagcaacatgcatcttcaactcaaggtcaacaaccagctaccagccagcccttgcttctgccccagcagcagcaacagcagcagcagcagcagcaacaacaacaacaacagcaacaacaacaaaaattgctacaacagcagcagcaacagcttttgctccagcaacagcagcaattgagtaagatgcctgcacagttgtcaagtctggcgaatcagcagtttcagctaactgatcaacagcttcagctgcaactgttacaaaaactacagcaacaacagcagtcattgctttcacaacctgcagtcacccttgcacaattacctctgatccaagaacagcagaagttacttctggatatgcaacagcagctgtcaaactcccaaacactttcccaacaacaaatgatgcctcaacaaagtaccaaggttccatcacagaacacaccattgccactgcctgtgcaacaagagccacaacagaagcttctacagaagcaagcgatgctagcagacacttcagaagctgccgttccgccgaccacatcagtcaatgtcatttcaacaactggaagccctttgatgacaactggtgctactcattctgtacttacagaagaaatcccttcttgttcaacatcaccatccacagctaatggcaatcaccttctacaaccaatacttggtaggaacaaacattgtagcatgatcaacacagaaaaggttcctcagtctgctgctcctatgtcagttccaagctcccttgaagctgtcacagcaaccccgagaatgatgaaggattcaccaaagttgaaccataatgttaaacaaagtgtagtggcttcaaaattagcaaatgctgggactggttctcaaaattatgtgaacaatccacctccaacggactatctggaaactgcttcttccgcaacttcagtgtggctttcccagaatgatggacttctacatcaaaatttccctatgtccaacttcaaccagccacagatgttcaaagatgctcctcctgatgctgaaattcatgctgctaatacaagtaacaatgcattgtttggaatcaatggtgatggtccgctgggcttccctataggactaggaacagatgatttcctgtcgaatggaattgatgctgccaagtacgagaaccatatctcaacagaaattgataatagctacagaattccgaaggatgcccagcaagaaatatcatcctcaatggtttcacagtcatttggtgcatcagatatggcatttaattcaattgattccacgatcaacgatggtggctttttgaaccggagttcttggcctcctgccgctcccttaaagaggatgaggacattcaccaaggtcagtacctttctgtttctttatctgaagccaaccaacagcttcttctgtggtcagcgtgaattttaattataagtaaacatgaagctttttatctttttcattaccatggtaacaataatttaaacttgcgatggtagtttcatctactggaaactaagttctcatttattaaccttcaaaacattgaagtaaatgtgcatatggataagccgaattgcatgataagtctgagtcagattctgttccgtgatgtgatgaggacagtatgagtagtttttttttttggttgcctaggagatgttaagaagttttatggttgagtttctagccgaacataacttttatgtgcgaatctcacatgtttgtattaattatactctttaagataagagttttctaagtgtaacttcaggataaatctgttaaacgaagcaccgtttctttgttgtattatagcattttatggatgcatttgcagttgcatctttgcataactatatggtactgtaggtatataagcgaggagctgtaggccggtccattgacatgagtcagttctctggatatgatgaattaaagcatgctctggcacggatgttcagtatagaggggcaacttgaggaacggcagagaattggttggaagctcgtttacaaggatcatgaagatgacatcctacttcttggcgacgacccatgggagtaagttcagctctcattttcttctcatgcttgcataaaacactctcaagtttcgcttccagaatctgaatggatagatggccgcattccacccacaatcaacatcgcctatgtatcgggcattcatgttcttgcattcctaatgagtgctactgtggatcatacagggaatttgtcggttgcgtgaaatgcattaggatcctttcacctcaagaagttcagcagatgagcttggagggttgtgatctcgggaacaacattcccccgaatcaggcctgcagcagctcagacggagggaatgcatggagggctcgctgcgatcagaactccggtaacccttccaatggttcatatgaacaattcgaatgaccaaattcaccagtccatattgtcatgctgcgccggtgtaagtagacaatcaccggagtgttgttgtagatgttatcagcttacatccgggagcgcaaatggctcggcggatcagtagtgttttttttgtctatatgtgtagtttctcacacatcaaaagggagtagggatggtaaatgaaacttacctagagtttcttaaggttaggcgaaagatgattgtactgttggaaaggcagttctgtagtaaaatgattcttcttcagaggccattcttaagatctccatgatgaaatcaaaagttgaagatgtcaggtctgtgttttttgagtcgtatgcatttgctttttgcaaatgttatgtcgggttattcttcaggtattggaatactgcgtaatttccataggacaaacggtttttgccaacatgagtgctaatttttaacaaaaaaaaaaataaaagttactactgcaaaaaaatacagaacacaaagcccttccctaacctatgctaaagatcatgaatcaccacttcaccagcacacattggaccaacagaaatcacagtagaaactttattcttacatgtattattaatggatgatgctataaagtataaagattacactctcgaggagatgggttatttcatactaacatgctaatacagcgaactgccatttcactatatatatcggctattggcgaatattgcaatgtagtccttcaaatctcaacctgggtcgtcgtcgtcgtcgtcccaggctgttggatttcctgcatgaatgattggtaggtttcaaccctggacttggattcaggctgttcgaggccatccatgaacccgtgggtcatcgcaaggaaatctttcatgtgcaacctcttccattcctgcaggggaaaaaaatgaatgagctcaaaatggatatcacacaatcgtaataaccactgtcaattttatcaattcagttaagcatgaagacagtttaagtacaggtgtgagaatggaagaactaacaaaataacatgggcttaagatcttgtatatatacaaaatggcatcaggtatgaatacagacggaaataccctcacctcaaaatcccattcaccataaagatttggatcctctgcatcagcccatacataggtgtcagcaagcattgtctctgaagtatcctgcaaggacaaatcacctttgtttttagcaaaaccatatcgattttttgacgacgtatcaacagcaaaaaatgtacatgatgaacagaggaagaacattattgtatggcaataacaaataatttcctaagatgtatttttgtgtctcctgcataatacttgctgccagcattgattatgttgacaacgtcagtgaaaaactcacagttaatgatatctcaactcttgtcctcacgtactccacatcttcaaattcatccagaatctggagctctgcatcagtaacaccggtgatgacctgcagaaaaatagtaaccgtaggtaagaggagagagaggttaaaagcttaacaacttcatcttttcgcttatgtttgtacttatcagccaaaatttaaatttttgaccttaaatttagagttgattttggggtttttttattcatcgaagtttattttttagaacacgtatataaaaaatttattcataaattatttttcgtttgtaagtatattgaaaccatagcttcttttcaatgagatttaaggaattgcttgctgtcataacggcctaccgcagttactgtcgaacagtgaacataatagcctaattatatcatgagaatattaaaactcagtaatacaatcagatgttcattatactatggtcaaacttcaaaatagttatttatatatatactctctaggaaagattaatttaatttatgttggaggaagaccaaaaaaaagaaagagaaatagtgtagcaaaccttgccagcaactttcttgctttgaacaggtaggattgcaggataaatcctacccttgatgttgaacctgtggctgcgacaatctcacactttcagcttattgcatctttattatcaatatgaatgaagaacagaataagcacatagatcaatattttttttttgaaaaaaatctcaatctcaatgacgctatcacgcgtcacgatcgacgacgtcaccgggcgcactagctagcgcgagaggaatccattcccggcgagggaggcgaaagcgaatccgcaaaaggggaatctctctctgcagaagaaatcaagaaccctaggagaggaagaggaggaagacggcggcgcttactagttggggaggagcgccggggaggagggcgggacgcgcttgatgatggtgcgcaccacctcgtcctgcatcaggctcccgtacacgaacacgctgtgcgccccgaccccgaccccgactccgtccacggcggcggcggcggcgggtggcggcgccatggcgaggtgggcggcggcggcgataaggactagcggctgccacgtggcgagcgaagggagatggaacgaactctcaactctggctcactcgattcttgtgcgtgtgtgcagactgcagaggtgcagaggaatgcgtgccattatatacaagctgggctctacgtcaagattcgtgctgtgtggtgtggacgtgatcgccgtggagattcccgtctctgcctctccaaagatctgatcagtgtggacatgatctgattcgttttttttttcttgaaaaaaaatagacccgaggcatatataactacggttgaccttaggctgcgttcgggaggagcggttgggaatctcttctccccggcacgtaaaacagagcacgcattactgaatgattaattaagtattagctaatttcttttcgaaaatggattaatttgattttttaagcaacttttgtatagaaacttttttaaaaaaacgtaccggttagcagtttaaaaagcgtgcgtgcgaagagagagagaaggggttgggaggttaaaggtaagaacaacttgagcaaatacctagatacgtaaaaataaattgggtcgtcaagaccaattgagtggaactgattggagtgttatcacaaaatgaacttcagagatagagctgggttaacttcactacaggcttaattcttaaagttaaatttataagttgaaaccttaccaaatagccctcaaatatattactgacataaacccgtgtatgcgctcctttatactagtaccgtattgattgtgtattgtatggcagagattaggatacaaaccattttcgttataaaaaaacatcgaactttttaagagtacaaaaatccagacatgcgacattgcttgataattctaggcataaggtcgttctcaagggaatacaactagtgataatatatgtgtccatactctgctttttcatcgagacatacttatcaccagtatgtatgatcccatgttagttgaacactattaatctatgaggctctaatgtccaataacaattgaaaattcctccaatagaaaggtatttggaagtttggccatggacccttactaattctaagctacattgttacataatccttcatgtgaaatcttgactaatcttaattgaagcttcaataaaaaaaactaaaaaaaaattctatacctactacatatttacaacccattacattctaaatcttaatgtacaaacaaaccatatcactatccgctaataattattacatcttaatactcatgcaaacattccacatcatctactacaatttattaaattaaagctccacatgcaagcatatcaaattatcaccccttatcatttctaagatatctcaacatataccattcatcatttctataatattaagagtacatttatccttgtattcggcagcaaaagcgtgggtcatcattttattacttctactttggtggtcaaaatatctatgcatgatcctcacactatagtttagatcttaggacccatatttactctttttttttaataaagaaaccaacactaatataccaatttcattgaatatagcagaagaaaaggtattgaaaaaaaatgtaggagaaaggaaagcactaaggaagtagaagtgttttgctcctactaaagccaagttttggcctcctccttgatttgtcctccgagagatgtgacatacagttctttgtgtaaaaaaccctatgattcctttcctatcaaatttcccatgccgtaaggaggatgagggtgcaggcttcttttttcagtagtcacatgtgactataatgtgataaaacattttattagatcataatttggttggaactctgttttattgttttatcatgtactccctccgtactcgtagaaagtcgtttaggataatatttaagtcaaaccttgggaatataaaccatgaataactctcaagttgttgcgtttgaaaatgtaaaaattatatgaatatatttgtcttgaaaaatactttcataaaagtatacatatatcacttttcaataaatatttttacagaaacaagaagttaaagttgtgttttcaatactgtgtcgctgtccaaaacaacttcctttacgagtacggagggagtatgtattaaaagaaatacaataatcctctatttctaaataactacaaccaactaactgcaattattgtatactaagtaagttcgattgaattaagtaaaatataattttgctgtggggtctccagtttagacctgaccaaagacttgaaacttgaattcttgaaagatgtaacgcaagcatatgttgcggtcaagttgatgcgcttaatttgcctttggctctctacacattcaaaaaggggaattcaaacgtatttacaaagtgtaacattctagatgaatttgctgccttgtcaaatgtcatgttagtctgatagtctcatgccttgactctgctgcatcaacttattatattcgagtgataactaatttgccttcttttcgaggacctaaatgctaatttgcttgcgaacagaacatgggccaggatattccaaagatattcgagggctggaaaacatgggccatgcccaacttgagcaaaacggacagcccataaaccgggagtacctatacatctttcgaaagatttttatgatcgtatcacatagatttttaatctttagattaaaatccgatatatataataaaaggcaaaaagcaattaagaaacaccataatggatactaaattaccatatcctcaagaaaaagaccaaatccaatacaaaatttaaaatttacatgcgaagattcaaaaattacagtgtaactaacaaaagttacagtgtaagtttcataaattacactgtaacttataagaaaaggcactgtaaatttgagtgagaaaatcgagtgagagataagaaaaaatctttcgagtgagatatagcaaaatcgtaaagggatatattcatggccgagaagacccaacaaacatgggccaggcccaaattgagcaatgcgggacagcccataaagggtgctatttatggcccagaaggcccaccaaacatgggccaggcacaacgtggaacaaacaggacggcccatgagggcactaataaggcccatccgatcaagcggcccgcccatccactccgtctccacccaacggcggaggcgacgacccgatattccgatccgccggcgccggcgccgccagtcgccgactttatcggccgtgcggctcactccactccgggcgccgccgccgctgatcgccggcttcatcaaggattcctcctctcctattgggaagcttcgggctcctctttttttcctgtgagtagcaagggctcagcgcgtttattatccactccgtttattacaattccagttgcttttttttattattattatttcctcttcttctcaaccacgtctcctcctctccgacgcagcaaggaggagatcccctgcggcggcgccgtcgagccggtgggggaagggagagcttgaggcggaggcggaggcagagcgtgagctccgaaccaccaccatggggacctctgcgcaggagccaaatctctggaagcaaatcgacgacgccgagcagtaagatcaaatcctcccccacatggttcgtagtcgcattagcctaggtcttaaagtagttcatcttggttgcttgtttagtcaggtaattgaatcgcgagttcgcgactgcctcgctgaattatgtagtataagacggtagcgaattgagctaggttttcagttcgcgtagcgcaaaagggcagggaatttagccggatttgtagacatgcttgccaggatgaatgccatgtaaaatacactgttcttattctggaatctggatgactttaggagcagtcaaccatatactgtataattgtgctttacaatttacgcaagcatgtaaagttccaaatggtgaataaaaggttttaaacttgtttacttaagttgacatcctgatggctcagctatctggtcagcggattgttcgagcaggccgtatccactgccttatctgtatccagtcaagtacattcggctgccatggagaattcatgcgaccatgatgagcttctggaaatgcttgaattagctgggatggtacttgttcaggcgcttaaagaacttaagaggtaaatccattacctttcctcattttattgcttttatgctctgaccaaatctaaggttcttatacattctgtaattagagagaatgctgcctggtaaagcaaatttaagttttccattgcttctctatgataatacaagtataagttattttttatgggcttctgattttgcccaagaaaaaatatcttcacgagtaactgtatataatcataatatctgtcttgtttcctggtgaaacttccttaataccc

SEQ ID NO: 5440 - DNA, 10602 bp, Oryza sativa
tggcatgcgaggtttccctgaaccgactagctacttagccagggtgtcccattccaccttgtggttgcactttgattatgttcgatgagtttcccacaggaatcggtccttatatgcgaatacgggacagtgccacataggcacaacccccgcatcgcgagttttcacaattcattttattttcaaacacaccgacaccacatgtcaggttttgaaggcttcacaaacccatttcccaagttttcgacaagcaacggtgtatgtgggatatttggtatacgcgctcagagagcacgaataccgaggtaccacaagggtggagcgacaaggaatcagggtagtacgacctacggaaattagtgcgactactgggtaggtccgtcgatttggcatgcaaaccgaggccaagcaagttaagtgtgtgattctataatgcaagttgcaaacaaaataataatgacttttcaattataggagcaattgatcaaagggtgacttgccttgctcaaggtcttcacgaagcttcacgaatcttcgagaaaacccgcgatcgacgaaaatccgataaccgcaactatgcgcaaacaatcgaaaacctaaacaaaggaccaaacgaaagatcctatttagactaattagtagtgccattaaatagatctcaattttacggaattactggaagttgaacggagtcaaacggaagagcggttgagaagatatgaattttggaagtttaattggagtttctggaataggagaaatggtttatggaattttatagaaataatattctcaagaatattattgacagtcactgacgtacgggctcgaggggacgaattattggaatctccggattaagaggatgggtttatggaatttggaatataggaaatgatttattgaatttctagaaaagagaaatatgtgtggagtattgaaaaagatattcccaagaatatctttgactcattgacacgtggggccaacaagaaggtgagagagagaggagcaattggagggagtaattgtggacttttagctcttgggtgatgtcacaccccgaagttttcctcccaagccaaaaattgaatttacaaatgaccccaagaaaatgcaggtgaaatcaggagaaaaccctaagaaagtaatgcaaataataatcggattggacatgtggaatttttcttgagttctacatgtcgaaattcattaacaggatttttagtggaattttcagagctctagaaataattttcaaccaattaaaattgagcaagcaatattttaattccagggaaaaatcctttttccttttctttttcttttttcctttctttttcctcctttttgtcaaatgggccgtcggcccatttcccttttcctccccctcctctctactgggccggccacaggccgaggcccagcccgaccagtccggcagcccaggccgcccgccgcctcctctctcggggtcgccgacaggtggggcccacctgtcggtcccgtctccctcctcccgccgatcccggcgcgccgccgcgcccgaaaccgccgccgcgccctcgtctccgccttccccgggccacgtcggccacgtccgcgcgtgcgccgcgccctccgcgcccattcccctctctctcccgctcgcgcccgcgcccgagatggccgggattcgaaaaccgaatcccgcctctctctcctccccactcccccacgtcggccggcgaatcccgcctcttccggccacgtccggccctctctccccctatttaagcggcgcagggaccctctccgctttttccccatttcgccgacccctcccgagctgccaatcgtctccgcgccttgcagaccacccgccgccgccgtttttgccacttcggccgccgctagccgccgctaggctcgccgccgtcttgcgccgtcgccgccgttagattcgcggggtcgagatctacctcggccgccccttcccctttgaggttcgccgccggagacccatccccgtcgtgcgccggtgagtgacgccatggccgccgccttcggccggcgctctcgctctctcgcgctcttccctctccctctaatccctctccttttgttcgttaggaggttccggagctcgtcccgccgtcgccatcgtcctccgtcgcccgccgtcgtcgaccgttgtcggtaaggccctcctcctcgttttctctctcccgcaccgtttagccgccgcgtcgccgcctagctgcgtagccgccgctcctcctctagccgccgctctccgccgccggtcggtcgccgtcggccgtcgccttgcgccgctgccgcatgcgcaccgccgccgcgtgagcgctgcgccgccggcgccatggtcgccggttcggcttgcgccatgcccgcgcgcccggccgcgagctcccaccgccgtccgatctacccttgggtagatcggggccgtcggttcggccgccacgtggcgccgccgccccttccatctcccgtgccgctgacagtgggcccgcgggccgacgcctcctctctcctccccgtgccgctgaccggtgggtcccgcatgtcggcgccgcacccctccgtgctgacgtcagccctggttaatattgcgcaataaatgatttaaggtttttcttttatagtaataaacacagtgaatcttctaaaaatcataactaattcatccgagctccgtttaatcccattcaagtctcagtaaatcaagaaaaatgtgtagaatccattaaaaatggttttgttctctgtttcagtagtcttatagcctgtttgcaatgtttgctttgtatgtcgctagattccggttcttccgacgctccggtgtacttcaagatagtcgccgaggtccctccagcagcagagcaaggcaagtcatgcttgtcacttgatcatattgatcctatattgcaaatgtcctaatgttttctttcaaataccgcatttgttttgcaatattactatgggatggttacctattattacagccatactattttgataccatgctcctttgttagcttgggtcataacatgattagagttaggactagggtttgcttagccatgcttagttcaactagcacacaatggggagatctcatttaaaacctagattataggtttatatgataatgttggattagtaccaccgctctggtgttggttaattaaaatgaatcacatggtgggctgtgggtgcatggttttgctggtcgcacccatggcagttaaggaccggttcgcgggatgccctagaagaatttatcgtacttaccacaagccagcgtgggcaacggctgggcttgtagtgtagctttcctctagtcgacgcatccaggcaagggtgggcgtgatggagcggggcgggccctgcgacggcctctgtcgcttccggattcacctaggcacgagaggggactgcccgttgcccgctggggacgggggtgaaacctgaggtgtggtgtgcttggctagagggggttatgcgaagggtcctgtcacggcctctttccggtatgtcgtggtggcatgccggcgcacggaaacgtgtcgtggggctgtgtcttgtgggtacagttgtacacctctgatcagagtaaaactattcgaatagccgcgcccgcggttatgggcggtcaaccagattcaccgtgattagtctcaccctagtgtaatctgttgaacttggatagtttaggtggatggttgggcctgtcgcaacgtgggttagcgttggacagcggatatttaatactgcttaattattacaactgttttcgcattaaattcctgtttataaatgccagtatttatgcaaatgaaccactctagctcttctttgttaattccctgcatcatacccctattccggtatgacttgctgagtacagtgggtagtactcagtcttgctctacttttcccaaccccagaggacgggtatgtgtcagatgaaggtttccccgaggagtaggcttcgtccgtgccgtcgaggatgcctgtggagtggtgttcccgctgcagtttagtcaaggcttagctccagttatcttttgtttccgctgcatttttgtaagacttttatgatatttgtaagacgtggatctgaatgtcaacattgtcgtttgtgtaccccggctggtcctggacggggattttaatgcacattctgcttggaattctattcgggaatttctgggcgtgacaagttggtatcagagccgaccttgaccgtaggacaagccaaatggaaaaacctaagagccctctgaatccttttcattgcatatgttctttgcaattggatttgttccgggaaaattgggatctgttcttgtggttcgagggaaaaatcttgtcgcttgtttaagtgagttgttttcaaagcaagtcagtttagggttttagtaaaattattgggatttattcgtcagtcagttggggtttgatgggtgaaatgcattaggtcctagctctataacatgggttgcaaggtatttatgctttgttcgttattattaatatgtatctaatttctcattactttgtcgttatatgagtctgtcttatttattcgctctcatgcaaaatgacctatgcataaaattttgttcttgttcgattctcttatttgagtcttttattgctttatttaaatttggatttgagcatgcattgatcctactcctttgtcttctctagatggccggtcacccacccaaccaccgcggagaaggcatgatcgacttcgtggcagagctggcacgcatgacactggtggtgggctaccccaatgcgccggagtacacgaccatcccaccgctcagtggcgagcttcctcaccgtgtccgcttggaggtccatggctacgtggggacttgcctcgctaacatggcggttgaggcgtcaggaggcacagcagatcatgcctgtcaggaggcagcctacttgatgatggccaggttacgggagcgccacgactacatcttccacgacacggcgtaccgctaccacccccgtcgagcccatggtgatggcgtcagctccttccgtccgacagctggcgagaacgacaccaccttcggtcacatgtgtgctgtgatgaggggattggaccggatgcactcggacctgcacaaggcgaccaaggccttgaatgatgggaagctcatgaggatcgtcgctctgaaggacgagatagcgcgcctgaagaaagagaatgctcagttgaagggtcttccagcaccaggaggagtccggatccgcactacgccccgtaagaggacgactgcacccgtgcgcatccagcttgcgcccaggaacccacctccagcagcagcagctccggcagttcctccagctccagctccagctccagctccagctccagctcccgctcccgcgttcactctctccttcgctccagcatcagccgccagaggaccagccagtggtaccggaggttggttgtctgctactcccagtggcagcggcgagactgatctgtcaggctccaggagtcgctcagagggacctggtgacgagcaggaggacgccttcgactccaccgaccgcaggagccgttccgagcattaggctcgttttcccattagtttatcgattgtctagtttctgtttgttagtttgtgtgtttaggttgcttgtttggggtcagtcgacggtcgatatcatgtgcctatgatatggctgtcttaataaggatgtttgcttgctcttttaagtgtttttaattcagatcagaacaattgcagttttaattcctttataataaagcttagctcttgagcatctgtttttcttcttctcccccgtctgctttcccctccagatggtctacaccaggactggtagccgcgcaacaggcgagggcagcaacggtgaagaacgcgctgatggtgtgcaccccaacagtgagtccggcaatggtccgccaccacttcccgagaatccgacgcttgcccaagttatggcacatcaaactcagatgatggcagccatgatgcagcagatgcagcagcagcaccagcagatgcaccagaggatgatgcagcacgccgaacagcagcatcaacagtttggtccccctccccctcagtccaagttgccggagtttctacgtgtcaggctacccaccttctccagcaccaccaaccctatggaggcaaatgactggctccatgcgatagagaagaagctgaatctcctgcagtgcaatgatcaggagaaggtcgctttcgccacacaccagcttcagggtcctgcgtcagcttggtgggacaaccacatggccacccgcccaccgggtactgaagtcacatgggcagagttctgccgtagcttcaggaaggcacaggtgccagatggggtcgtggcacaaaagaagagggaattccgggcgctccatcagggtaacaggactgtgacagagtacctccatgagttcaatcgcctcgcgcgatatgcaccagaggatgtccgcaccgacgccgagaagcaggagaagttcatggcgggtttggatgatgagctgaccaaccaactgatatctggggactacgttgactttgagaggctggtcgacaaggcaatccgccaggaggatcaacgcaacaagatggacaggaagaggaaggccgctcagttcagggcaccccagggaagtcaccagaggccgcgcttcactcccgggcaacagggtggacctaccaccatgatcgtccgtcagcaccgcccgttcaaccctagcaacttccaccagggcactagtggcagtcagaaccaccatggaagtcagcccaaccgcggtacagctccacgcccaccaatggcaccggcacagtcaggccagcccgcacaagccaagaaggagacgggagcaaaaccagggtcctgcttcaactgtggcgagcttggccacttcgctgacaaatgcccgaagcccaggcgtgccgggccaaggtttatccaggctcgtgtcaaccacgcgtctgcggaggaggcacaagcagcaccagaggtcgtactgggtacgtttcctgttaactcaatccctgcaacagtactttttgattctggtgcaacgcattctttcatctcaaagaaatttgtcgggatgcatgggttaataagagaggaacttagcacaccgatgcgggttcataccccagggaatagctccacttcggttcaattcagcccttctataacaatagaaattcaaaggtcaccatttctagccaacctcattcttctcgaatccaaagacctagatgtcattcttgggatggattggctgaccaagttcaagggagtcatcgattgtgcgagtcgcacagtcaccttgaccaacgagaagggagaaaccgtggtgtacaaatctctagtctcgccaaagaaaggggtctcgttgaatcagattgagacggaaatcccagtggacaccgtagagaagaacttgagaaaattggaagatatacccatagtctgcgagtatccggaagtgtttcctgaagacctcactaccatgccacccaagagagagattgaattccggattgacttggcaccgggaaccgctccaatttacaagagaccatacaggatggcggccaacgaattagcagaggtcaagaagcaagttgatgagcagctgcagaaagggtacatacgaccaagcacttcaccttggggcgctccggtcatttttgtggagaaaaaggataagacgaagaggatgtgcgtcgattatcgcgcacttaacgaggtcacaatcaagaataaatatcctttaccgcgaatcgacgatttatttgatcaactaaaaggagctaaagtgttttctaagatagacctgcgatcaggctaccaccagttgagaatccgggaagaggatattccgaagacggccttcaccactcggtacgggctatatgagtgcacggttatgtctttcggacttaccaacgcacccgcattcttcatgaatctgatgaacaaagtgttcatggaatttctggacaagtttgttgtggtgttcatcgacgacattcttatctattcaaagtccggagaagaacatgaacaacatctccgtctagtactcgagaagttgaaggagcaccagctatacgccaagttcagcaagtgtgacttctggttgacggaagtcaaatttctgggccatgtcattacaactcagggtgtggcagttgacccatcgaacgtggagtcagttaccaaatggaccccacctaagaccgtgtcgcagattcggagttttctaggactggcaggttattaccgccgattcatcgaaaatttctccaggatcgcccgacccatgactcagttgcttaagaaagatgagaagtttaaatggacagctgagtgcgataagagttttgaggagctcaagaagaagttagtatccgcaccagtattgattctgcccgacccgacgaaagacttccaagtctattgtgatgcatcccgtcacggacttggatgtgtcctaatgcaagagggcagagtggttgcgtatgcctcgcggcagttgcgtccacacgaaggaaattatccaactcatgacttggaattggcagcagtggttcatgctttgaagatctggaggcactatctgattggaaaccgctgcgaagtatatacggaccataagagtctgaaatacatcttcacccaaccggatctaaaccttcgacaacgaagatggttggaactaatcaaagactatgacatgagtattcactaccacccgggtaaagccaatgtggtggcagacgctttaagccggaaaagttactgcactgccctatgcatcgagggcatgtgtgaggaattgcggcaggagtttgagcatctcaacgtgggaattgttgaacacgggttcgtagccgctctggaggcacggcctacgctcgtggatcaagttagagccgctcaagtaaatgatccggaaatagcagaactgaaaaagaacatgagagtcggaaaggctcgggatttccacgaagatgagcatggcaccatctggatgggagaaagattgtgtgtacctgacgacaaggaactgaaggatctgatactcaccgaggctcatcatacccagtactccattcatccaggcagcactaaaatgtaccaagaccttaaagaaaaattttggtgggtcagcatgaggagagaaatagctgaattcgtcgcactctgcgatgtttgccaacgagtgaaagcagagcaccaaagaccagcaggtttactccaacctcttcaaatcccggaatggaaatgggaggagattggaatggactttataacaggactgccccggacatcatcgggacatgattcaatctgggtagtcgtggatcgactcaccaaggtggctcactttatacccgtacataccacctatacgggaaagagactggcagaattgtacctcgcaaggatcatgtgtttgcatggggtacccaggaaaatagtatccgaccgaggtagtcagttcacctcaaagttttggcagaaactgcaggaagaattggggacccgtttgaatttcagcacggcctatcacccgcaaactgatggtcagaccgagcgagtcaatcaaatcttggaggatatgttgagagcttgcgctcttgattttggtggagcttgggacaaaagcttgccatacgcggaattctcgtacaacaacagctaccaggccagtctacagatggcaccgtttgaagctttgtacggccggaagtgccgcacacacctctcttctgggatcagacaggcgaacgtcaactgttcggaacagaagtattagcggaagcagaagagaaagtcagaatcatcagggaaaggttgagaattgctcagtctcgacagaagagctacgcggataaccgtcgaagggagctcatttttgaggcaggagattacgtgtatcttcgtgtcactccgctccggggagtacaccgttttcagacgaaaggctagttggcaccacgcttcgtgggaccatacaaaatcttggaacgaaggggagaagttgcttatcagctagaacttccatccaatatgatcggcatccatgacgtgttccacgtgtcccaattaaagaagtgtttaagggtacctgaagaacaggctgattcggagcacattgatatccaagaggacctaacatatgtggagaagccggttcgtatacttgataccagcgaaaggagaaccagaaataaggtcaccaggttttgccgagttcagtggagtcatcattcagaagaggaagcaacctgggaaagggaagatgagttgaaagccgcccatccgcacctcttcaccagctcctccgaatctcggggccgagattccgtttaaggggggtaggtttgtcacaccccgaagttttcctctccaagccaaagattgaatttacaaatgaccccaagaaaatgcaggtgagatcaggagaaatccctaagaaagtatgcaataataatcggattggacatgtggattctctcttgagttctacatgtcga

SEQ ID NO: 5441 - DNA, 9591 bp, Oryza sativa
ttgattatctgtatgtcgcgatcgacaagttcactaagtggcccgaggcttatccggtcgtcaagatcgataagcactccgtacttaaattcattaagggcatcacagcccggtttggagtgcctaaccgtattattacggataacggcacccaattcactagtgagcttttcggcgactactgcgaagacatgggcatcaagctctgcttcgcctcacctgcccaccccagaagcaatggccaagtggagcgtgccaatgcggaaatcctcagaggccttaaaaccaagaccttcaacatcctcaagaagcacggcgattcgtggatcgaggagttgccagcggtgctctgggcaaaccgaaccacaccaagccgagcaaccggggaaacgcctttcttcctcgtctacggcgcggaagcggttctcccatccgagctcaccctgaggtcccctcgggccaccatgtactgcgaggctgatcaagatcagcttcgcagagatgaccttgactacttggaggagcgaaggcggcgcgcggccctccgagccgcgcgctaccagcagagcctgcggcgctaccatcagcgccacgtccgggcccgatcactctgcgtagacgacctcgtcctacgccgcgtccaaacgcgtgctggattgagcaagctctcaccaatgtgggagggtccgtatcgagtgatcggcgtcccccggccgggctccgttcggctggccacgggcgacggcacagagctgcctaacccatggaacatcgaacaccttcgtcgcttctacccctaagggggatcgggtgtcatgtttcgggctcgggccaaccccgcacccccctcgggcgtgcagggttggccgggggctaccacacatgcatatttttatttctcttatatctgctcttatatctgtatttcaataaaagcattttcgatttcctaaaggttgtatctgtactgttgtttccttttggagaatcttaacttgaaataggtcactcgcgctcaatcctgccctcgggggctcgggtcggctaaaatcgccaaaaggggcccagaaccgagccgtgccccggggcgtggtgaactccgggggggaatcggtaaaaacccacaatcgggtcacccataaccctcggtcaccacgctcccggcctggccagtctcgacacgtggatctccccaggcactagccccgacccgcgccttttgaggactgggacctgggcacgagcccttaatcaagctaagacacaaaaggaccacggcacagatcatcctcatctcatacacatagcaaaatgaaattgacacagaaatttcttcattttgattgcagattaagttaatctatacaaaaaggaggcccgaaggccttacaagaaagaaaagaagaaaaagctgaagatcggcgggggcctgggggctcaatccgatgcacccgggtcgtcagcctcgtcgccactgccgcccattccgccgtcatcgtcctcctcgtcggagttgagggcgaacgcgagccgaggggctgaaccctcgaagctgtggacgatgtggttggcggcgtcccggacctgcgcgcgcgcgccgtcctcggtcccgggagggaactcgtccagcgccgtccatggggagaagtcgggatccctggcctggtaactcgccagtacaagctccaccgctcctcgggcgaggtccctcgaggatgacttaatcgtcctctcgagctcctcggggagccgttggagagtcccggccatctccaagaggcgctgggcgaggcccccctggttggcggcgtactttgctgtcctcccgccccagaggcctgcctgccggccggcgcggtctagaccggagacggcgtcccgaagcatgccgggccctacctcgcctgccaagcggagggcctcgacctccccggcggacgagtctagcgcgccctgcagatcggcgatggtgtgttcggcagctgcgaggcgggcggctaagtcgctttcgcccacagccgccccgccgctgcgcgccctcgcgtccagctcctttgcctgcgcctcgagttcagcggcccgctggttcagtgcggccctctcggcgcggacaccttccagattacggcgcgcctgctcctcccgcgctgcctcgcggagggacaggctgtccgccagccgttgcgccgcggcctcggcctcctcgagagctcgctcccgctcggtgagcgcgtcctcgcggaggcggagtgcggactcctcttcggcgcagacggcctcgtgcgccgccagcgttgcctcccggatggagacgacggcctcgcggtccgccaggtccctctccacgacgcaggcacgctctttcagcgccatggcacgggcctcaagggcttcttcgcgccgccgggatgccacctcggtctccgccgcccgccgttctcgggcagcggcagcgtcaaggaccccccgggcggcgtcgagcttcttccctagctccgcctcccagctcccgtgttgaaggcggagggtgtcctgcgcctcgttcatcacggtggtggcgatgagggcagccccccgttcctcctccacctccttggcgatctccgccagcaccttccgacgggcttcaagatctgagacgtgccggcggtgtgccttgcggcccacctccaccatggcctccaccgagcatcgcccctcttcgacacgcgcccatgcggcgtcgagctccgcccgctctgcttgcagggccttcacctgggcacttaacccgtccaacaccgtggtgtttgcgacggccaaggcctgcagaaggggctctgcgttcagtggggcaacggaaggcgtggggaagagccgcctcggagaagatgccgcgcggctcgggccgccgatggacgtgccggactcggggatgtcccccggacctggattgtcctgagcgtcgcccgagggagtgggcccaagcgatgcgcccgcggcctcgtcgcgagctgcctcggaagtcgtcgtcgcctcggcctggcgaagtctggcctcctcccgagcggcttcttcagcttggcgagctcggacggccacctgggcagcttcctcggcttcccgaaggcgatccgtggcctcttgccggtcagtttcacgggtcgcctcggaggatgtcgtcgcctcggcctggcggagtccggcctcctcccgagcggcttcctcggcctggcgagcccgggcggcctcccgagcggcctcctcggcttcccgtaggcgatccgcggcttctcgccggtcagattcccgcctccgagcctctgcggccgccggatcctcggcctcagactggccggacttggaatggtgggagggacgcgacgggatctcgctgaaacagaagaaagaccagaagacaaacaagatgggtgagtgaaaactcgcgttgagagaatgaatacagccaagatgggcgtgggacgaacctgcgagggggtcggttaaacgaccaccttggaggggaaataaggtttccccgggatggttctgtcccccccatcttgcggagccgcttcttttttcgctccccctcaggctacgacgtcggcgtggccccttccgggcgcctgctgctggcacgcgccgccccgccccctcggggaggagatgggggaggggttccttcctgcttcctcttcccccgggcgtcggcagggcggctgctccccgggcccccgtcgcggggcccagaagcacgaccccctcccggggtagattgatcccccctgcggctcccgcccgcgccatcgtggcctcgaggagcccgctcctccgacgccccgaccgcctgcatgatggtcaggatggaggcgcgatctggatcgctgcagagggggaggactccttggggaatgagggatgcctccacggagctgagattcagcacccgttggactactatcttgaagtcctcaggagcccaatcccatctgaccccctggtgggtcctcatgtagtcttcggacccggtgtactcccaggcgccccgggcgcgccgctgaagcggcgcaatccggcgacgaaggtagtcgccgaacaccatggcccctgtgagcccctgggatcgcaggcccgccaggcggtcgaggacggcgtcatagccatctcccagatctaccggcgcccgccagttggaggcctgcgctgggggctggctcggaagtcggaggcgcgcttcgtcggcgaggggggtgtagaaccagtcgctcttccagtcatcccacttcttgcggaggacgcagggaatgtagcggttcagcaccggcccccgcggctggaagtagcagccaccaaccactgacggcggcgacaccggctgtacggtgaagaaccaccggaacagccgaagggatgggcgcaccccgatgaacatctcgcacaggtgcgcaaagatggccaatgtcattaccgcattgggggtgaggtgcgccatctggagatcgtaaaactccagaacatccatgaagaaagaagaaaatggcggaaccagccctgccattgcaaaagggaggaagaagacggaccgccccgggtagcatggcgccgggcgtccctcgcccagcgtgactatctcccggccggtggcagattccggcatgaagcggcgcggcagcccggcctgcctctcgctcacgatgcgggaagacggcagcacgctaccatcgagcagagcggagccccgtgccatggcgccggaagaggagatgtttgagaacgagcgcgtgtggcgaaggtagggcacaggaaacaaggagttagggcgcaagcggcgaagacaaggggaataatgacgagaggaaggaagcaaatctcttcctcggtgtcttcatacccttgccaacgctgtgcccggctcctcacttctcgcgcccactatctcgctccctcgtttctcgcgcccacgcttccactaatcccattcgcccgcttgcggcgcatgaggtggatatgcggttgtggcagtcgagatggaacatatcgtgcccgcgttaattacgctcgccgaccgaagcgccatcaccatatctccaggcaaaacgaaccggctcgtcccgattcgcgtgctacctgagtaatgtggcagtcttgaagaggccgctcattattgacagtcgagttaccgttgccggagtgcgtgatttgtgaccattgggtttctgcccaactgtggagaccggtcccacctgtcaccaggcttttggaagtggcgtcacgcccgaccgcttcccttaaggagggcaatcgccctggcataacgccgggggctactgtcggtgacatgggaccgggagtatcatgactagaggcttgggcaggagcaatcacccacgaggcctgaccccctcgggggggtcgggcccgagggtgatgtggccgcccccctctttgtctccccgaggggtcggaccgctcccgtttcggccccgagggttgaggcgccctgtcacaccccgaagttttcctccctagtcaaaattgtaatttataattgaccctaagaaaatgctggtgaaatcaggagaaaaccctaagaaagtaatgcaaataataatcggatttgacatgtggaatttttcttgaattctacatgtcgaaattcattaacaggatttttagtggaattttcagagctctagaaataattttaaccaattaaaaatcactaaagtgcaattgttaattccagggaaaatcctttttccttttctttttctttttcctctcttttccctcctttttgtcaagtgggccgtcggcccacttctcccttccttcccctcccttactgggccggccgcaggccgaggcccagcccgacagccggccgcccgcctccctcctctcggggtcgccgacaggtggggcccacctgtcggacccgtctccctcctcccgccgatcccgctcgcgccgccaccgccgcaaccgacgccgcgcccacgcctccgtctctcccgggccacgtcgaccacgcccgcgcgtgcgccgcattccccgcgcccgttcccctccctctcccgctcgcgcccgcgcccgagatggccgggattcgaaaaccgaatcccgcctctctctcctccccactcccccacgtcggccgtcgaatcccgccgctcccggccacgtccggtttccccatcccctatttaagcatcaccggcaccccctctcgctttttccccattgcgccgacctctcccgagctccccaacgcctccgcgccgtgcaaccacccgccgccgccgcttttgctactccggccgccgctaggctcgccgccgtctcacgccgtcgccgccgttagcttcgcgcggccgaggtccacctcgtccacccctcctccgtcgaggttcgtcgccggagccctcatctccacgcgcacgggtgagcgccacctctaccgccgccttcggccatggatcccgatcgccatggtccatctctctctctctaatccctatcttctccttccttagggcacgccgaagctcgtccgctagccgacgccgtcctcccgtggcttgccgtcgccgtccgccatcgccttcctccgcgccggccaccctcggtgaggcatcccctcccttcttttccccttcctctcctctagccgccgctctccgccgccgtcggtcgtcgctttgcgccgctgccgcatgtgcgccgccgccgtgtgagcgccgcgccgccggcgccatggtcgccgccgtctcgcgccgcgcccgcgcgccccggccgcgaggtcccgcgccgccgtccgatctacccttgggtagatcggggccgccggtccggtcgccacgtggcgccgccgccccatccttttcccgtgccgctgaccggtgggcccgcaagccgccaccctctttctctctctcccggtcgctgaccggtgggccccgcctgtcggcgccgcgccccctcgctgacgtcagccctggttaatattgcgcaataaattatttaaggatttcttttatagtaataaacacagtgaatcttctaaaattcatatctaattcatccgagctccgtttaatcccatttaagtctcagtaaatcaagaaaaatgtgtagaatccattaaaaatggttttgttctctgtttcagtagtcttatagcctgtttgcaatgtttgctttgtatgtcgctagattccggttctttcgacgctccggtgtacttcgaaatagtcgccgaggtacctccagcagcagagcaaggcaagtcatgcttgtcacttgaacatgttgatcctatattgcaaatgctccattgttttctttcaaatattgcattgttttataatatcactatgggatggatacctactgttacagccatgcttttggatatcatgctcctttgttagcttgggttataacatgattagactttggactaggacttgcttagccatgcttagttcaactagcacacattggggatctcatttaaaacctagactataggtttatatgataatgttggtttaataccaccgctctggtgttggttaaataaaatgaaccacatggtgggctgtgggtgcacggttttgctagtcgcacccatggcagttaaggaccggttcgcgggatgccctggaagaatttatcgtacttaccacaagccagcgtgggcaacggctgggcttatagtgtagctttcctctagccgacgcatccaggcaagggtgggcgtgatggagtttggatgggccctgcgacggtctatgcggcttccggattcacctaggcacgagaggggactgcccgctgccttgcgaggagtgggggtgaaacctgaggtgtggtgtgcttggttagagggggttatgcgaagggtcctgtcacggcctctttccggtatgtcgtggtgacatgtcggcgcacggaaacgtgtcgtggggctgtgtcttgtgggtacagttgtacacctctgatcagagtaaaactattcgaatagccgtgcccgcggttatgggcggtcaaccagattcaccgtgattagtctcaccctagtgtaatctgttgaacttggatagtttaggtggatggttgggcctgtcgcaacgtgggttagcgttggacagcggatgtttaatactgtttaattttttacaactgtttttgcattaaattcctgtttataaatgccagtatttatgcaaatgaacctgcttagctatcccttgttaaatccatgcatcatacccctattccggtatgacttgctgagtacagtgggtagtactcagtcttgctctacttttccccccaacctcagagctcgagtatgtgtccgatggcgggttctccgaggagtaggcttcgtccgtgccgtcgaggatgcctgtggagtggtgttcccgctgccgttcaagtcaaggcttagctccagtttcttttgttttccgctgcatttctgtaagacttttataatgtttgtaagacgtggatctgtatgtcaacattgtcgtttgtgtaccccggctggtcctggacgggggttttaatacacattctgcttggaattctattcgggaatttctgggcgtgacacgccccgaccccttgtaggttttgcgccgcgtatatgggttaggtgagcgcagcagggctcacctaaccgcatttattgcggtttggacgagcgcgtcacgccgcatgtaacgcagtgcagcgcgctcgtttatccggtctgtgaccagtcacagaccgatcagatcgtgggttaggtggcgacaggcggtctgacacacgcctcgccccatcccgtcaggatgagagcctccaagcactcgtccctagccgaagccggcgtgttacctcctggagatggcacgttggtcccggtcagatatatgccaggcttcatcctaaccattacaagcaagatattgtatgaagaagggcgaacatgcagattgctaaactgacacgtggtggacaagaatgaccgatttgtgaccggtctgacactggtcatgtcgtcagcagacagccatgttcccacgtcgcgcctgcttccggcggaagtggaggtaggtgtgggccgtcccatcagaaggtcattcggacggcaaccatacaaatctccgtccatttatgaagagaaggcaagtcaagttggagaaaagagaggataagtccccacacaaaagagagatggtgcatgtggtatccccttgaggtataaaaggaggaccttgcccacttagagaggggatccagaacgatcgaggctggattgggaaccagaggagagagtttctagagtaaaagctctctgactctccagctctttgtagcttcttcatacacagatccaccagaacacaggagtagggtattacgcttctcagcggcccgaacctgtatacatcgcccgtgtcttgtgcttcttccactctcgcgaactttccacagactaggagcttagaatttcacccagggcccccggccgaaccggcaaaggggggcctgcgcggtctcccggtgaggagccccacgctccgtcaccaacgatggatagaaacttggggt

SEQ ID NO: 5442 - DNA, 1418 bp, Oryza sativa
ttcccacgaataatacgagaatatattttaaactctcgaatggatgttaaccgttatttcatgtagttcaaataattaaaaaaaattacaagattgattaatatataatatatcgctacataaatatgtatgttctttacaagttttttataaaaacacacacattgaactctagctactttacatatgttaacagccattttttattgtaacttatagaaattaaatttaaagtaacatgtttgtgaaccgatatatcgcatattaatttatccttttttaatatatatatatatatatatatatatatatatatatatatatatatatatatatatatatatatgacggaacgtggggctcctcaccgggagaccgcgcaggcccccctttgccggttcggccgggggcgctaagtgaggttcttcaccctcgatctgtgggatgtcagcgagaaaggaagcgcacgagacacgggcgatgtagacaggttcgggccgctgagaagcgtaataccctactcctatgttctggtggatctgtgtgtgaaggagttacagagagccggagagcaagagagttcaggctctagaacccctcttcctctttctctcctctaccagctcaggtattctcagagtcgtctgagagtcctccttttttctcccttccttcggtgggcaaggtcctccttttatatctcaaggggataccacatgcaccacttctacctactcttcttttgggtggggacccaccctatcttgaccaaaacttggctcgcgccttcgcctggaagctaaatcacagcttgtccttgagtgaggcccagcgccgtcactcgcctgacacaggggataaccctgtcattccttcattaatgggtggagatttgcaatggccactgtccgaatgaccctccgatgggatgggtcatacctacctccactccgccggaagcagatgcaacgtgggagcacggttgtctgccgatgacgtgaccggcgtcagaccagtcacagaccggtcattcttgtccaccgcgcgtcagtttagcatgccgcacgtctgcccttcttcatacaatgactcccttaccatgattgcgatgaagcctggaatgaatctggccgggactgacataccaattccaggagttagtacgccggctccggctagggacgagtgcctggaggctctcatcattctgacgggacggggcgaggcgtgtgacaggccgcctgttgccacctaacccgcgatctgaccgttctgtgaccggtcacacactgcgaccggtcacggaccggataagcgtgcgatgcgttgcattaaatgcggcgtggcgcgctcgtccaaccagcaataaatgcggttaggtgagccccgctgtgctcacctaacccatacatgtggcg

SEQ ID NO: 5443 - DNA, 5497 bp, Oryza sativa
tgaagctggggagcgacggccggctgcgcatcatcagctacgcgctcgtgaactcctcggcgccggtcggcggcgacttcatcgccccagccggcgactgcgacctcccgctgcagtgcccgtccctcggttactgttcaccggcgggcaacggctcaacctgcacgtgcccgccgctcttcgccgcatccgtgacagttgccggctcgtgcacgccgggggacggctcgacgctcgcgtcgccggccgcgtgtcagaacaacgacagtagcagcggcggcgcctccgtttcatacatcgccctcaagccgctgacctcctacttcgccacgaagttcgacgccccgacgaacaccggcgtcaacaagacggcgtgtcgcgcgctctgcaccgccagctgcgcttgcctcggcttcttccacgacagcgtctccctgagctgccgcttgatcggaggaaagcagctcggctcgctgtacaagggcgcatcagatacaaacctgggatacatcaagacgttcaactccgcaaccaaggccgggagcaaccaaatcggctcgtcgtcggcgaaccacaccgtgccgatcgtcctgccgtccgtcgcggcgttccttctcctcgccgtgctcggatggtatatatggtggaggaacaagatgagcaagaacggcaggaaaaagaagggcaagagctccaccatgaaagtgtacttgggccgtcagaagtcgccgtccagggacaccggctataacgcggacgctgacgacgacggcggcggcgacgatgacgacatcgtcataccgggcatgccggcgaggtttagctaccaggagattacaacgatgacctccaatttcgcgacgaaggtgggatccggcgggttcggcaccgtgtacaaaggggagcttccaggcggcgaggggctcatcgccgtgaaaaagctcgaggccgccggcgtgcaggccaagcgggagttctgcacggagatcaccatcatcggcaacatccgccacgtcaacctcgtccgcctccgcggcttctgcgccgagggttcccgccggctgctcgtctacgagtacatgaaccggggctcgctcgaccggtcactgttcggccgcacggggccggtgctggagtggggggagcgcatggaggtggcgatcggcgcggcgcgcgggctggcgtacctgcacaccgggtgcgagcagaagatcgtgcactgcgacgtcaagccggagaacatcctgctcgccaacggcggccaggtgaagatctcggacttcggcctcgccaagctgatgtcgcgggagcagtcggcgctgttcaccaccatgcgcggcacgcgcgggtacctcgcgcccgagtggatcagcaacgcggccatctccgaccgcgccgacgtctacagcttcggcatggtgctgctcgagctgatacacgggaggaagaaccgcggcgagcaggaggcggcggcgccggccaacaacgtcgccgtcgctgccggcagcggcgagcactcggacttgccgtccggatggagcagcgcgatgacgtcgacggcgagtggcacgagcggcggcggcgacgagtacttcccgatgctggcactggagctccatgagcagcggagatacctggacctcgtcgacgcgaggctggaggggcgcgtcgacgaggccgaagcggcacgcaccgtccgcgtcgcgctctgctgccttcacgaggaccctgcgctgcggccgagcatggccaccgtggtgcggatcctggaaggcagcgtgccgccgccggagccgcgggtcgaggcgctcggcttcctccggctctacggcaggagctatcccttgccggtgccgggttcgttgaccgccatggccggtggtggctcgcatttggacgagtcactgaaggacacgtcagcaccaagatagcactatgaagaccgagctgcatatcatccggcacatatgacgtggcactgtacaattgtccgcagtgccgacgtggcagtacacctgtccattatagaatccatggaaccgattaacctgacgtaatactccctggacgataatctgcaatgctgcatactttcgtcggttcctcccgtggttatatgcttggcagtatctgcagttcttcatctgataaagaagaagagaaaactgatccatgaggtgtggacaggttgaaaaacacaaaagaatggctgccatagattaaaagaactatgccaacttgtccatgtactagagcattagacaaagttagctttgaagctggtgacatggacagatgataaaatgattgctgattaattagtactccctccgtttcacaatataagtcattctagcattttccatatttatattgatgttgatgattcatcaacatcaatataaatatggaaaatactagaatgaccttatattgtgaaacgaaggaagtatatatgatctgcccggtacatttgtttgggaagtagagaaggctgtaaactgtacttaaaaccaggaaaagaaaacagagataaataaacggcatacacttgtaatctttctttacataccaaaactaaggctgcgcgttcgagtgcaggagaaagagagaaagatagttttgtgttccacgcgtacgtttctcgaactactaaacggtgtgtttttttgcaaaaaaattctataggaaagttgctttaaaaaatcatattaatctatttttgaagtttaaaataattaatactcaattaatcatgtgctaatggctcacctcgttttgcgtatcttcctaatctcctcaatcctatccttctcaaacacacactaagtattgcattcttttttagatgtttgtttccctgtacttaaagacacccgttaaacgaggagaagccagtggcttagcggcgagaacgagtttttttttcctcatccactaggttcaacacaattatttacagaatgggttaaacattgagcttctttgacgtgtacagtagggctttaattatacacatcagtgggacaagcatgaaccgtgtgtccttattatacattatctatgttttcgggaatgctacatatcggaatcccgtccgaacgggacacttgcttatttaaagaggagcgatacctgaccatgcatgtcccgagtagcagtagcagcctgtacaggacacggtgccgctccagcacgcacgcatggctgacataggcggcggcgctacggcgcccatgcccgcaccgtcaacgcactaccccgcgcgcgaccgcgagctccttgccggcagcactggcgccgtcgcaggggaggaggagcccagcgcggacgcaacggtagatgtggaagtagagcgcgaaggtgctgccctcgccgcgtcgttggcgtggagcacgacgagcacgtacttggctagcttgtcgaggcggcggaggaagcggccgcccgcgacaagctccgacgtggcgtggacggtggaggatgtgactgtcggtgacgagttccggcctgggacgtggatgacgaaggacacgcccgtcgacgactgtcacgcccagaaattcacgaaccagaatttctaagctgaatgtgcattaaatccctgtccaggaccagcccgggtacacaaacgacaattgttgacatacagatccacgtcttacaaaaatagaaaagattacaaatgcagcggaaaagataaaagcgagctaaaccgggaagcttgacttcagcagcggggcgactccactccacaggcaatccttgacggcagcgacaaaaccaacttcaacaagatagctccaactagaaaaatctttagctctggtgtgggggaaaagagagcaagactgagtactacccactgtactcagcaagtcataccggaagaggaggtatgatgcaggatataaccaaaggaggctaggggttcttttggacaaagctagcatttaaaagcagtagttgaaagtagtaaaacaattgtagtaaattaatcaatattaaccaatcactgttcaacgctacaccacgttgcaacaggcccaaccaaccacctgaactacaccagttcattaagctaaactaggggtgagactaatcacggtgaatttggttgatcgcccataaccgcgggcacggctattcgaatagttttactctggccagaggtttacaactgtacccacaagacacgattccacacatgtcgccatgccccgaagtatcaccatgatactgcaaagggggaaatcgtgacaagatcctccacataaccctcccctaaccatccacaccacgctaaggtttcacccccacccctcaaaaggcagtgggcggtcccctcttgcgccgcggtgaatccggcagctggataaccggacaccccggccgacccaactccatcacgcccaccctcgccaccggtgcctaggaaagggtcgagctatacttcagatcaagcagttacccactcccgcttgtggtaagcacggtaagtctcccagggtttcccgtgaaccagtccttaactgccatgggtgcgaccagcaaaaccatgcaccacagcccaccattcagtgtattttaattaactaacaccattgcggtggcaccaaatccaaagctatgctagtagacaaagtctatgtaataatgtgatccctttttgtgtactagttgagctaaacatggctaagcatttcctaaaccaacatctaatcattttgatacccaggttatcaatggcatatggtaaacaataaatggctgagtaataggacccatcccacatgacattgtaaaagaatgtaacatttaatagaaatacgggacatttgtaaattgggtacaatatgatcaattgtaatgcatgacttgccttgctctcgcactgatgagaccacagcaacgtcttcgagaaatcgtggatcgacgaaacggccgaaatctacgtgacaaacaaagcacacaagcaaaacatgctataagactactgaaacaggaaacaaatccatttttagtggattctagggatttttatgaatttactgagacttgaatggacttaaacggagctcggatgaatactatgaatttagaagataactgtgtttttactaataaagaaaagtccttaatcaatttattgcgcaataatacccagggctgacgtcatccaggggggcccggctgcgccgacaggtgggccccgcttgtccgcgcacaaggggagggagagggggctcgagcaagtgggccccactagcagcggcacaaggtggtcggtctaccgtggaccgggaccacgcggtggtccactgccggtccacgggaccgacggtccggatcggcctcaaaagcgatcggacggcgcgggggcgcggggggggggggggggggggctaggcatggctcggctcggcttcaaaaccgaccggcggccatggcggccggcggcggcacgcgcggtcaccggcggtgaccggcggcgcgg

SEQ ID NO: 5444 - DNA, 3794 bp, Oryza sativa
cgcgaaggcggcggcggcggcggcggccgaagacgacggcgcacgcgcggagggcgccggcgctcatgggagagagggaaggaaggaggagaggggattcctcaccggcgagcacggcgaccggcgcgaaggaagaaaacggcggcgacgaccggcgatgccgaggcgcggacgggcggtggcggcaccctaagagagagcagagaggggttaggggaagggaaggcgaccacggcggcttgaattgccggccggagatggaggggagagaaggtctcaccggcgcgcgaggagaaaagggctccggcgttgttcggcggcaaccaagcggcggccgaggtgcgggcgggctcggtgagcgcgacggcggcgactgcgcggcgcggcggtggctatagtggcggcggcgcgtggccggagacggcggtaggcagcggcgcaaggggcgagcggcgcggtgacgataggaagcacgggagggcgcggcgagtgcgaaaaacgagagagggagatgcggggagcgatttataggtggggcggacgtggccggggaggtggccgttttggccggcgacgtggggtggagagagagagaatgggggggattcaaattcgaatcctgccccttgcgagcgctcccgcgggccaggagatgcgggggagagggcggcgacgtggggaggacgcgggagcgacgcggcgtgggcgcgggaggagcggaggaggcggcggcgcggcggttttggcggcagcggttggagctccggctccaacggccggaggtgggagacgaccgacaggtggggcccacctgtcggtgtcccgagagaggagggaggggcggcttgggccggcccacaaggaggaggggccgcgggagagggatgggccgacggcccaacaaagaaaaaggagggaaaagaaaagaaaaagagaaaaaggattttcctgggattaaaaatattgcacttgctcaattttaattggttaaaattatttccaaggctgtgaaaattccactaaaaatcatgttaatgtattggagcatggggaactcaagaaaaattccaccacgccgaattcgattattaaatgcatttattaattaggaatttagctctaggttacttaagataatttcttctggcaatttatttaaccaatttttaaagaaaaaaaagggggggggaaacttcagggtgtgacaacgacgagctccgtcgtgggatgtggatgacgaaggacgcggccaccggtgacgagctccgtggcgtcgacggtggaggatgcggccgtcggcgacgagctccggcgtggggcgtggatgacggaggacgcggccgccggcgacgagcttcgacgtggcgcggacggtggaggatgtggccgccggcgataagctccggcgtgggacgtggacggtgggatcaccggcgacgacgctttagtgcctggctcctgatatctggtatgtatcgtctgatacctcataagtatcatcttctacgtgataagaatcacatgatatctgataggtatcatttgatacctaacaagtatcacctgatacgtggtagaatcgcatgatacctgataggtctcacctgataccgggtaggtatcgggacctgatacctcgtaagtatcaccctctacgtggtaaaaatcgcatgatacctgataggtaccatctgatacctcacaagtatcatctgatacgtggtagaatcgcatgatacctgataggtatcacctgataccagctaggtatcaggacctgatacatcgcaagcatcacccaccacatgataagaatcgcatgatacctgataggtatcacccgataccggctaggtatcaggacctgatacatcgcaagcatcacccaccacgtggtaagaatcgcatgatacctcataggtatcatctgataccttgcaagtatcacctgatacgtggtagaatcgcatgatacctgataggtatcaggacctgatacagcgcaagcatcacccaccgcgtggtaagaatcgcatgatacccgataggtatcatctgatacatcacaagtatcacctgatacgtggtagaatcgtatgatacctgataggtatcacccgatactggctaggtattaggacctgatacatcgcaagcatcacccaccacgtggtaagaattgcatgatgcctgataggtatcatatgatacctcgtaagtatcacttgatacgtggcagaaacgcatgatgcctgttagatatcaggacttgataaccaccaggtatcgtttatctagaccgatcccactatgtatcaaatatgatacttggccatccagttatctagtacttgataccaaccgatatcacacacgatgcctgttatgaggcatggcacccactcggtatcagacatgtgtgatgcctgttatgaggcatggcacccactcggtatcagacgtaatacctaataatagacttgatgctcacccggtatcagatgtgatacctacctagtatcagatttgacacctggtagctaggtaggctactacttgctatactgaactagtttagctatcacatgaagattttttgcgtatgcacgtggacaaaatgacaaacgatggggtgacatgacacaccttttgagacacgatgacagacatactaattgaatggaaggaatcgtccggctaaattgcttgcgggcctataccgtccgaacggtataccagtatatagcagccccccaatgttttctaaggaaaatccacctgtacgttgaatcttgcaagtattattttgtgctgtggtggagacgtatgcgtatatttgatttattttcatgtctatagaagtaaaaaatggtacgaataattattaatttttaaagaaaaataatgctctagctcacaggaatacaaagagagttcggtgggtgaacgaaaagaagagtacaagagtacgtactacttaccagtgttgatataggaaatgcacaaattaatttatccggcttttagcattgggaatagttaggccctatcttttagccaaatgctaataatacgccgtactttgcatattagtaaaaaaaaactaagtaaaacttttatatacgtactcttagtgatttaagtgttaaaatgaaaatgaaactttgataaaaatattgcaaaataagccttaaaagtaagtttccaaatttaaattttgtcaatggtcgattctatacggaggaaacgatgggccttttgctttgctaaatctgtgattatcaggtagcccgttgccacaaactaacggtacatctcatcctaaattttgctttatcagtcagaaacagttgatatttgctaacaacatctgcggctctgcgctgattgtcaaaatcaagctagcgatgacaccacatgaccacagagtcaacaaacagccaaacagttctacaagaggctaggggccggatgctggcaatatatactccctctgtcaaaaaaaaaaatctagaactagacatgacacattttaatactaggattctagataaaggtgtgtccagatttgtcctattagaatgtgtcacatctaatattagattggtttttttatgggtcggagggagtgcagagtattggacgtgctcggactccaaaacatatgctgtttggaaattttttaaattttttaagtgtccttagtgctttaaaagctaatgtcgaaaaagaaaaccacattaaaaaaacctaaaattttctctaaaaattaagtttcaaaatttaaattttgg

SEQ ID NO: 5445 - DNA, 3008 bp, Oryza sativa
aaaacagaaggcgagtaaaaccaaaaaaacgctagccgtgacgacgaggacaccaccgcactcaaccaacagtcggcgcaccagcagctgaggttggaggaggaggaggaggcgccgcccctcaccgcacctcgcgcggcgcgggcgcaggcggttgcgagcgacggcctcagcggcggcggcggcggcggcggtggtggtgaggaggaggaggaggaggagcggggagagtgtcgcggtgttgtcagggtgaggggagtcagatgcgcgcggaatggggaagcccgtcgatgtggagctcggcggcgcggcaggcctcgagatcgccggcggcggagggggaggagggggaggggtgtgggccgtcgccggggcgatcggccgcgccgcgtcgttccggtgcgtgttcgtgctcgcgctctccgtgggagtcctcgtctcggcgctgctgctcctcgtgcccacccgcgggcacgggttcctctccgacgaccccgtcgtgctcggaggtgagctcttcccggtcaaattttgcttccggtggtgcgagggtatggggattcgtgggtttaggtctagtgaagtggtggatcgatgatgggatgggggaattgctgcttggggatctcatgccgagtgttgacacttcgatcccgccttcatggagctaggatttgcgtgttttagtagcgaattttgtagtttccggtgttccgggttttgtgcgacgcctggttcgttcgctgttttgctattccaagttcccaactagcgaaaatcgcattccctcgtaattagttatcagaatcttacgtggtaatgcctacaaatctcttgtatgatctgggtcattaaattggatggtcgatgtactctggtgcgacatagatgtcagagcaaaagcttgtatggtagtacttggtttacccactccttattctgtgcacaacgtgtaattgtctattggacattggagatttctagtaggttttcaagcttgcagtgtgtggtcaaccgagatgtgcgatttgctcttcttcttagagtactagtgactgcggcaataacaggagttgatttattgattaacatggctgctacataatatgatgatggtgcctcaagataaaagtacgctaagatttgcttcactttggcaataactgtaaaagccgtttgttgactattttgtttgatgggtacttggtcttatgatgtgcaaactatgaactgtgaatggaagcttgacaagcatggcatttgctttgttgtaccattgaaattacatagatagttttgtttgatcacaatagatcgaagtatgaactgtgaatgaaggcttgacaaatatgccattttctttgtgcctttgtttcaccatagaaattacatatatatttttgtttgatcacaatagattaagtcattgagtagctatccttggagctggctatgacctatgtaccgttcctgataatattttagaatatgaaatgctttaagtaagtagatgtgttgttaatttatttcatataatgcgcaaatttatagataacctagtatttgagattcctagttaccctattgttcgtgtactattcacaaagttgtgttataggattgacattccatactcattatgtgcttatataacaagaaagaaagtccatatgttccatttgattatatcttctcttatgtagtgagtgtagataagctgctgtggaaatttttttttaagcataggatgttttttaggactggatggaaattgctttatattaatgtttcaggctttggatatatggaactttttacatttacattctcgaattcatcgtacatgtcataaatttcaagctcatatatggaaatccatgctgcctgcctcaggtggaaacttttagatccctaaatttgaggtttctaaggaaaaactcagcctccacccaaccaaatttgtagtttcatatgatgataactaattatatccagaacctttataatcaactttagtcgttgcatatagtaatgttcctcttataatccttgcatcactttttccatcattgcattttctacttctcattgataccaattttctttacaccctatattgttgaatgaaaatgctatgccatctttttgtttactcatttgcatccttaactagtattgtttagctatattgcatttgttggcagttggcgcagtccttcattactttctcatccgtggaagtgcctcagtgattcttctcaagtatctcgttatttcacatgccattttcattttatatggtatactgtattaataattgatttggcaatgattttagagtattccagaaatcgtcttgtttttttggcacagctattgtttgtattttttttttatgtcacagtgttaaatttagatgatgtctcttgccttataatgtatttgaggactgatagtgttttcaattttcatttattcagctgaaatccaggttggttttaccttggaaaagccagtttcattccttgctgctcacatggataaactagggggtgacatatttgaagaaattggtattcctaatagcaaggtgcctgatgcctgtttcttttttactaattttgtttcctctgcatataccatttgttaatttaaaggttcataattttcactctggtccacttgtgaacctaggagtgaaaattagacccccccagggagacctgaggacctaaaatggacttctcttattgtttgaaacaggtttccattgtgtcaatgcgttctttgacctctaagtactccacaaatgtggtttttagtgttcttccttctccaaaagaagcctcaataagtttgcctgccctaagtgtgctgagatcatccttaatagcgatgatgctaaatcaggtgaacctatcgttgacagaaccactttttggccatccatcttccgttgagctgttgaggttccctggaggaattacagtaattcctgagcagtctgg

SEQ ID NO: 5446 - DNA, 16616 bp, Oryza sativa
ctcggactccaaaacatatgctgtttggaaattttttaaattttttaagtgtccttagtgctttaaaagctaatgtcgaaaaagaaaaccacattaaaaaaacctaaaattttctctaaaaattaagtttcaaaatttaaattttggccatggccaataatattattttgtttcacaatatacttatggactaggaaaaacaataaaataacgttacagtgaatatatctgcagaggcaaattcaaagtcattattttcatttgaaatgttgactgcacagatgccactacatcttaaaatatgtgcttctttccttgaaatggattccaactctttattcgacttctttctacgagtcattctgtttgttcacttccacttgcactataaaaagataattttgccaacaattgggatgggaaattataattttttttaagaatcagctgaaagtcttattgctgcccaatctgaaagtttcgaagctcaaacttgcgaaaagaaactgaaacatgatctggctgaaagagttgtaccacaaaacttgaaagagttgtaccacaaaattgaacgataacatgtgtgggctattgtacaccattgtgacaagcttggccgatgccttgtgtcgggctccgtcgtggtagtttaggttaggttagttgttagcatggtgttgtagctgtggttttcgttcagttttccctaattaactggaccctgtaaggtttggtctcgtttgcttcttaaaatgggacaccttcttcttaatataaaacgtcggcaacggccttaccattcgaaaaaaagacctggctgaaagagttgtaccacaaaactggtgaagaaagatgcactcagaaatatgccttggcattttccttactcaattaaatcatttaaatatgccccgattaatttatccacaagtatgaatttgtgtgcgtttcaacaggcattgaaagggcgcagataacttgtgccaaaaaaatatcctttgtctttttgaagggggatgagatcatgacatgtctttcccaccagcggcggagtcaggtattatcaaagagtagagttaaggtaggacttaattaactagtgagttattcattttttttatcacattctcatggtgatttaagagaatttaaccataattttggaggcaaatatagggcttgagccctagctaccctaagcctggcaacgcccccgtttctcacccaaaaaaagccatcggtgactgtacttacacaatgactttaaagcaggattactcacactgttttgatgatttggacactattatgtaaccctaatgttatgtacgtggtttaaatggggatggatatcatgaatacagaggaagatacaaagatataagggtgtggtatgctttctcattcattctattcttcacaagtgtacaaccccatcacctcctaccctctatttatctcattcacctcccatacttagcgatgaatcaatttattaagtaaccgggctgggtcttcgtgggtcaccggtttcctaccagaaaccatttagtctggccctcctttcacaagattatgtttcacccttcattgtcagttttattgacggactacaattcgttttcacgcatagaagtccctttctccatcaattgaaatggaaagttcaaattctttctatgaaatatagctgagatatggagtatatagcattgtaaaccaagtttagcaagtccttttaggttgcatttttgtaattttagcaaataaaaaaacagagagaaaaagtcaattcaatccaaatttgaactattctgagtatgatttattatttttgacttttcaccaagtactaattaataacgtctacattatggtggtgcactatttgcatgggacaatgaaaaaaaaacaatatcacccaaaggttacaatttgtatggagagaaaacaatatcacccagctactaatccgtattttgataatgaaatatggatacaaaatgttacaataagatcaagcagaggctttcagctctgccagttctccgattgggatagcagcaggagcaggagcaccaccagttgttggcctgtaaaattatacaatctcttagaaatcctacaaagaaatgttccccgtaagagaaaataccgtgcagaagttcagatagacttacaggccaaccataactttgaaagaatcatagatcacccactgagttccagtcagtgtaccgatcatgaggatgcgaagaggaaggccgcgggtgaaaaggccccagaggccaaggttcttgacagcctgaaaagaaataagaattcagcaaacgaacacaaaacaatcacacattggcaaaacgcatcaagtcaagtatagctcccggctgtgccgttctacagggtgcagacttacatctccaacggtggcgcccttggagttgttgagaaacgagaccaagttgtcagcagggtgcgagacggcggcgcagaagactccagcaatgtagccactcccgaagctgactccaagctgcagaggcttgctgcattgctccttcggtgtggggatgagatgcttgtatgccatctccacgatgttctcgtacgtcgcaaatttcatcatagtatctgcaacaaggaaatgccactcacagttcagatgttcatgaacgcaagagagctgatcgtgatcgtgacaaagcctgaatgttacagtaaagcagagtaggagtactcacaaggaatctgacgcccccaaagcggaaccaagcctctgaacagactgcaattaacaatcagctacaggtttaattaacattctactagatcagtcagaacaggataacaaagaactcatcataaaaaaatatacataccctgcatagctttcgttcctgacgatctttgggaagccgtcgctgagccccctggcgtagccgggctgcgtctgcacgcggaccttgacggcctccatggggcagagcgcgacgtcggcggccacctcggcggtggccgagccggcgaggtagatgagggtcttgtacctggcggcgtactccggcccggccatgtcggcgtactccttcttgaacacctcgtacaggccgtacttgaacgccccctgcgcgctgtagccgaggaacgtcggcgcccaccccctgtagaagccgcgcgcgccctgctcccgcatcacgacgccgaacgccgacgtcgtgctcttgtacttggtcgggtcgatctgcgagacgagcattcgtcgtgtcagactcagagatgagaaaaaacgggaaatcagcattttcgttggtgattgaaatggagtaagatggaattttaagattgatgggccgagaggtacaagagcccatcaggcctactagtcctgtttgacgaaaagttccccggaaagaaaaatgtttccagccaccgtcagtacgtcacgggtgacgagctcccggttcatcatgtttgtgagtctgtcacgctcctactttctcggcagctgacttggacccgaaactcccggtcaattaacacgaggaaaagtcttccaacaaaatcttcgagccatcgacaacgtagaacatagtagtaggttgctatgaacttgtttaatttactaccatattaccatatcataggcaacttttaatagtgtcgaatttttagacagcttatgagtgttattggcatattttgatactgaaccaaacattagacaacaaactattagagtgacaataatttgataaagcatattttggtatcaaatcaaaatgacctaaatattctgggacggatatagtagctaaattcacgaggtgctccgtttcgtaaaattttgcagaaactttaccaatatccgggcacgtcaaattaagaagcgcaaatctatccgatttttttttaactgatagctcatgtgtacctgtatgttgcatttgatgacgtcgagcggggtcacggcggcgtgggtgagcccgcacgcggcggccccgccgaaggcgcaggcggagtagtatgccggcgagaacagctcgatcatcccgaacggcggctcgctcggcgcccccgcgacgaccgccggcgcgcccccgccgccgccgccgaccccgtcgtagaggaagctcgggagcagcgagttgcgcggcgccatctctgtcgccacgacgctggcccctgtggtttcgtggtggttggatgactttgatcgccgcgtcgtctcgggccgggcggctttgtgttgtggacaccttgtggtgttcgttcgttcccctcgttgtttggagcttcgctgcccgcgcgcggccgtttttatacgggagaaactggaggaaaagcgattgtttggttggctcgtcggctgcgggctcgcgcgcgcgcgcgggtgcagtgtgccttcgcgcttggcggggtttgaccgcgtggtgtctttgggagcaaggtgatcgaagggagctggtcgtcacgtgccagcctgcctgcagtcaggtgatgtcaagtcctctggtttgggatttgggattaccttcctgagattggtgttaattttgaccctgtggtttattaggagaccgtgatctgttctcgtagtgaatttctcctcaacttgcgagttgcgacctgcgagggagatgttctggtctggatacgtcgactcgctgttttggacttcggagatgcattgcatgatggcggtctccatgtaggggtgggctaaaaaaagaccgaaccgaactaaccgagaccgataactttagtcataacgttgatctccatagtgtactaatcaattgggtcatgggtttcacttaaccgaaatacacttcaagaattaacccgaatacactccaagcccaacgaagaaattctaatttcctatccctcccaagtcccaatgaaccccacggcgcctcaatgccaccgcgccatgctcgcgcctcttcctcacaggcccgcgcctcctactcctcctccagtcctccactatggcctcccctcccctcatggttgtgttggctggttatctgatgaaattattgtgaataccatacactgagattttacacaccgactctgtttagggaacttatatctcttgatttttttttaactgtctaatgtctactgttcaaacaccttggaaaaaaaatcagtcaaatttaaacgaagaagattttaattcgtgcaccccctaaatctacgtcccttctcttctttctcaccgttacacttcaccgttgtccgtgcttgttgcccactgatgatccgacacctccacgaccttccctttcaaagccgcctcatgtctctaagttaaccaaaagactataaggagaacacaatgaggccgaccgagaaataggggaatacttcaaccgacacaagcagaccttgctccttgcctgagcatatcatacggactcctcacttcttcttcttcttttttctttttttttttttttgcgtggaaggtatgttaagttaaacgtgatttgtttgtatggacctaatttatctatcttctcttccttccttttttgcgtggaaggcatgttaacttaacgtgattttcctgtatggaccttaattatgttctctcttaatttatcggcaattcggcagagctatgaggccgtcattccctgtatcttcctattttgaaggccgcccgctcgcgcacaatgcatggcgtctattccaaaatccctttccctccacgacaccgcttccagcccacgcaaccctcgaacaatggcgagggctcgccggggacgacaaaacgccgccgcatcgccgccgtcgctggccctgcagctgcaggtggccagcctcgtcatcgtcttcgtcttcgccttctcctccgccatcacgcctacacgagctgatcatgtagaaggacgtaagtgcacttctcagctgcttcgatttcaatccccttcaccacgcacgcaggtaggagtacatagcaatcgccgatcgagcatgtcgtggcgtctggcgtttggacgacgatatgctgaaatcctagctccgttttttttaaaaatttttatccgtgtgcagacatgtcgcacgagatgtttggctacgaaaacgacgcgacggggccggcgaagtggggctcgctgcacaaggagtgggccgtctgcggcgacggcaagaagcagtcgccgatcgacatcaccacggtggagccgcagaaagtgaaggagccgctgatgcaagcctacaaggccggcgccaccaccattcagaaccgaggccacgactacatggttagacacagcgaaagcttgcatattactactccgtcccaaaataagttcagctgtggaaatccgtgtccaacgtttgattgtccgtcttatttgaaaaatttataagaaaattaaaataagttagtcacaaataaagtactatttatattttatcatctaataacaataaaaatattaatcgtaaaaaaaattcaaataagacgaacggtcaaaagtgagacataaacagtgcaaaactgcacttattttgggacagaaggaatactgtattattatttttagggaaacggtataggtacggtcagaaatttttcatatttgtgaaattaactactagctagtactccctccgtcccataatagatgacgtttttgactttttatttgcaacgtttgaccattcgtttttttgaaaaattagtgcaaatataaaaaaggataagtcatatgtaaagtatttttgataataaagaaaatgacaaataaaataaataataattttaaatttttttgaataagacgaatgatcaaacattgacaacaaaaactcaaaaagacaagtaatatgggacggaggtagtactatttagcagcaattctaatacgatgcatacagtaaaagataatcggaaacgatattatttttatggaaacggtattgggtaaacctgcaaatatgcaatgctgattgcaaaacctgcgtgatcttgtgtcttcatgtatccaacgttttggatttttggtctcagctgaaatggaaagatgggaatagcaagctgacggtccaagggaaggagtacacgctcaagcaggtgcactggcatgaaccctccgagcacacaatcaacggaaccaggtgcggatgcatgatcctggcaaaaactagctgcgcactttgttatcaaaataaaaggaattgtgaatcaattgagctgtagctagctggattaattagcggtggtgttgtatccaacaaatgtcagagtgtggtcggttcgaacaattaatgggattcatgcaggttcgacgcagagatgcacatggttcacgaggaccccagcatggcgagagccgtcgtctctgtgctgttgagcaccaaagcaggccaacccaacgcagtgctcaccgaggtagtaacaacgacgtgcctcaccgttcacctgaaatggttcgtttccatttcatctcccacggagaggccaagaaatggaaatgaacacatctagatgaattgtgaatactaactagaaagtacttgatgtcaaatagtgatctttagtactggtaagtggtactgtataacccaatatggtacatggaagattggaagtgctagctagcacggtagcacccatgtccccacaaatgcaaaatacgttcccacgaagtaatacgagaatatattttaaactctcgaatggatgttaaccgttatttcatgtagttcaaataattaaaaaaaattacaagattgattaatatataatatatcgctacataaatatgtatgttctttacaagttttttataaaaacacacacattgaactctagctactttacatatgttaacagccattttttattgtaacttatagaaattaaatttaaagtaacatgtttgtgaaccgatatatcgcatattaatttatccttttttaatatatatatatatatatatatatatatatatatatatatatatatttgaatgacatgcacgaaacaagaaggcattccttttatagtttacaatcatttctctagtaatatctgctatttttagtttattcaccagattattaaaatggattatatgctccacactttgaaaaatacatttaaaaaaattcctaatgcattgctcaaaccacttgctttaagatattagttaagtatatttcttaaaatatttaatttgttcctgcaatcaaatcaatgatccattgaataatctaaatctaaatcaaacaaaagtagtcatgcatccccactactataaacggcttatatatgctgcatatacatgcagatggcgccacatttcaagaaccttgctggtaaagagaaggccgaggaggaagtgaaggagcctgttgatccatcgacctgggtagataaaacctcaggctactacagatacgacggctccctcacaacaccgccttgcactgaaggagtgatctggacgatcatgagcaaggtatatgaaaacaatggactagatgattatgagctcatgttcttcgtttcctgtatggcatttcaccacaggaacagcaatgcatactagactaaatatgtaagcattagctgaactctctatgcttaattgtctaacagataggagatgcatcgaaggagcagattgacttgctcaagacagtggctacggtatgtacgtgctggaagagtgtgaatggctgaaaccataaataattgctctacactgtaaaattcctgacgtttatttgctaatgcagactgtggaaccaaatgcacggccagctcagaaactcaacgatcgaattgtgaggtactttgaagtttaatctaaagatgaattagggtgtgtttagttcctgaaaaaagttgaaagtttggggaaagttggaagtttggaaaaaaaaaattagaagtttatgtgtgtaggaaagttttagatgtgatgtgctgtgatgaaaagttgaaagtttggggtagttggtggtgaactaaacacggtcttaggattaaagagtgactaaagtgtgcatttactggtagacgatgcaacagaacaggtgagcattgtctaatgtctacagtatacagggtggccgacagaaaacgagaaatctagatgatcaccaaaaattactgacagatcgaactttgaaatttcaatttcaacattgaacagttctcatctaatgaccaattgtcttgactttagcatggtttgcaaaatcagtttctggattcatattgttttggtggttttgaccagttacaacccgtaacccaagaaacactataagattgaaccagctgcttgaaaaacattttgcatatttacctcacaagtcaccccaaaataaaactgcatccctaaaaccattgccattccaagttttttcactgggccggctactgagagccagcaaacctttttatgaaggagcaaacggtacaacaaggttgttgcatctactactgccaaaccactacagcaaacagcactacagcgccttgcatcagaagggcgcacagagctagcgccaccaggacagcgccacaagaaaacagagcactacgcgcagcatatgttccaagtttttatcaggtatcttaggacatcaagaggcagtagatagaccataataccataccagattgagtacagccttaagccattctgaccagaacatactaaatcccaatggcatattaacctcaaatgttgcttcaatttaactgctcggacacatccaatgaataactacgatcataacaatctaacactaaagctaaggcatcctctggaatgtactactagcatgttatagtttgctacagcgatgttgacctacagaagtacaaaatagacatgccaatgccatcacagaaatgtacgctaagagaacagagattaatagcacagttttcaaaattccaagcacaacaatcaaaattgttctaccaacaagctccagcatttgaactcaatcaggtaaacaacataatataagttactcgagaaggattgacacacatcctctattgaagtgacggtaaattgaaagaaaaaaactagttcttaaccaaatcaatttgatgaaagaatcacacggcatcttgttttattcaacccggactttcttgttgttcatgtatttgaacttacatatctcctcaaagaaatcatcagcggcatcatggcaattcttcatctgcgagattctgatgaccatagagcgcagcctcacgctatacttcacaagcgactcgagggtgttcagcttctgctcagcatttagtggtgagcgcactgtgatcaaaacctcttccaagcaagggatgcagaaccttgcatctaactgcattcacaattcacaaatattagccatctatcaataccttacataacaacctaaagttcaatgctatgccgcgaaagccaaaccaaacactcacattcttcaagctgtttttctggcacagagcagcaaacatggcaccatgaatatcaaacttgcggagattcgggtggctgttgaagaagtcgaccaaatcgacttccgggaatggctggagcgcgtcaaagtcgccactgaactcaattttcatcactaggtgcttcacatccctcgcacactgcagcacagagcttactgcagcccagctccactggacaccgcgtagagagaggtgctccagatctgggagcttcccggtgtccaccttgtacaccctccctacataatttcgtcgcaaagtaccacatcatgtcaacataatctaactacctcgcaacaacatgtcagcgtgattactgattaagaattcgctccccgcatcatttcatcgcaaaatagcatatcacatcaacataatcctaactacctcgcaacaacatgtcagcgcgattaagaattcgctccccgcatcatttcatcgcaaaatagcacatcacatcaatataatcctgactagtactctacctcacaacaatatgtcagcgtgatcaacaattcggggcggtgtgttgcgtacctgtgcttttggcgattgagaggcggcggaggctgtgaccaccgcgcagagtaatccaggtgaagccctggacctcgagtgactcgacgcggggagcggcgagcgagagggagcagttgccggctccgaggaagtcaagccggcatcgctcgagcagcgcgagttcgatggacaccgcgcccgagcagtcgcatccaagcagcgacaggtcggtgaggttggggcacgcggagatggcgtccttcacggcgctgtcctctagcggggcgccgacgatctccagcacgcggagcttgtccagccggccccacgccggcgcggccgtgagcgagaccccccagagcctgagctcctccaggcccctggccaggccaatgcagtccaggtacccgccgtcctccgccttatcggcggcggcggcgtccatccgcagctcgagcaccctgagcgaggtgctccgcagggccagccactcgggcaggcgggccatggagaaggggcagtagatgaccagctcccggagccgctcgacggacctcaccatccgcccgatggcgtcgtccgcggcgccccccgccgccgcggccgtgtcgaaggcgttcctcgggaagaagagcgccggcaggtacggcacgcactcgcgccagcggcggcacacgcaggcgcacgccgccacgtcgcggacgttgctgagcatcgacaggacgtgctgcacgacgccatccggcacggcgttcatgtccgtaccgcctccgccgccgccctccatgtgctcgacgaaacgcctcgccgctcgcgcctactcacagtcacagaagaagagacatgggggatcgggacggcgatggattggattagatagatcgggggcacgggggggtgtgggggcgcgtcggggaggatttgaaatttgaaacggcggaggtgggtggtgcggcggcgagcagcccgcccgctcggcagctcgtgggggagggaggggaaattttcgaaattgcagcgaccgtccgctcggattcgggaggttcaaatacgagtttgaaacgggagcaaagggtttgagggtttacccttttggggttggcggcggcggcgggcggctgtcgtggggaaatgggccgtgggcttggaccgattgtcaaggcttcgtgtccttcctgacaatgtctctcccatgggtttttcctctggttggtattgtagtgctcaattcccatggagtactttgtactttatagcgatggcacatcaacgtagtctaccacctaaacctaaagcacggttgctgaaacagtgaaaggggtttgtgctattcatcgtctggtttctcgatctctcaccagttttcctcgtaattggatatagctctccaataatgctagggcgatcatctgcggcaacggtaaagtgatggctcgacatcgttctaggtggtagataatagggtattgttgatatagccacgagcgagtgagctagatatggttacacccaggataaaggcgtgagaactatattgttaaaaaccgatggtgaatatggcggcatgaaacgtatgggaagctgagaggtgattttacactaacagatggaacaagtgcaggtggcgggaggttgaagaaacaagttggaccgtcagatttcaatccaacgatgagtcgaatcttcgttgtttgatcgatagtgggccccctcgagaaatatttctagtttctacttagatgaatcgttccttcttttggggtatgcgtttaaagaagggtatgcgtttgtttatagatataaagataacgtacagtataccctatttatcagtgtaataagtcgggaaagactattattaattgtagtagtgatgctgaagttaaaaaacataagggaaacattcctaattaattccacccgtcattagtatcaattaggaaactttgatcaattcctagggaattggcatcatattaattgttccaaatacgtggctagcattacgaagcccctttctctctcttttgttcgtggtttggctcttccatataggtgccaatactatttcttttttcactaatagtagtgtaatggatatatatcttgtgtgctcctatattttcatgagggtcaaattatgtaaattatcctttaaaattgcacatatactcatagttttttatttgatggtccatttttatttaccataacacaaatttagtaaaaattcaaagtttgctagctccgcccatgtaagaaaatttgtttgttatattttctccaaggaaattggaagtcctgtcattccaaaatataagtatttctaggtaaatagctagaaatgctcatattttataatagcgggggggggggggggggggcgggtattttcttggtctacgatgccagatttttttcctaatggggttcatgatttgaatttaaaaggcatagttagaaaaacagtgataaattaacatactagttcaaatatgataatatataaatagatctttcgctctctcggacaactagacactttgttataatataaattgtatacatgcatatattagtaagggtatatacttggttttttctttggggagaggggaggtgaaatcctacaataacatctcagacgttcatttttaaatcatatgatagtttttataattacattatatatgtgttttggactatatttttttctataaaattaggagttagatgttcaaatgaactcgtaaaattagttgatatccatgcatgttactggcaccttcttgttgggctgattttgtggcatagtagaaaatgttgggtggttgtgcactagtggaaaggagaaagagcaatcaagagccgtaggatggaatggacgatggatatagaataattgcacaccaccccaaagtcagatgatccggatccgaggtggtatggtacagatgtacccccaccatgaaccaagttgcattcgccaccctaaacatagttttctttttgtcaatttattttatgattttaacataatcattctaaactccagtaagtacttgcttggtcacttttgacatagaacatgaaatttgggctaaaaacctccactctgaaaactatattttatttatttcaaacatgtttttccatcgtatattatattgagtaatttgttatgaggatagctgaaaaaaattattgcattttacctagtggtgatcgattgtatagaaaattagtttattgttggctagagatattaattttatacttttaactcaaagtttgtctctaatctgccttcatcactgggtgtggtaccacaattagacacaaccaacatagaaatgaaagaaaagaaaagataattgagcatatgtgtaaaaagttatgtctctatttcttcttggaattgctctcctgcaactattttgttgagtgctatccacgatggattggacaatcatagcgacaagataaaaccgctagtgatggtgatgtttttccaaccaatggaacaaattccacctgtgataattcttcacgaatactactacagtactccatgatggttggtttcttccggaaggacgacagatttttgatggctcaccatttcaccaacatagtcttcttgaactatctactcatccatttttagttatttttatttctataaaggagtacttttatctaggtgtgtacacaagtggtcataggaagagcatgccattaaactgtcaatgataatgacacctagaaactgttccagtggaacgactaatcgtgatgaaacaaacaatcaatcacttattatttataggtaattagctcttctaattttaatgttgaaggttagttactcacaaatactttacttcgaaataacacgataagtgtgataacaaaataaaatgtgataacgacttatctgtataaaagatgaaaacaaactaagtagtacttcctccattccacattataagtcgctttgtacaaaaagtcaaagcgacttaaaatgtggaacggaggaagtagcagttatgtctagatacatagcaaaatggacctaccaaaaagtcaaagcgacttataacgtggaaagaatggagtagcatggaagagagtatctctatgttatttgtaatggtggtctcttacagctcatttgttacgtgattttcgttagggacataagtgggcaatttcattgccggcaaaaaaaaaaatccacttacaagtttattttcagatgatagtacaaaatttaaaagaaaaaaagtaaactagaattgggataagcgggaaaaaaacttgtttactcacctagcttgcatccttattttttacggaattgttgagctttcctaagtattttttagcttctatacattgtatatatagctgcatagttttctcttccctatgttctaaatatgcccttcatccatgtttataattaacaaaattggaggcttcattttttctttgaaaataccaaaaggtacttacacctatgtcatagtcgtatcatagtaaataaccattatctctagcacaagtgcacaacttaacttgctgtaaagacaatcaatcacacatccaaaatttccacatcatcacatacactccctaccacactccagctaactgattggaccaagcaaacaaatctaggccacctaatgacacagtccctgcataatcccactaaaatcagacataaccagggagctacccaacagcaggccaacacacacacagcaaaacacaaggtcagctcaccaaaaaagaaaaaaaaaacacagctgaatgcccaggttcaccaaccgaagcatcacattttttgtactactccataacaaattgacaagtgacctatctatccacatgtcctcacatgcacgggtttggttgcgaaagaggtggtgggatttcccgtcgcagttggtttagaaaaaagggcagcgtgagtgcgtgaggaacgccgatgcccaaacggacggtacaattacgaatataagagcaagtttaatagtacaactaactactggctccatatcatctatagtcaatttaatagtcaagtcatataatagtactaacatataaacatatactccatctgttaatatatggtctcatctatcatacatatatttcatcttgaagcctgtgctgtagctggctataaatctgtagcccgctgcttatctttttcttcttttatcttctcgacatgtgtttataactggcatatggtctgctattttactgctcaagtttttttttctggaagtataaatatttccgcgtagcacatggggttaagcgcgaagtgagaaaaaaaaaacagaaatgtcaaaatcccccgcatttttggccgcgatcgcgaagggcggccacgtcaaacgcgaaaaaacagaaggcgagtaaaaccaaaaaaacgctagccgtgacgacgaggacaccaccgcactcaaccaacagtcggcgcaccagcagctgaggttggaggaggaggagaaggcgccgcccctcaccgcacctcgcgcggcgcgggcgcaggcggttgcgagcgacggcctca

SEQ ID NO: 5447 - DNA, 3670 bp, Oryza sativa
taagcactgtaatcttttgcccactattttcttgtttgtttcacacatgcgaggaaacagtccctgactccctgttaacatgatctccaatgaataaggaagatagggttaactcatattataagattaacagcatcaagacaactaaaaaaatgcattccaaagaggaaaaaaccgaggatgctgaatattcagtttcttgagcttcatttgttttcttataagctgtaataaagttaatctatttttttatagaaaaataaatgaagttatgttgcatctaactcatattattgaaagtaaaatgcggttcaagttgcaaaagaactataggttacaagtcatggtagtcttgtatttggagtataggttatcaactaaactgttgggttgtcttcaatttttttagataatgtgggttgtcttcaattagacgggggaatccaattaacagcctcgactcgtatcctaacttgtctaagaactagcttcgcttcaaccaattctttcgtaccctcagctctactcatgttagctttggctatttcaagtgcctgttgagcttcttcctgatcaatgtcactacccagttccacatcattccctaaaatgatgatctcattattaactttctggcaaaactgctccacagaaccgccgttaaccattgatcattgaggaggcgattctcaagggacccatatctacagctgtgttaattggggggaggggggggtatggtttggtaatatggcaatttggccactactagtagataaaatgatttctttcacttcacaatcccaaatgattcgcttagtgcataaacatttaatttcatttcttcaatttgttctcctcttctaagtttatagctttcgtgctagcttcatcgatgttacccaccaaataaaaagcttgttcaggtagggcgtctaattccccggaaaggattagttgaaatcccataatagtttctgcaagaccaacatactttcccggagaaccagtaaaaacttctgccacaaaaaaacggttgtgataaagaagcgctcaatttttcgtgttcttgctacagttttatctacaagtttagtactattgattatcaaggatctcattatctttttcttttaatagttgtatctttcgctctccctcaactatagtgacaactgatggcagtcttgtgttctgctaacaagttcttttctatctgtgccgttcatactaatggtgcccctcattatttttaggcctcattcgcccgtcacatgtctaaccagggatttgatacatggattgtcgaagtgagaggttctggtctgagcatacgtgatcatgataattctgcttcatctccatcaggcgctttcgatgatatatctaatggcacattggctcttgataaatcaagcacattggaggttgcttcagttcaaagttctggtttctctggtattgattatgatgaccttggaatagttgcgttggatgacccacctttactgatggagatgactagtttctttgatcgaatttcaaaacttctggaagaggctagtttaaataaaaattttcatgagatcacagataagatttcggttctatctgaaatggtagaaagctctgccgttattggtccaatgagagaagaaagtctgcgtcttctgaagaactttcaagagcagattgactcatgggaacactttgtggcaactcagatgaatctaaattctgaatataattgggacttcgaccattacttggaggaggatatacctactgcggtgaggcgtcaccatccttttgtgagctataattgttgaatagttggcactgttgttatattcagtgagctaacagtgtaacagtgttttttaattattccatttgataatttcatcattagtgttataagattgtttttgtggaatatcgcttgacacacagttactacaggtggaatatattagacaacatagtagagtaaaagatgggaagctgcttgccattggacactcaatgggaggaattttgttatatgcaatgctgtcaaaatatggtgagacattacactgtattttgctgatgactgtttgcctgccctttactgttgctttttctatggaagtataattctactgctgctgctagaattggagccactattcaattatccaatgtaaagggaacattctagctgtaggcaatcaacaactactgcgcttgttttgctcagctttctggagttaacggtagattgttggacgtcttacaagttttacctttatatttattctagaaacacagtcaaattgttcatctgataagcaatatcatgatcgtttacagctcagcctactatctttcggttgtggatttttaaagtcacgacttattatttttcccttaatctcaaaggtttcgaaggagttccatcaaacttagcggctattgttactttggcttcctctgttgactacacgacatccaattcatcactgaagatgttactgccacttgtgagttcgtagtcgattgacagtttcaacttgataaagatgtttattacttttcatttttaaagtttttcttccttcattgtcatgaataaaactaatgagttcacttctcaggttcatcctgcgcaagcccttaatgtccctgctgttccattgggtacattattagcggcagcatatccctgggcatctggtccaccttatcttttttcctggcttaatcatcaaatatcagcacaggatatgatgcacccggagttgttgtccaagcttgtttttaacaacttctgtgagtactctttaattacacactgtcacactggattctgcatgtcatgcattttaagatttcagctttgccagaatgttactttaaagggtgttgccagaatattgttcaagaacacacagcactgtatatatgccatagtatccatatataggatttctgtactccagaattaattcataatacactgcattattaaccttttatgctatgatataaatatgggatgtctgtttcagcaacttttgtcaatggggttggatatgttcatttaagttgttatcatgtaatttgcaggtacagtgcctgcaaaggttgtccttcaacttacaacagcttttcgggaaggggggctatgcaatagaactgaaactttctcatacaaagatcatttgcgatattgtcagacccctgtcctagcactagctggagataaagatctcatctgtcctcctgaagccgtttatggtaagatgtggtgcttttcttgtctgctatctcagttgcttctatgaagattgctaactttttgtacatcatactcccatcttgtcagaaactgtcaagctcatacctcagcacatggtgaaatatggggtttttggaaagccagaaggccctcattatgcacactatgacttagttggaggtcgactggtacatattctcagtctcttcacataaaataaaatttgctgctccaattctgaaaagtcaaatctttttgtcatcctcttactcatgatttacacatgtttgtcccttgtacaggcaacggatgaagtttacccatgcatcatagagttcctttctcaccatgatcagtagtttatgtaacagtgaagctcctgaaatt

SEQ ID NO: 5448 - DNA, 7861 bp, Oryza sativa
ctctatacagtggtggtgtggagatggctctttcatggccatacccataacatgttatgacttcactatgtgtctggtcagatgcatctgtatgttctttggtttcccatactataatgatggcatacaggggcattctcctggtctgggttttcttgcgtggtacttagcaggcaaacttaaagcttttaaacgtgaagggcatattgcaaaactatgcctagtctttctgcctctacttgttgcatcacttgtggcagtctctcgggttgacgattactggcatcactggcaagatgtatttgcaggcggcattataggtctgtagtttcaacgcttctgtaccactttaaacattcttgctctcaagataagtacatgtaattcatctcattctctaccttattcaggtctcacagttgcttcgttttgttacctgcaatttttcccatatccatttgatgctgatggtacattcccctcctatatatcgatgatgatttagacgttgatcgacaacattttactaaagtgttatgtttctcttcatccgcagctatatggcctcatgctcacttccaactgctagccgagtcacgaagcaacggtaatgaaaactcacacaacatgggatggacagagaccgacgctttccatgaaggcgctggtgctgttgcgctgagagacacaagcctggttctagactcgatggagtctggcaggaggttttgaaacatgtgaaagggaagtatattgaagatgttcattgttctgtcttcatcagagttgaaactctgacgtgattagttaatgtggtatgtacagggtgaaactgaagtgcaggtagagtactatcattattcagagtatttggaactcactattgtttttattcacctttctgtaatgcagtatgccattgttttagtttatgcagaagcatgatatatatataaaaaggatttttgtagtttcttctgaagcacgatgatactgaataatagatttataaacagtaacgcactatcattctcaaacagctgaggttttcagggtgggtagcaactacaaattcagtatcacatcagaatgaggcaattgggtttgtgcttcatccattggcattccttgtgttgaacctgttttgtcgatgttgtcatctagaatttaccacgagtggttgattatcgtggcagatgagactaccattttagttctgacacttcatcatctaacagctcgtctgcctctgtaaacccttcctgaaccttgcgaagtgtataaatctaaacacaagagtcactgccatttgggaacttattacagctccaagttttccccacttttccagattttgttttgggaagcaaattgtttaacatttcacccaaatgtttttgctattagcaacaaaaattattgcaatttagcatgaaggctgagagaaatgaagcgttgacactaagcaatcatatcgatttgatgcacagaaatattcagaatctggtgcaagaagaacaaattcactacattttgttatgcctttttcctgtaatattaagcagtctacaaaagggtcaacaaattaatttagttggaaactgtacatgactggctgcaattgaggtagctagagtttgccatcaaaatacaaattacataaccagacacctacactagaaatctaaaaactgaatggatcacctgaaggcatccactacaaaaaaaggacccaagaagtgaggacaaaaactgaagaaaactaactcaaagcatttgctacttacaagaggtgaactaattatgtgatggatttgatttgcttgagggaactctcttcaagctctcaaacaccgccttcggagtcttctcgaaccttccaagcccgtccacacgtgtcgagcatgaacccgtgccatcgcattgcgacaacaaccttctactccttagaacagaaggttgttcatggggtgatgatgttgaagagttgcaaagaaggaagaagaggagaagcagagcagagaggatagccacagctggcttggcaaaggtagtactactcctcatggttcctttgagaaatggagaagaaagggagtttggaatattgtgtatggaccttggacaacatatttatagcatcaatctcattgatgtcatgtgaacttcatatgtgtgccttgaccatcaagtacacacaaagaaaattaatgtaccatatcaaggttggaaaaataatgaaatccacaataaagttattcctccttatatgattagctagaagttgggtactcattgagttgttaaatgtaaacacactttcagttaaagtgatggccttctggccctggtttttgtcaaaaggctgatctggttaacaatctttcctagtagtagtccacaggttaagtgagatcaaaagtgcattagagacaactagaagatagttgtaaagggtaatgtgacacttggggggaaggaagattaaagattaatctaaagcctaattgagaaaacctgcatcttagcagtagcagtctgcaggcatgcagaggaggagggagggaggcatgcttccacatgagaggtctgaacaacaaaacagcatggcaaattgtacccacatgcaatgcaatgagcaccagcgaggctggttagctcaccaacaccccccccccccccccggcgtgtcagcgcgtgcgccggcgggaggaagatctgaatgccgcgccgtgcacggactccgatgcacgtgacggcgtggaggaagaacatgcattgctttttctcaatttgctcgtagatttttggctgcagctgcctgcatcgtgacagctgattcagcatttcagcattgtgagtgtgatttgttttatgggaagacgaacggttgagcttgtgaagaaaatgtaatgccaaacctgaagaaatgtggggggtgaaaatgtttaagtttcattgcattttggttttgtatttctgttcattacattgatatggcgttggcttagagtagccgttctttttccttgaaaaaatcgatccctatcttaatgcctgtattgattcttttttttcttttgccgggatgaccgaaggaggtcatccaaatgttattaagatagagggaaaaaaaggttacaagaaagtttttcgctgtcgaggaaagatgtgcaccaaaacacacgccccgacaccacatgccaaccgcaccaacacaagctacagagaggagagccgaacaccgaaccggccgctgctatgcgaggccggtcgccaccgggcttgcaacaacaccacagagcagaaattccaaaaacaacgccttcatgaaggttgcgacgccaaaagacgctgtcgatgaaaaactttctttgcgacgccaaaagacgttgtcgatgaaaaactttcttgtatgattctttttttcgttctttcagcttttccaacctggttcatggaagatctagatccacatttttacttagttaaatgaagaagtgcagaacacctttggtatttgcatcaaggacgcacacagccatggagatctaggacacatcagcattgcaaatcttgtatggatcaagcagagctcaattagtgatgggatcacgaaattgttagttattcttcaaaggacaataacatagttggctggtcataagattccttatttgaccatgacatgcatcagcatcaccctacattcctactaaccattttcttcagtagcgacttagtgagtgatcacagtctaaacgcccctttttaggcctaaattagagaaaaaaaacatgtgttcctcatagaggcatatgacttgcatcacctgagtggaaattgcacaaatacatccatatgtcacatgccccatgcactggtttctaccctcaaaaagtagcttctctttttgcatgtgcagcctgtttacagatgaaactgctattgtcagtctgtgtattgtgctgttaacaaccattctgatttcattggtcaggggatctgtcattttgaaatctactctggattcacctgaagcttctgtagatggaattggattcaaaacaattgacttctgcaacattcagttttctgccctgccatctggtaaaaatttatcttctggtccaggttctggtcctgttgagattgtaattaattatgctcatataagaaggatataccattgccagcagtcagttatgtccagatccagatcagatcctaaaaagagatggtttgtgttattgttcatcttctgtggtcctcagatctgtcataggaaggaatattttctacatcttctacagatgttccagtccttcactgaaaagttcacttgtttgcatgtgaacataagttcagccataaactatcttcaattaaccctggtaaacgatatttcagaaattgtgacaatttatgaatgtaagaaaccaggataattctactgctccaagatttccaaaataatgtcagctactattttactacgtatggagaactctgtgaatccagtcaatttacatgcatattacagccacattttcatttgtgcatgtgcacaaaagcacatgaaaaatgctatttctccgtcacacagactataaccagtagacagaaaagcagccatgatgcatataatggcagaactctgagaatactaacatcatatacacaaattagtggaacaagggaaaaaaacatttttctggtatattagcagaaaaggaaactgcgagtcctgtgtgtttcctaagtagtttctgagataagacgaacttcatatagatcatcaccaccttttcctgtatcatcagaaacataaattgacaatggatgatatagacaaaccaagcttcaaaatctaatggagctaaagaaaaaataatacaactcaccaatttctgccttaatcccaggaccaaaaaaggatgtgaatttggcctgcgtgggaaaaatgtttgcaaggaatcagtaatgttaatatttaattctattttggatcataagcatgacgacagtatgtattgttctcgaacagctcgcccaagtacacagtacatcaaagaaatagtttatgggagctatctaggcacagaattttgtcatttttgagcatcaagttttgggttacactttcttctactgctaatttttgaacctcatcttttccacaacccaaagctgctaaaaattcatgtatttgtaacatgagattagtttagtatagagcttaagactagtacatgtatctagatctgaccacaaaggcataccacatgcatctcagtccacaatggaagccgtgctgtattatatttagaaattaggagaggggattcacctgtctcttctcaaaatcggatatctccaatgctttggcttcaaatacaagtactaaactgtacttcccatcatcagttacctacaaggggaaaactactgagtcctttaaccaagaatcgcacccagtgaacaagacattctttctgtaacccacgaagatgttttttggggtaaaactggagatatcaataaacaaatataacccattggaatctccacaaggcatttggacagtttcaaagattgtctgaattatttttgtgcaattccttcatcatgagttcagccaaaagctatatcatttacacttgaggaatatcagatgaagaacaactaggaaacattaacatataactgggccatgttcattaactgggtaaagtagaatcaactacagggcctaaggcttgtctcgaagagaaaagaaggggccgagccctctaaggcctagtactaccttgtccaatgaacaaaagttgacaataatttcaataaaaataaaatcaagccaaaggatctttggcaccactcttaccaacattggctgtgcctttgccctgagatcagtgctaacagtgtactaattgaagccattaaacaaaggaaacaatgaccaaggaaaactacggagatctagaaatagcatttgatgctagctgaaaaatctgctattaatttgacttaatatcatttgagttcatctgtcatgactttaatgatgatacaatcgattgggacaaaacttccattagaaatggagggatgcaggatttttagatgcatggtggacacagaaacatcaatgaggaattatttcccacaagaaaaatacatatttatgatattcatatttaaatttcctgcctccttttcatgtatctatagttcaagaacaccacaaattggccattatgtaacaagttgacatttgacatgctaatcactgcactaatccttttagtagtctggttagagtaaaagggtctaggccattaaaaatcgctactttgcccatttatattcttttacaggcaaatattttgaatcatcaactttgcttgatgttactgtaggaattgtttcagtaacatcctacagtccacattgaagtaacaggtgccaaatgccaattcacatgcggcagatattgtgtgaacaatttggaccggtcttggatggcatgttaagtaaatcatccttacaggattagttgggtttgtttgatatcagcttcagataaatctgaagctcacccaagcagggtctaaagtggcttcttttaaacttgatggaccaaagtaaccttttgtgaaacttgaggggtccattttgtaattaaactcttccaacgagtatgaaatataaactatgaaaatgatatgtgtgatttacattatgcaatattttggaaagactacttcacagaaaaaaataaatgtattgggaacttacttcttcccgaatgttttgtaaaataggtgcactacgccttggaattccaccaccctgtcagttggattgtgcaaaaggaaggcagatcaataagtaggataaagcaaggaagttcttgccttgcaaaacttctaataacagaacatggaattattgataaaaaatagatgagccaaaacaatgtccagttagtaaaaaagggcaaaaaaaggaattaccaaaccatattgaaagatcctcttcagtgcttcatccaggtgctgctcatcaccgtatctgtaacgtgtaacatcactcctgacctagaggtaagtaaagctggaagatcaatactattgccggtgttatctttccaaaatccacaaattcgctaatgtctactcacgcctcttcctacaattttcaacacttaaatcccccctggcaccaatggtaagaaatccactaagaggattgtactcatcatgtagccttatttttctccaaataagaagaaaacagattataaacagctcaagtacaccatgaataaatagttaaatttgagcagtggaagtggagcatatgtcctagataatggaaattgaatagtacctgattgaggataggggtagcacacttttctcttagagcaaaagcatcggcgtaggttgtgcaaggcaccggtttcagttcagcatactgcatgtagaaaaatttaagaatcagtgcacactgcaacaaagaagctgacaaccttcaacctaaactccaaactaaggacagctgctcatctgaaactccaacacagtaaactgcattctattgctgcagagttattttcaagtatgtaatatgaaggtgcaaactcaatgaaaggccaatgactgctaattgccaaaaggcaccttcctgaggaaggtcttaagttgaccagtatggtcaaacaatctaaacaaatacaattgatatgtctcaacatgtcatatgcctcattgcctctcctcttgtacatgtcacatgggggatagttcttgccttcaatgccatgccgatgatggtgagtggaaagccatat

SEQ ID NO: 5449 - DNA, 3117 bp, Oryza sativa
gtaggtcattcaacagtggcagaaaagataggaaatattacatccgtcaccaagaccaagtagcatatacacttcctaaaaggcgttgcacccagcgtcaaaatatgtgccaagtgcaccgggtgatttatgaaaaaaaaatgaattttccattcggacatggcaggcatcacctgaagcatgttcaagctagaaacaatataaccagggcaactgtgcacgcatgtcatcatgcccatttttgcaacagcacacgacactataactgtagctaccatcatcctcacctttgagcttgccatcacctcttgcatctcccactcaggtgctttctcacttagtttgtcacctccaagctctagccatctaagtatctagtcgttcctaaactataatcgaggaaaaaaaatgtatttgttcaaggaaaattttgcagtatttgcttatgctgattcttctcatcatgcttaaaaagaagaattggaacatagaaatatgtggctttcatggtgttgacctaaagccactaatatcttgcttgatagcacccttcaaaaacattcttctcttcaagacaaatagtcaataaatttaaggatctaaaaactattgaaggtcaagatcctactatacttatgccttttttaacagaacctcatggatgtatgttgataatgtgataggcctatgaaagtatgtaactctgtatgtaacacatcactttttgtaattgtgttcaagaaaaataactttgtagttggatatatgcaactaatgtttactttgaaaagacaataagttccagatttttcaacagagttagatgtattgcccccactccccagtatacatcatgcctgtcaatgccatatccatccaacttggcatatggcaaccaaattgaccctcaacttacaatttgcaggaaaattccaaacaagagtagtttcagcaaacaccatcgctctctccccatcccaaatcactccaaaaacttgagccatgcatttacatgattccaagactctggccaccacttcctaccatctcagtgtttagtttcaggcgaggaaattctacatcagcagaaaaagagttgcagtgagagaaatctctgctcaccccgggggagagatcgaacccgatggcgttcgtcccgactcccgacagaagcatcagcgggtggttcctcgccggcgcctgcacgaacacgggcgagatcaaatcaaatcaagcacggctctggaaattggaaaacaacgggaagaagcaccaccggtcgtacatgaggcggcggcctgtaccgccagagcgcgagacgccacccggcgccggagacgggcgcgtggtggagctcgtcggcggtgcagacgggcggcttcgccggccgcgagggggccgccgcggagaggtggatcgggggcggcgcgtcggcgcggatcgcgcagaggacgcggcggcggaggcgagcggtaggaggaggggagagtccctcggcggagctccggcgagcgccggcgccggcgccggagatgggctggagaagcatcggagttgccgttttgggcattttttggttttatttgaaataaatttttgggtcgttataaacggcgctctttctgcgcttctttcagccatcaacctggcataaacactttaaacagtctgttagcattaattatatactactagtggtagttgcaattttggtaatgtcggaaaaaaatcagtttacttccaaaaaaaatacactttatgtagaatttggagttaacaccttaacctttgcaattaaggtgacacatgatgtacgtgccttatggtttataatattgcaccgttatctttcagtttccacggtaacattatacggtaactctatcatttttttcgtgctaaccatgataatatcgggaaacggtaacccctaccggaacagtaacggaaaacttagtattaggtgtagcccatagccattcaatcaaaatacgagatttaaactgtttgtcgcaacaaaagtatcgtggtttaaaacatactagtatattgtatacttcggtacatagacgatctcaactcccaaggtaagaaaaaaaaaagaagttttcttgttgtgtatatgcgacacctattgtgttaattgaaaagatatatatcgtcccccgcaaaaaaaaaaaagaaaagaaaagatatatatatcgcccattttatattaaattttaaaagctttagtattagcatctttttagtatgatatatgccaatcacatgtcagattatatcacattataattttattggggtaaaataatttaaaataaaactagtgaataaaataattttaaagactatataaacatcaaaaatgtcaaatttttaaattggatggagaattaagacataaaaacagcggctctttttgagttattgaattggagaaaaaaaatagcaaccattttatatattgtgtcactaagagtaccttgtttcgttagaatggatataagggcatgttcaactattgagaccgattcaggcttataagttatccacgtcacacaagatctcttagtgctctctagtcatctcttgcaacttgttgtagtttaccaacgttgcattgtatattatgtctacaatatatgacggaagtcacttatcctctttcctcatcctcatgcataataagatagtaaagcctcgtagggctccgtttttgtccttttttgaaattttttttctcctcgatagttgtggtatgtggtttgcagatgcagaagctcctcgattgggtgagcagtggagccgttccttctttctttgtccggtttccctcactggttgtgccggtctcacgctgcatgcgcgccacgcacttccttatcattttttttatcctgagagtaaatgacgtgtgatggtgtttatgcaaaaaaagctcctcttgtttgaacggaatagcacgcacatcctcccaccgaccgacaccctattccattttatacgaaaaaccactcgtctttcagaaaaaatacaacacgaagaagggaaaattctgcctacatggatagcgctgttaaaacgaaaaacacaagggtttttcccaaaaacaac

SEQ ID NO: 5450 - DNA, 5855 bp, Oryza sativa
cgcaacagcaccagcgccttcatggaaagcgtcggtctctgtccatcccatgttgtgtgagttttcattaccgttgcttcgtgactcggctagcagttggaagtgagcatgaggccatatagctgcggatgaagagaaacataacactttagtaaaatgttgtcgatcaacgtctaaatcatcatcgatatataggaggggaatgtaccatcagcatcaaatggatatgggaaaaattgcaggtaacaaaacgaagcaactgtgagacctgaataaggtagagaatgagatgaattacatgtacttatcttgagagcaagaatgtttaaagtggtacagaagcgttgaaactacagacctataatgccgcctgcaaatacatcttgccagtgatgccagtaatcgtcaacccgagagactgccacaagtgatgcaacaagtagaggcagaaagactaggcatagttttgcaatatgcccttcacgtttaaaagctttaagtttgcctgctaagtaccacgcaagaaaacccagaccagcaaaagcccctaaagtaatgaagaaagtatcgaaacagatacatcagattatctaccaacacatagggaaggataacatgttatgggtatggccatgaaatagcaatctccaaaccattactttatagagaacaaactgctgatatggggatgcatgatagaacaaaaaaaccaaaatacaaacaatttggaagaaaacaagaatgagattaaaaaaattaatctgctggctcctggcacctgaactcgcaaatacaacctatatgcattaagagatgcattcaaatacaatttcaattgttaaaaaaaaaaaaactaactgctcaatagcatgggatttaaactagtagagaaacagttcatagttaaaccttcttcccagctttcctacatagttcccaggaagccaggagcacatatatacatgagatattaatattgcaagagcagtatcaaataatgctcaggtataaaacctgaaacaaccactagactaaacagcagtgatgcaaaataaccattggagaaaatccgtggaaacgtacatgatgtagagagtgtgggataaactgatgtaaataaatgcatgtcacaactcacaagtactcaaaaataatgaggagcaccacaaaaacataaggcataaatcataatgaaatttgaaccaatgagaaaattacttacagttaagttacaacttcaaaaaaaaaaaacctaaagcataagacatcatatctagagtacaactgtgcactgtttattacctgaagaatgcccacttgggaagctcttgtagccttccttgatgacactcctttctccatggcatatgacatcaccagtgacattattgaaattctacaaaaacaaaaataattgattacttttaataaggtaaaggatgtttaccttgtttctgtacaatttgcttaatctatggcacaaaaaataattctttaagcaagtaaatcatagaagtaaatggaatccctgtacaggtcatattaatctgcatgtccttaacataaaaggttttattttccataacttctgtaaaaaaaaaagaaataaacagaactaaaccaagtacatgtcgataggaatgaaattgcttaaggagagaaatcagaatttacaaaaggatattacaggctttccatcagggaaacaacgccaaaagaaatctgggcgtgggcgaccaacaccattcttaattgcatcagtaatcacagcagttataagcaccgaatatagaatccctgtacaaagtgtccagttcagcatgaactaaaaaagtgaaagtgtaatttgatagatatctacatatgagagtaccatatacccagaatgccatggtgcaaatcatagacatttttctttttgaagtaaattccaccaaagatggcccagggcagcacaattgcaatcagctggaaatcaagaaaaaccaaacttcctcagagacatgtcatgcaccacagacaagtcaatagatgatcttataagaaaattaaatctcacaaagcaagaacatactggaacagcccaaaatggaactgtattgcccttcagtggatatctcaagtctgtcagcatgtcacttccaacgaagcggtgaaaaggctcaattatgttgaacagcccataaacaacagctagaaagataagtatcatccaatcatacaaatggaattttgccactttaatgccatgagatcctatagtatggcaccctaactgggtatcagccattatcccctaaaattgaaaataaacagaaatgagttcatagtcagagaaggaaaattgtaaataacatgaaggtgatggatgtaatccagtggtgttaggaacatggaaatgaataaggaacaacaaaggatgtcatgatagatcataatcataaatgtgttccgagttgctattttctgtcttgacaaagcaataaaacttttcagttggggttctccagaatatatagaacgtagatgctgtttgatcaaaagtataaagtattgaaaaaaaatgaaaactacatgtttgcagcaatcagaaaacagttaatgaaattgcagtatagggtggaaaaaagtggcatcagaactcatgtaaattctaacgtataactgtatttacaaaaggcatacaccacacaagtgagatcatcttattctgtgggatccaatttacttggcacttcgaagggcatgtactatttgaaaattcagaataatacaaacaatttacgatatcgatagcctacaaaaggtagaagttccaaggctgtggtcaaacacttcaatgtagccagcaattcacaataatcacccatttcagtagcaacaattcattcaatctaagctgaagtcctgaaccagccacctgattgagtactgaagtatgagtgttttattgataagattatactcatggcccgatattaaaatttcatcactgtcatgtggccactttggactttgcttggaaacaatattcatgcaatccctgagtccagtatttacagagtatgaagtattcagtatgacaatacttaacatgacaattaatattcaaactttcaccatcagtaattttttaaattgtttgattataattcgtttggttgtacttgttgttaaacttccataatactaatagagttgaccaccccacataagtccaaacctcatatcactaaaaaatgataacagatctaaacaaaagccttatcatgttattaataaaacaaaagtaacaacataatgaagtacaaactacccctaaagcaccttaacaatctttggaaagggaaaaactaagaaaaaaaatctcaaattatcgagaactccacacggagagcacaacaggttctttctaatgaatttcacaggaagaaaagaataactgacaggctcactgccccgctggcgagataccaatggctcctcctcctccagctcgcaccgacgagatatgttacagttctgccagataaagaaaaataaaatcaagaagtaaagaacacggtcacccccccaacccaagtggtcggcaggagaatctaatctgagaatccatacatgaaatagattggaaatgagaatgtaaaaaagaagaagaaaatgcgtgctgcagactgcacagggtgctcacctgggatctcggcgccggagtcgcccgcagcgtcgcattccccggcttgccgcgcggccgcgaaagcgaatggatggatggagacgatgctgagtagcagcaggagtgcaggagagaggaggcaacgcggaagcagcatcccgcagcagaagatgaggggagaaaagtccttctcttctctgatggacacgtgtccaccgcgaatctgataaaagccattctctcttcttaaaaggccttctttggacaggacttctagtcgggagtggatttttttaaaaagttcgatataaatattatctccgtcccaaaataagtgcagccgtagatatctgtgcccaacgtttgaccgtccgtcttatttaaaaaatttgtgaaaaaattaaaaatatttagtcacacataaagtactattcatgttttatcatctaatagcaataaaaatactaatcataaaaaaatttcaaataagacgaacgatcaaacgttgaacgtgaatagtgcaaaactgcacttattttgggacggagggagtagttgtgaagaattacgaaaaatattgaaaatgttgagattcgtgatatctatctgaaatcaagtttaaattcgactaacacatcgagaaacaaaaatgacaaatttagatgtaaatagtacgttactattcctgcgctaaatttgtcctttttatatctcaacgtgtgatttgagtttggacctaattttttcagaatttttcataaccatttgaattttttttaacaaaacaaggaggtatcccctcgagggatcgaaatagtttccccttccaatctaatggattcgctggtactaagagtgaagaagatcctaagcaataggagtaaggcttattcggttttaataatttttatagggttatagtataatttaaatcttagaatttttttcatatatgcatcatttgttttataggaatagatcgtatcgaatttcggtagtcttaaaacaactttagccgtgttctttagtgggagttggcaactcaaacatataaaataaagctgttcattagtgtgtaattaattaagtatcagttttttttaaaaaaaaatcgatctatatgattttataaagcaacttttgtatagaaatttttttaaaaaaatcacaccgttgagcagtttagaaagcgtgtggacagttaacgagagagatgagttgggaaagctaaccaaagacctcagtcttgcacttcaaaagttttgtaacaaatactccctccgtcctaaaaacctaggttggatgtgattccacttagaacaacgaatctagataaaaggttatccaaattcgtcgtcctaggtaaaatcacgtccccacctaggttagcattttttgggacggagattttacctccccacctaggttagcattatttcggacggagggagtaacattttttgggacggagggagtatagtgcatatggcattataattctttactttttctatttctatgatttggaaatcctatgatggctcaattttcttcctcgtataactactacattgttatggaaatgtggaagtcaggtatcacattctcagatttcaaggaaaccaatatgctcatgtaaaaatcaagacaaattgaccctccaaaccgcacctcatttgttctgtttgtaaccaatatcttgcttcaatacaaacaataactatgagcagccttcaaaaacaaaacaaaaaataactatgagcatttacacaacggagcaactaaaactgcaataaactggatcagacaaatcagcaacatttgtaatttacattgggaccaatttcagcacaaccagagcgtaggataggtacatcagcagggtaacaaagaggactgtggaatatgattaagagtgcaaactcccactgtaatttacagccaacacccacaacgagtttaagtcagcatataacggccagcaccgagttgcaaggaactctcaatgatgagacgatcacctgagatgacaagcacaattctacctggcaaaactctacctattcttgcgcaatgtacatggaaatgggggaaccgtacgaactactcatgttgtaaaacttaaaactcagaaaggccgaagaatccacacaacattaagatacttggtcgcctcatgttt

SEQ ID NO: 5451 - DNA, 17417 bp, Oryza sativa
tgcaagcttccaccacttttatgcattcctcaatctctaacgaaagcaactactggtactagcgtttttttctacatctcaaaagttacactttggcatgacatctccttaatttggagagacttgagtagaccacgccaccatttaaattaaagtgcgttgatcgccggtcaactaaacagtgtatgagtatgacatcagacagcgactgttaattgattagcaaacaaaatacatcaaatcgagcaagcattcaggtatacttactactctaaatctattataagttacatccacctaaaatcccttacaatttaaaataaagggagtacctgacgttcatgttcctagttttcatcagcgaatgatggcatgatcaaatcctagccacggccccacccaccctgatagaaagatttgttcttttaagagcaggtacaatagcaagctataagccagctgcaaacatattttaagaagataaataaggagagagaagagcagcgggatacagatttgtagccaggtgtagcacgggctccaagacgtaatgtgtgtatgacaggtgggaccagatattaatagtgtaatatgtaactattgtatgaatgagctattagattggctatatatgaattggagctattagttggctatactattaaactttctcttagacctgaaacaactagaattacatatgttaatttatttcgagacaggtcaacacatgttaatttgaacttgtggaaccatacagtaataaatctcctacaagattttgcaactgattttgatcgataccgttccgtcccaagctagccagtagcaatatcagttcagctgtttttcatgtgcccgatcctctactttagccctaacttaatgcagcttgactttgtaccggcagtcaaggtcaaggtcaagtatatatgtagatagagctaatttaagtctacaagtagaaaagaagaaccaaattaacaaatctccctctctttctcggttagcagaccaaaagaaactgaacgtacaaaagttccattcttctatctttttttttaaaaaaaaagtaaagtaaaacccatgacaaaagctccatttttattttaaaaaatttatcaaatcccatgctttatggtaaaaaattaaaaaaatcgcatgtattatagcttgtaatacatataattgcatgttttagttttgtggttcaagtgttacatcagtcttgttgaaatctcaattaattttagtgtgtcggaaacaatactaggttttgaagtagtgaagagttaaaataaataacctaataaagaaatcaaaaatatattttacactcaatactctaaaattttaagtaaatataacttcaaaactcctgtcaccagaagttcagaatacctgaactttgctaaataaaaatatgttctataatccaggccaggatgggccgggatggatagaagcatgcccgtatgggctggaaattgcaataggaataagttcactttaggtcccttaatttgtcagctagtctaaatttcgtccctgtttcgcaataccagatatggcacgtcccgcaactctcaaaacagtataaataaggatctaaggcagtttggatggcggtttcggctgacgtgacacttatgtggtgttgatatggcacttcaagcaaaaagaaaccgttggacccacgtatcatccggttaaaaataaaaacaatacagtgggacccacgctatcaacccatatctttcccttttatcactcttcctcctctctcatcctacccaaccgtgcgcccaaacccgcgtgcgctctttggagcgtcggaggcgacagtggcacgcccctggggtgcgcctgaccggccatcgccgtcgcgctcttcggcgttgggttcctcctccttgacccgctcctcgacagcatccactcccgtgacgcgctcatatcctggtgacagtgactcgtccatccttcatccacactccttgtccacgcagtacatggaggaaccgagcgagtttgtacactaaccgtcaccggtggtgaacgagtagaggttgcttgtggcaaacgcacccttggcagcccatccaagcgtcatctctgcggacaacatcgcaaagaagggcacggacaccacatatgtgtccctccagtagatgtcggggtcgtagttgagcgcgcgggcacggatgcgaccagtagaggtcaaggaggccttagttgggtgcgcgagcgagtttctcaacgtagaccctgaggccacgatcggcaatttgctgctgtgggaagaggagcagcagggaggtggggcgcaggaggaagaagaagagggagcggaggagcatggtggggacggggaggcacgccatggccgtcttccaaatctcgctctgcttgcttcagatggaaggagccaccatggtctcgctcattctgtttgcttcacctactctctcccgctgctcccctttttcacttccacgaccattctcctggggctttccatcatgaagttggatgtggacaagagcggcgacaacgcgggggcagctggtcttctgttgcttctagtggcgcccgctgtgtccgtcataggtatactgctttggctcgcgcgtgcgcggtcaaacctcgagcccgcctgtcctcaccctcagcttcctctccccacgcccgaccatcttcgtctcgaggcatgtcgtcccccaccgtgcgctcgtccggtgcaacaccgcgtttgccagccggccgcctgccattgtgcctttctgcgtgctcactactagccagtgcaccgtcagctccacaccgtgtcccaacatgtgggttactcactaacacgtgggtcccactttttatctaacttgaagtgccctgtcagcgccacgtaagtgctatgtcagccaaaaccgtcgttcaaactatgttgagaccttatttgtattggttttggaagctgaggagacatgttttatctagtattgcgaagttcagactcggcgacaacttgaggtacctgaaatgaacttattccattgcaatatacgggctgaacacggacagatgggcccagaaaaaaaaatatcccacactccaaacggacatccgcctctcattctccgtctcctctccccaactcctcgcctcgccatggcgccacctcccctgcacctcttctccccgtccccgcggccgccgtcgccgaccccgccgccgtggctccacggcccgcatgtcccctcgacgtccgtctccccgccggaccccgccaccgaggcccctccggctccgaagcagcaccgtgggcccagaccggcgccaagaaaccccggctccgccaagcccctcaccgccggcgtccccggcggccgcacccgccgcgcggtcctcggaatcatccgcaaggtccgctccctcgagctctccgacccgcgcacacccagccccaatggtggtggtggtagtagtagcagtagcaccgcgaccgcgcgcgtccccttccacctcccgatacatccgccgccgccggagcgggaggaggaggaggagaagaaggggattcgcagggcggtgccgtgggccgcggcgagggacgaggagaccaaggtggtgctgcggcgggagaagaagacgcgggtgccgacgcgcgcggagacggagctggaggccggcgagctggagcggctgcggcgggcggcgcgggggaaggagcggtgggcgcgggccaagaaggccgggatcaccgacgaggtggtggaggaggtgcgggggcagtgggcgaagggccaggagctcgccggcgtgaggatcgtggagccgctccggcgatgcatggaccgggcaagggagattcttgaggtgattgcttcacattgctatctgctgctacttgatttcctggacgatgagcttcttgttgtggtgatgcaaaagcatttgttgcatctttgtgaaactttggagttcatctttagcttcatgtacagcaatgtagctaagtaacttagtttcgaaaatggaaagggggacgatcttgtctctctttcttcaaaaaaaaatgtagagcaatgtagctagggtgggttcatttttggcatcatgaaccacaattctgctaggaagttgcaaatgtgaccagcattttctggcagataaaatgattgaattgatgcaggtggtgctacacccgttggtggactgctggtgcttgattcaagatttttattggctgaaattgttaggttggcttagctgatgaattatgtttggcttagttaaactatggttaaacagagaaactattttaacgacaccctctttaccttgaattatttaagtccaaatcattattatcaattcaaaacctttgatatttatttttttaattctcttttcattagattaaaacaggaggcttagttgtttggacaagagggggcatacattttgtgtacagaggaagcagttacctagaaaacgcaaagcggcatcgtgactttgttaattataatgaggaactttccccagtaacatctaacaatcctacatcccaagggaaatattggagtaaagatgaaactttaaccaatgataatgatgaagctgatgataaggacgacaaacctatcaagggaacactatatgaaagagaagtcaacagactactggacagtttgggccctcgatttatcgattggtggtggaacacaccattgcctgttgatgctgatctccttcctgaggttgtccctgacttcaagactccatttagacaatgccctcctggtgtgagaccagcactagcagatgaggagctgacctacctgcggaagcatgcacggcctttgccaacacattttgtcctaggtgagtttgctattagtccccatattctgcacttgtcagtcactttattgatagtttcaaatgaatatgctttataggatgatttaagtgttgattgtcactactatctattgtaacatcttatgcacacataacctatttccttaaagttccacaagcattattgtatattcataagtaacccatcataagatgtttatatatgtagcccaactataatcttgactaatttctggcaggtagaaatacaaaactgcagggtttggctgctgctatactaaagctttgggaaaagagccttatagcgaaggttgcagtgaaagtgggtatccaaaataccaatcatgaacagatggccagaaatcttaaggtgtgtattgttctcatgaaatatattagagtcattaggatttctttgatatccatatgttcaatcttcatctgtgacactgaatcttctcagtgcagcgtcttacaggaggaactgtcatattgaggaacaaggattatattattatatatagaggcaaagattttcttcccggtggcgttgctgaatcagttattgaacgggagtctcaggtacatgaccagcaggcgaaagaagaggaggctcgattaaagatggctgactcacttcaaatgattgttggactatcatcggagagaagttatgtgggaactttcagagagtatcaggatttccatgatagccatgcacgtagaacaactgaaaacaacttcagaattcaactagaggcaaagaagcatcgattggaaaaggaactgaaagaccaggaatggagactttccatggtatgctttgatctaactcgtcttgtaccttcttttgaattcccgaacttccaatggtaatgtaaaaatggtacgtactgcagcttaccaagaagattgaaagatcaaaccaagtgctggcaaagcttcatagttcttggagcccttcaaagaaagatggagacagagaactcttgacagaggaggaaaggaggatattccgaaaaattggcctaaaaatggatgaacatgtgctgcttggtatagccttttgtatcaaactgcaatattccatgcctatatgtgtctctatccttgaaaccaagaaaagctatttaccatcctatgatgaaaggtattcatccatggttttcccttgcagggagacgtggtgtctttgaaggcgtaattgaagagattcatcaacactggaaacataaagaggttgtgaaagtaattaccaagcagaaccaagccagccagatcacgtacacatctatgatgcttgaggttgagacaggaggcacattaatagcaatagagaggttcactaccagccatgccataatactttaccgaggaaagaattatcgtcggccaacaaaatcagcacccagtaatctcctgacaaaaagagaagcattacaaagatcaattgaggttcagcgacgaggggtatgaattgacatataattctcccttctccccttaatttccaattttctggctgtctgggtatctcatttcctcattcgttttgcagtcaatgaaatacttcgctcaggagaggaaaaagtccattgatgaattgaagagagaactggttagtttacatgctgtttatatcaatacgacgaaatgaaacttcatatgcttaagcaactggaattttatgtacttgatttatcactcttgtgttacagaggaatgtgacatgggaaatcaggaagctaaaccatgatactgaacagtcttggacagcatgatcgctatcaacattgaagattggaataacgattcatcctctcttttttttttcgtttttaacatgataactacaaagaacaaagtacacagaggccactagatctggtaggtatggtagatatggccacaatgaattatcttgcaagtgtgaagatgtttttttttttgtttatgtacatgtgatacactaaagcacatgagagcagaatcattcaatttggctctgatactacgacgaaatacgaactgattactgggtgttgattaaagctcggggagtttgctgaatatgcttagcgctttcatgttctaaaagaaaacaagtcgtatgacctattgaagagaaactaagaagattcagaaggatgctgtactatctagttctacatcactgttacaaagttactataccttttaagggcgaggttacgagggtacaaaaacatgtgctgaaattctttccccaagcaaactacagaaaagatcctgcctagcaaaagcggtactagtcacctggcccctgaggaaattttacaggatttttggaagatttgaactaagtcctgttatccggtgaaaattctgcaaaattattgtgttcgaagatcccaataaactatgcattggtcgcccaaacgagagcactcaagcagaaggacacagagaagcacaagtgctgaagaatctcactggacggcagatggcaagctttgcattcatcagcttcattgttcttgccgtcccgtccttcatggtttgcgaggctctcccctgaactgctgctgctgctgctgctgccgatgatgatctctcttgggcctctgcggcgcgttcttgggattggtgaaccaggtggtgtagaggaactgcttgtgcggcccgtcgtggtcgcagatgaggcggagcttctgcttctcccgcatccaccgcatcatgatcttcatctgcctcttgctcgtcaggcccctcagcccaacgtcctggacacgaaaatgccaaagattttctcgctcgtcagggatgcatgcgatcagggtggcaatcagaggaacacaagatcgttcagggatgacagtttccatctgtcaagcactgctggttcattttgacactgtgagacattacgtcgaacaggtggcgcgcgccaccgggggggcgagggcgaacggtttgcgaggtgaggggtgggcgcggcggacagggagaaggagcagcagcaaggatgcggcggcggcgatcgagacgggtagcatgagggcgtgacgaaccttgacgtggtcccagacgtcggagatggtgagcgggccgtgctccctgacgacgtcgaagatggtgcgcgtgatggactgcgcctgctccggcggcgccgggagctcgatcggcgccatcttcggcttccccttcttcgccgcccaccgcgccgccgtcgccagcatcctctccgacgaggggacgggaagcaagcagcaaacacgcggcggcgccggccgacgaggtgaacagagcagagcttaccgggttgggggtgggatagtttggctctcagattcgagtgtacggtcctcgctcccatcaaacactccccgtcgaaaactacaccaaactcgtatgacatattctaatactacaaatctaaacgtatgtctggatttataataaattatatcaaattttgaaataataatttttcgatattatgtcaaattgtcatatttgtaaaagttaaattgctagatgcagctacaaaataggggcaaatacataactaataaataaattaggggaaattgagagtatgaatgtcttttcgccaaaaatttaatattgttaacatgtctatttaaaataggggcaaaacttagttttgtttgaaaaaacaggagtgaaccgatataaaaataggggtaagaacgagatttccccttatagtaaacatgtaacatattacactcatctatgtatggcgtgaatatattatacaaatagcaccggtctataccactgtttatgttttttttataaaactaataactgattttagattgtatcaatgacgtgggtttagacagtgatcgatatggttttgtagagtattttccatacccaaccttaggctggcctgaattcgagagcgagccttgcctactaacacggaaaaccaaacaaagaattagtacataattaattttaattaagtattagttaaataaaaactttaaaataaattaatattgtttttttaaagcaacttttctagagaaaattttcgcaaaaaatggtaccgtctactgatagttttggaggcttgtacacgaaaaacaagatatgggagactgggaaagttgagagaagaaccgctccttgcccccgtgaaagagaagccatcctgtacaaccaccatcacaccttcacaaaaggctcactattcattagtcaactaatatttctggaactatctatctatatattggtgatttctaaaaaaaaacatacagattttttctacccttagatttacacccaaggtactataaaagaaaataacaaaaacatatttacttgcatattatttttatcaaaattactatgaacttacatatcatatcagctgaatttacaaatgttattttaatgttttcctttacaggttaaagtccaaattacctccggactattacgacagtttgaattactcccctaaactacaaaacagaacatttaacactcaacttttttggactggatgaataacccccagtacaaatttggttttgatcttacgtggcatagaacgtgacaatataatccaatttttaatcctaggtggcagtgagccagtgaggcccacccatcatcttgtccgccacctcatgacgcctgtcacctcctctaggtcatgttgggtgtgtatgagatagagagatagagagagagagagatggatatgggaggtgaaagaaaggagaagattggaagtaggttgtcaacaagccgagctcaagtgagctttcacgtctaggctcgagctcgacaaaagctggagccgagcccgaattgagcctaatcctccttcgagcttttaagcaggctcgcgagctcgaccaagtataggataatatataatttgatgataaaattttgtaaaaataaaaatttaattaataatattgaagaaaaatattaggtgtcacaccctgagaattcaaaatatgtaaattattgtttaaatggaatttttagaatttatttttaaaagcctagaaaagaagatctaattttaattaataaattccaatataaaatggggccagataaaatttcattaaatactttgcttaattctataattcctagatttttctgggatttatttgagctaaggaagtatttttaataaatggaattgcatttaagaaataatctaaattgaaaaaggttttaaaaagtcttcttttggctttgggccgaaagtcggcccaaaaccttctctctctctctccccggcccaagtcggcccagtccgcaaccgagccgcccgcgcgcgccctcgctgccgctgacaggtgggtcccgcttgtcagtcgtcgtcttcctcgcgcagccgccgcccgaaaccctagcgccgcgccgccgccgttcctttccaaatccggccgcccctttccttctccggccgaattgatagaggggaaatgatcctcgggatctcctctaccttttctcctttggaaacatcggctaaatcgttttggaagttcgtggaatcgagttcgattcggatcggcctctttccttcaagccacgaagtttcctcctcgtcgccggccgccgtgggccttcgtcgccgcctccgagcccctttaaaaggaccccgagctcttctctacccgccgccacccttgccttcgcctctcgtcgtcggaaatgccctagcgccgtgtgccctagcgccgccgtcgccgccgtcgctccagccgtgcgctgccgccgttccagacgtcgccgtcgctcgggaaggacgtcatcgtggtcgccaagtcgtcgccgtcctcgtccgccgcttcgccaccgtcggagaccgccggagcatcgtcgccgccgtcgacccgaagagcttcgccgcttcctcctcgtcgccgtcgccgtccgttgatcttccgccgtcgctttggtcgccggtgagtccgtcgtgccgtccgctacccgttggtgccctccgttcgtgccgtagtgccgccgttcgccggcgagcgtgcgccgtccgagccgccgagccgccgccgccggtggtgacgtcaccgctgacgtcatcggggccgttcgtcgtagaccggtcgtggaccgatcgatctcggccgtccgttttggatcaagtcgatctcggccgtccgttcgtgtgaaccgccgccgtgcgcccggtccaccgcaaaccctagcctgctgacgcaataaatccccttttccttttcaaaaataattcattattgcgtcataattcaattaaaatcaatataagtgttttaatccgattaaatcttcaaaaattcatatctaattcatcttagctccgatttagttggttcaagtctctaattttttctaaaattgagatctacatgttaaaaatatccacatgtactgttcatgcttgtttatgtgctgttttggtgtttttgctcttttctgtttagattccgtcttttccggagagtccgttttcgccggagaagagtttgaagagttccaaggccagcaaggcaagtcacacagatcccaaacaaccctttgagcatgttgatcctatttaaagctattgtttctattcaaatattgcatttattttcgaatgtcattgggtggaattaacctattgtttgttatagcccttttgttcttgattactttattccttgataccttgggttattataacttgactagttgagctttatatattggttcaactagatattagatataattgcttagccctgcttagaaacattagctcactattgggataacttatgactcactgttatttaatgatggtttaatgatagttcacgatggtcaatcgtgactggttaattaattaatgtgccaactaaaacctggtaatggtgggttgtgagcacatggttttgatggttgtgctcatgacaattaaggaccggttcacgagtttcggttgtgaaacattaaccgtgccaaccacaagccagcatgggcaacggctttatcttttgtgtagcatggttcattgcggggcaccagactgagaagtggcggagataagcccacgggggtcgctggggagtccatgccttgtttataagggggtgattatgatctaggaaggtgcgctgcagtggattgtgttatgcaaggggtattgtcacaactcctttccgaggtaccgtggtggtattgaggcacatggtgacatgatgtggggttgtgtcttgtgggtacagtggtacacctctgatcagagtaaaactattcgaatagccgtgcccgcggttatgggcgggtctaacaatgtctttcgtgattagtctcacccttctcaccacaatagaagatgctataactggtaataatttgattagctcctggtttggaatggtatattcctggtttggagatagaactgtgcagccgggatggttgttcagaatggttgggcctatgcaacagggtatgttgtatagcgttggattaatattgtttaattacttaactgttttattaaattctcaaatgtttgctaaatgctgcttttgcaaatgaaaccctactatgccatcctttgttatcctgtgcacttgcatatttgctgcgtggcttgctgagtatgtcatatactcaccttgcaatcattcatcagaggaagagttctacagtgaagctgatggtgtggaggattaggtgaagcccttgtcaagctgcctgtggagtggagccgtctgcgccgtttatcttattttccgctgcttagatatttattgattgagaggaactatctacctctgtaatgacattttattcgcttattaattagagtaataattgtactctattatcaatttgttattgtgtgcctcggctgattcctggacgagggttcacacacatgtaagcgtttggaattttggatagaaattccgggcgtgacattaggagaacttaagattaatatatcatgccaaaatacacaatttttttcacatgaatatatactaatttatccttgagctactaacttatcatataaaagataagctcgagctcagctcgacaaagctcgtgagcttgcagctaggctcgagttcggatcattaagagttcgaaccgcgctccaatctagtatgagcctcacgagctcgagcttttttgacagtcctaattggaagtagcaatgataggtcagcctcactgacttatttttaactggactgccacgtaggttcaaaactactccagactaagttgttgggggactgtggggtaatttgcaccattgcaatagttcaagggtgtaatttggactttttcctcttttgtatacttccttttcttttttaaaaaatacagtacaaacgcaagcctttcactcccactgggtgatcatcgctaccactgccccaaccaagtgtgttgccacactccgtctcgacgacaccataccaccgccggctaggctagtcattgtgtgatcccatgtcccgtctcctaaccacaagacatgtctcagcctcaccgccaccggcgccttcttactcactcatctcctgtcacacccaaagttttcccttcccttaggtttcaaatcactaataaatggcttcaagaatttgctttggttaaccactagaaaaccctagttaacaatacatttaatagtcggaattgtcagggagaatttttttcgaaatctctttgctctaaaaatcactaacaagacttaaagagtcaatatcagatcacggaggcaatgttgctaagttaaaagtggcaagttaattcttcttcctttgcctttggtcgtgaattgtgcccaattcactcccctctcagcccgtggtcttgttttgcatgaggaaccatatacgtgtcagtttgcggaaccatttcctttcctttccgtataggtagtcgagttgtctagccgtaggtgcaaccctaggttcctaccggccaatcgtttgccgtaccggggctttaccgtgaatcgtgtctagcccgccggtttagctgcagtcgttgttgtgtcgttcactcgttcatttgaacgaggtgttccctgtggttcgttcgttcgtccgtcccgagtcgtcctttaggttagagccgttcagagccgccggctcctttcaccggtttcgattgatcatttgggtgatcctgtgtcacgtagaattgactcgttgagtcggtatcacgtgaggcacgcttgccaatcaatctatcctttgatcctatgttctttcgggcttaaatccctgtcaattgattaaggtttttctgttaatagtaatagcacagagcatcttctaaaattcataacttaataatctgagctccgttttaacccattcaaattgcagtgaattcgttaaatgtcaagaatccattaaaattggtttcttttgttgtttcagtagctttttagcatgtatttattgtgtaccttgtttgtcgtttagactccggcacttctgacgctccggtttattttgaagtggtcgccgaggtcccgtcaattgaagagcaaggcaagtcatacagatatcattgatcatattgagcctatttgcaaaaacccctgcttttctctcaaaattgcattacttttataatgtcatgtgggatggtttctacccatactcagcctttgtttaccttaattcattgatattctgggataaaaatttgactagatgattggtctaggattgcttagccaagcttagatcaactagctcacaatgggattcactataatttagtccttaatttgattatgctatgccttcttggcatatggttaattaattaaaatatgctttacttggtgggtcgtgggcacatgcatgatgatttatttggtggttgtgcccatgacaattaaggaccggttctcgggaatccctggaagatatactcgtactaatcataagccatatgggctctaggctgaatcttaagtataatattttctagctagcacaccattggcgaggatagatgtgatggagtatggatggacctggattttggtctatgctgcttccggatttacctaggcacgagcggaggctgcctgctcctggattttggagtgggggcgaaactggaggtgggcatgctggttaggggtggttatatggagggttttgtcacgatttccccctttgcagtatcgtggcggtacttggggcatggtttcatgtgtggaatcgtgtcttgtgggtaaagttgtacacctctaatcagagtaaaactattcgaatagccgtgcccacggttattgggcggtcaaccagctcaccatgattagtctcaccttaataatttgccttaatgaactagtgtagttcaggtggttttggtttgggcctgtcgcaacgtggtttagcgttggacagtgatgatgttaatactacttaattatatattgttttactgctttcaacttatgatttacaaatgatgtttttactgcaaaatatcctatgagccaatcctttgttttatccttgcatcataccttccccttggtatgacttgttgagtacggtggttgtactcagtcttacttctttttcccaatcccctagaagcagaagttggttcagatggtgagttctatgaagtttaggattgtgccagccgtcaagagtttgcctgtggagttatggaggaagcttcgcgttgctgtgaagattaaatttagttctctagttttttcgctgcgtatgagtttattttgttatttttgtaaaacgtggaactatatcaaattgtcatctgtgtactatagttgatgtctggacagaggttaaatgcacagatagccggtgattcgggttattaaatccttgggtgagacatctccaccgcccctaattgttcttccatcgccctagtcatcactataaagccgccctgaaccccctcccccccccccctccctagtaacctccaaccttgaaaccataatccggtaaagcctatcggagttcgttagggtgttagtgatgaggcttgccaaggaggttgtggtcgccattgtcgtgactgccaccatcattgtccttcacgctcgctgtttgatctgatgacattcatcatagtctattgagatttttgggaaatgtaagtaaaccaatgaaagatacaattactttggtaactctgtgaacatatcctatgcacataagctttccgtgcacaccaactagcaaatgttacgaataattatacaaaaaaaattgaacatttacttataatagtattacacatatatgcaaagtcttattttcaaattaattatattttaaccctaaaaaaagtgaaaaatctgacaactttttgagttaaaatatattagaattttgttttttttttgggttacggctaaaatataacaaatttgaagataagatttcacacttaggtgtaatactattgaaactatgtgtctaattttttctagaattttatgtgacatttgttaattgatgtgtatggaaaatttgtgtgcatagtatatattcctggtaagtcctatctacatttatcattgtcatcattcttgaggctcttgataccatccatttggccttgtttctttctccatgtcttatcttatgtttgcactgaactctcaaggtttaaggtcatacctacaacaaacccagtgaacatggagtgtggtgagctaacaagccgggttggttgtggtcacatggactcgtcggctcaacgagtaaccgaaccataaatgcatgcagtagctaagctaggcccagccacccagaaattacgccggtcgaatgtggtcacatccacagctccagacctgaaccgccgatggaaaactctgaaaactgaagcgaatagatgaacatgctgaaaaatcccagcatcaggcatcagcttcgtgcctcgagcccgtcccgatcccgaccggagtactacgagctaccactacctcctccgttgactccggcggccatggccatggctgcaagcacgatggtacaagtgtgtactggtagtagaagtagtaccaatgtacgagcacagtacattcttggcaagtgagcagtacagtggtagtaatgatggctttgctgctgctgctgctgtgctgatgatgatgatgacaagatcatcgtggcctgtagcagcgtagcgtgtcgcagtttgaggagaggagaaaagaaatggtgaatttgtgatgaactgatgatgcatgcagagtaaaactagagcgaatttgcaatttggggtcagattgattgattgggtgatggtggtgatttggtattccatattcacagcggcaaatctcctacaacaagaagtggatcaaaactaatgaaaagaagaaaccaaagagaggaagaagaagacgcaagaaacagagcaagaagaggaacaagatggggacgagcggaagacatgtcctcttcagggtttcttgatctcttctcttccgtcgttgctgctcctgctgttcg

SEQ ID NO: 5452 - DNA, 6581 bp, Oryza sativa
ctatgagcagccttcaaaaacaaaacaaaaaataactatgagcatttacacaacggagcaactaaaactgcaataaactggatcagacaaatcagcaacatttgtaatttacattgggaccaatttcagcacaaccagagcgtaggataggtacatcagcagggtaacaaagaggactgtggaatatgattaagagtgcaaactcccactgtaatttacagccaacacccacaacgagtttaagtcagcatataacggccagcaccgagttgcaaggaactctcaatgatgagacgatcacctgagatgacaagcacaattctacctggcaaaactctacctattcttgcgcaatgtacatggaaatgggggaaccgtacgaactagtcatgttgtagaacttaaaactcagaaaggccgaagaatccacacaacatcaagatacttgtcgcctcatgtttcagcctctcctaccagactccatcgtgtctaaaataggactggtgtctctcagggaaatggcaccatggccttcgtcagcaatctcaatgtctgttggtcccatgttgtatgagtttgcaatgccgttgctttgtgtgtcagctagctgttggaagtatgcatggggccatacagctgcaaatgcaaaggaacatgaatatactgtaaaatatgtcgatcaaggtccaacatatcatctatatcagaagggaaacgtaccatcagcatcaaatggatatgggaagaactgcagataacaaaacgaagaaaccgtaagacctgaaaaaggggaaagaagaatgagacgagatccatgcctactttctgacaacgagagtgttctaaatggttgagagaaaggcttcaaaataacaaacctataatgccacctgcaaatacgtcttgccagtgatgccagtaatcatcaactcgagagactgccacaagggacgcaacaagtagaggcagaaatactatgcataactttgcaatgtggcctttgcgatcaaaagccttaagtttaccagccaagtaccacgcaagaaaacctagaccagcaaaagaccctgcagaaggtgagtgagaaccacaacacatacgtcagattacagacaacagatccaccaagtaatgaaattcgaaaatatatggagaacaaactgtatatggtgctacatgccaggaaaaaattatatactccctctcctctggtcatgaaaagctattgttttgaacacccctctagcaaaactttcaaaacttcaacatcaaatctctttaattattattagataaatgaaaactatattcatagatttgtttgacaattttatagcactatactttaatctgattatacaaataatttactataaaatcagtggtcaaagttgtatgtcagatatcatgaggatgtccagaaacacatttttctgtacaggaggaagtataaacaattataagaaaaagatgagctacaccatttatttgatagcctcggagtcttaatcatagatacaacatataggtgttaagggtaccaacatgaataaattcaatttttcaataaatgtcctacatagttaccaagagaatatagcattgaatttaaactagtcaagaatttcatttattcataaatgtcctgcatagttaccaggagcacatcagattggagagcagtactccgaacaatgccctacatgaaggctgaggcaactactaaaatactcggaactgttgcaaaagaaaaaattggagaaaaatccttggaaatgtatgtagagaatgtggagaaacagatgtaaaaaatgcatgttgcaaggcatgtaaagctcgatatcaactcagaaacatacaacggtacttcaaaacttaaaagtaccgatgcgttgcatgtcttacatgaagaatgcccacttggaaagctcttgtggccttccttgataacactcttttctccatggcatatgacatttgtagtgacattatcaaacttctgaaaaatgaaacgatttgttacttcaatataacctgcagactacatgaagtttaatatctgagatcaggacactagcacaaggagattacaggtattccatcagggaaacaacgccaaaagaaatctgggcgaggacgaccaacaccatccttaattgcatcagtaatcacagcagttataagtaccgaatatagaatccctgcacaaactctatggttaaattatatggttcagcatgaaccaaagatgtaacttcaatagatatctacaaatgagagcatcgtatacccagtatgccatggtgtaaatcatagacatttttctttttgaagtaaattccaccaaagacaacccagggcagcacaattgcaataagctgcaagtcaagaaagaattgcatgcctcaaacgatagatgaaaccataagaaaattttatctggcataacgagaacatactggaacggcccaaaatggaattgtgttgccctttagtggatatctcaagtctgtcatcatgtcacgtccaacaaagcggtgaaaaggctcaattatgtttagcagcccatcaacaacagcaagaaagagaagtattatccagtcatacatgtggagtcttgccacactggttccatgggaccttatagtgtggcaccctaactggatatcaggcatttttccctgtaaaatcaaaaaggaagcttggaatcagcagggcaaatataactaacatgaacgtggtcaatatgaactagtgatcatatgagtgtgcaaacagaaaggatgagaaaggtttcttgataggctgaaatcatgcattggtcacattttacctgtcttcagacagcaataatattttgactctataaagcccagtagtctagaatacctacatctttgaagcccttcaagcatattttatcatttataaaaaaatttaatggaaaacttcctgttagattaaatacagttaaatagtacattgttgtttagaaaacgaaagggagatgcagaattaatacaaagtcaaacccagtcctagaaaagaaacacgaaaaatgagatagaacttttgtgcaggagaccaagtcttgaagtttgaatatccatgtcaaatcatgtatcgctaaaaactgagaagatgttctgcaagtattggcaagccgcaaccctttttatatgcctcacgccttgaccttgctgtatatccctcacaacttgaaagggcaaagggtatttgaaaaagtttgaacaaacaagaacatgaaagaaggttcaggattgtaatgcctaataactggacctgttgtgatatccaaaacacgacaacaaactagaaattccaggaagttgatgataaccatccatttcatttcaaacccaattacaaagctagaaaacctatcacattcacaaaaactcattcaacctaaactaaacagcatgtgattgagtagtaatctgatttttttcttctttttttttattgatgccatggtgtgcatttctaggtagaatttcccccttgtatgaaacagtaataagcagcagtttatcattattaatatgtgccattcatttttttactttagtgaacagtaaagactaggggaataaaaacaattcaacggatccataaatcagttgcaggttatatgagcttatgagctgttaaaaatccaagacagaagaatcagcagcaaatttatagaaaggggcgtaatctgtttactgatgagtcgacaaaagatgtctagagttgactggatacgtcaccagtccaaaccacagccgctgaaaaggtaaacaacaaacttaaacaaccttatccagttgaaccaaaaaaacctagcatttctagcaataacaacctagaaaacacccaataatcctaaaaataggcacccataaacgaatgagaatcactgcaaaaacaacgaaatcactaacgagaatcactgcaaaaacaacgaaatattcccaggtaagagtgccctaagagatatgtgcataaatctcacaggaagaaaacgaggatttctctttagaacaataataaaagcaacgaaagaaatcaagaaccaacagcttcaccggtcccttggtcgagatgactaacaacgagccctacagatcggcgcctcctcctcgtgctcttcctacaaaaacaaaggggggcaaaaaacaaaacaaagaaaaaaaaatccaacaataaaggttacaccaaagcaatctgcagttgcaggagaatcttccacccacggaagaaaatgaaacaaaaaaagaaataaagaaagaaagaaagaaaagacgcacctagataatcccggagtgccgcgcgcgaggtcacattaccgcggcggcggcgctggagacgcgggggagtgtggggaggggagtggagtggaggcgctggccggagagtgacggggacacggggtgaagccgcggaggggaacgaaaaggaagcaactggagaattggagatgggccacgcaccggtggctgtgatgcatctgtggccgtcggttatagaccccacgggccaccgtaaacggcagaggctaaacccctctcttttttttttggcagtcaacggtcaaaccctttttttaaaaacagaaggaaaattttcttttgcgattaggcataattaatggttttttgagcgtacccgttcgagcaattatactgtttttcactttgatcttattgattttattgtaaatttaaaatttgcactcttatttttttacttgtcaaaaacactgttctacgacttaaatgttgtgttcagctgttagggctgggaactaatccctcgtgcatgcaagacggaacaactcatttgtgtatgattaattaagtattagctattttttacatgaatttttaaaaaaactttcgtatagaattgtttttttttttcaaaaaatacaccgtttatcaatttgaaaagcgtatgtgcggaaaacgaagaaaatgaattagaaaaatagggtaaagagcataacctaagggtgtgctctttccagcttacaggattagattctcctcgttttccattaacacgctttttaaactgctaaacagtatatttcgtacaaaaacttcctataaagaagttgttaaaaaaaccaacaaatttattcataaaaaaattatatattaatacttaattaatcatatgctaatcgtatttctcgttttgtgtgcgcctaagctgtccaccaccaccgctgaaacgatcgcaccctaagttaatgcttaataaataagtcgaaaataggagatagcaagcacatgtgtataaccatatgttaatttacatctgggacatcccaatttcccaaacacttattgtggcataaactaatttctcaagattccaaagaagacaaaagccaatgttcactcaatggtgcttatgattgcaacagccagcatgagctgtgcattgcgcgtgacaagccatagtcacgttgcttccttttgtgtaggccaccgggtaactaggatccaataaaagcggaaaagaagccaaattctcaaccatgccctacctctccaagctttatgcctggacagcatcatgcttggcacaaaagaacagaaacaagagcctaagcacagttattaacttattattagtggtgatcttccatctcaaaaaagaaaagagtggtagtatatcttgtcctaagctatgtccagccatccaggatagggtggtcctggcccccttcttcaatggaagaccatagagcatacagcaatgtgccttgttagttgttagaaagcatacagcaagatctagttgagatggatatagtattggacaatgctttagcttgctcatctgagaatcactaaagtcaaatttcacagatgaacaaaaattatgacagtatgtttggtctcaacacccactttgaacttctacagcaaatgcatgtaaaatgtcagtgtaccatattacagattacatgcacaatgaagcattccattacctccagaactgttcattacaaatgcagacagcgctacatgccaacagtatatcccagtacatatcagtccatttcattttgttacaacaacagaagccaagtatttgaaggatcaacatcaactaaggaaacaaggtcaaagaatgagttcagcatacaatttcttttgaatttgttatatttctaggggcacatgtaatatacctatatttataggttttgtataacaagtggtgcactgacgcatggtacacctgtttacaaggatacatcctacgagttctgtgggtttacctatattttgcgcagctggccatgtcacatggccaaccttggaaagtttgttcagctcaactcaaaaaccatctgaggtgaacatatattgtatcattgactccgcatcgtattgaaatttcaggagcttcactgttacataaactactgatcatggtgagaaaggaactctatgatgcatgggtaaacttcatccgttgcctgtacaagggacaaacatgtgtaaatcatgagtaagaggatgacaaaaagatttgacttttcagaattggagcag

SEQ ID NO: 5453 - DNA, 20193 bp, Oryza sativa
  unsure (1)..(20193): unsure at all n locations
agaaacattagctcatgattgggataacttatgactcactgttattaaatgatggtttaatgatagttcacgatggtcaatcgtgactggttaattaattaatgtgccaactaaaacctggtaatggtgggttgtgagcacatggttttgatggttgtgctcatgacaattaaggaccggttcacgagtttcggttgtgaaacattaaccgtgccaaccacaagccagcatgggcaacggctttatcttttgtgtagcatggttcattgcggggcaccagactgagaagtggcagagataagtccacgggggtcgctggggagtccatgccttgtttataagggggtgattatgatccaggaaggtgcgctgcagtggattgtgttatgcaaggggtattgtcacaactcctttccgaggtaccgtggtggtattgaggcacatggtgacatgatgtggggttgtgtcttgtgggtacagtggtacacctctgatcagagtaaaactattcgaatagccgtgcccgcggttatgggcgggtctaacaatgtctttcgtgattagtctcacccttctcaccacaatagaagatgctataactggtaataatttgattagctcctggtttggaatggtatattcctggtttggagatagaactgtgcagccgggatggttgttcagaatggttgggcctatgcaacagggtatgttgtatagcgttggattaatattgtttaattacttaactgttttattaaattctcaaatgtttgctaaatgctgcttttgcaaatgaaaccctactatgccatcctttgttatcctgttgtcacgcccagaaattcacgaaccagaatttctaagctgaatgtgcattaaacccctgtccaggaccagccagggtacacaaacgacaattgttgacatacagatccacgtcttacaaaaatataaaagattacaaatgcagcggaaaaagataaaagcgagctaagcctgaagacttgactcctgcagcgggcgactccattccacaggcaatccttgacggcagcgacgaaaccaacctcttcgagacatcttcaactgggaaggacttcaactctggtgtgggggaaaagagagcaagactgagtactacccactgtactcagcaagtcacaccggaagaggaggtatgatgcaagatatatccaagggaggctaaaggttcttttgcataaagccggcatttcaaagcagtagttgaaagcagtaaaacagttgtagtaattaatccatattaaccaatcactgtccaacgttacaccacgttgcaacaggcccaaaccaccacctgaactaaccagttccaaaagctaactagggtgaaactaatcacggtgaatctggtcgaccgcccataaccgcgggcacggctattcgaatagttttactctgatcagaggtgtacagctgtacccacaagacacagccccacgacacgttcccgtgcgccgacatgccaccacgacataccggaaagaggccgtgacaggacccttcgcataaccccctctaaccgatcgcaccacaccttagggttcgcccccgtccccagcaggcaacgggcagcccccctttcgtgccgcggtgaatccggcagccgatcaaccggacaccccggccgacccaactccatcacgcccaccctcgcctgggtacgtcggctagagaaaagctacactacaagcccagccgttgcccacgctggcttgtggtaagtacgataaattcttccagggcatcccgcgaaccggtccttaatcgccatgggcacgtctagcaaaaccatgcacccacagcccaccatgtagtgtattttaattagccaacaccattgcggtggcactaatccagagctattgccaataatcaagtctatgctttaatgtggtccccttttatgcactagttgaactaagcatggctaagcatctcctaaaccaacatctagtcattttaatacccaagttatcaatggcataaggaaaacaacatatagctgagtaataggacccatcccacatgatattgtaaaacaatgcaatatttaatagaaatgcgggacatttgtaaattaggtacaatatgatcaattgtattgcatgacttgccttgctctcgcactgatggaaccacagcaacgtcttcgagaaaccacggatcgacgaaacggccgaaatctacgtgacaaacaaagcacacaagcaaaacatgctataagactactgaaacagataacaaagccatttttaatggattctacacatttttatgaatttactgagacttgaatggacttaatcggagctcggatgaattagttatgaattttagaagattcactgtgtttttactaataaagaaaaagtccttaattaattattgcgcaatatattccagggctgacgtcagcacggggtggcgcggcgccgacaagcggggcccaccggtcagcggcacggggagagagaggggaagggcgctggtacacgggcccactcggcagcggctcaaggggggggcacggctggcaagcgggccccacggctccggctccacgagccgatgtaccggccaggcccggcatcaagccggccgggcggccatggcaaggcggcggcgcgggcatgcgaccgccagcgacggcgagcggcggcgcgggcggcgggcggcggcgcgagcggcgacgaccgaaagcgacggcgagcgcgcgaagagggcggcggcgcacggggaaaaaaaaaagaaggaaaggaaggggagggagacctcaccggaggggcggcaatggccggcggagaaaaacgagggaggcggcgaagaccggcgatgccgaggtgcggacgagcgacggcgacacctagggaaagagaggagaggaattagggcggaggaaaacccccacggcgaccatccatgccggccggagtcggaggggagagagaactcaccgacgacgcgagggaaatggggtttcggtggtattccggcgacgcagagcagcggccgggaagggtcttgcggcggcgaagctagtggtggcggtggcttagtgcggcggcggctctagcgacggcggcacacggccggagtgcggcgacgggcggcggcgtaagtggcggcggtgcgagctcggtagggggcacgggatggagcggtgagagcggaaaacgagagaggagggcatggggagcattttataggcggagggggaggcggacgtggccgggaggcgctccgatttcgccggtgacgtgggggaggagagagagaaggtggggggagattcaaaatcgaatcccgcccctctcgtgcgctggcgcggccgggagacgcggggagagggcggcgacgtggcgtgggcgcggcgacgtggcgtgggcgcggggaaagcggaggaagtgggtgcggcggcagcggtttcggcgggacggcgcgagcgggagaggcgggaggtgggagacgggtccgacaggtgggccccacctgtcggcgaccccgggagggagggaggcgggcggccggctgggcctcggcctgcggccggcccagcagggaggagggggaggaaaggaggagatgggccggcggcccatccgaaagaaaggaggaaaaagagaaaaaaaagaaaaagaaaaagaaaaaggattttttttcctggaattaaaattgcactttggtgatttttaattggttaaaattatttctagggctctgaaaattccactaaaaatcctgttagtgagtttcgacatgtagaactcaagaaaaattccacatgccaaatccgattattatttgcattgattaaatagggattcatctctaggttaaattaaacaatttcttcggacgatttattttatgaatttagagcaagggaggggtacttcagggcgtgacacctgtgcacttgcatatttgctgcgtggcttgctgagtatgtcatatactcaccttgcaatcattcatcagaggaagagttctacagtgaagctgatggtgtggaggattaggtgtagccctggtcaagctgcctgtggagtggagccgtctgcgccgtttatcttattttccgctgcttagatatttattgattgagaggaactatctacctctgtaatgacattttattcgcttattaattagagtaataattgtactctattatcaatttgttattgtgtgcctcggctgattcctggacgagggttcacacacatgtaagcgtttggaattttggatagaaattccgggcgtgacaagttggtatcagagcccccttgaccctaggttatgccaaatggttacccatagaagccttctaaaaatattggaaaagtagaactgttctcctccctttctcttttaattgaaccaaactaatggcacatgcacttcataatctcttttaatggttctcattcaaaaatttattccagtgttattagtaccgtacatctattactgtactaatggctcattttatcagcaaaagttttacaatattgttttatttaatcttgctgcaataaaataaatttagcatgttgattttataagtttctttcatttcttttgaaaccagttattcaaaagtacaaaatttgtaacctggtttccaactgtttcaacttatctcgcaaagcttggtttactttatttacttacctttttactttgaatttctaatctttattcaaattaatccaaaaacttgtgctattaattggataaatgtcttaactccctcctttcacttgtctttagatgccgcgctacaagcctgagtacttgtttggtgttgagggttttgtccaggagttgcgtacgatgtcctttgtcattggatttgggactgcccctttttatgcccagattcctcatgatcgtcatgaagagaagtgccgagtcaaagtcaccttgaacagtaatagtgaagatatcccctcagtgatgtttgaagctggaggaagaaactacatccatgcatgtcaggaggtggcaaggatcgccataggagagctccgtgatcgctacagtgatcagttggccgacactgagtatcgctaccatcctcgccaaccccagggaagtgaccgtggcagttaccttgagactgaaggaattgagaatgatgctaccacaaggcatttggttgagatgctgtgggctatggatgaaagccgcgcggagactgtgttagcagctcaagatcgtgaagattggaatcgtggtaagatttgcaagttagaagacaaggtggatcgtttggagaaggaactagccgcattgaagggagaagcaccacctcaaaaggccaggattcgtcttaccgcaaggaagagagctctatttgtccctcgctatcaattggcgccaaaggttcgtgtggtggagaaagaagttgctccaaccttagcagatcctccggttatcatcataagtgatgatgaagaagaagaatccaagcgcaaccattccaagattgagtgggtagctacccaagatgatgaagacgagccgaacgagccttcaatcgacctccgatgctcggaagaactagagtgccatgtctagccgttgtcttagatcgttgtgttagtttgcttgttttaagtttggttgtgtgtgtgtgggtcttgcatgtgatttacatcagtggtgggatgtaagtgcatgtgtttgtttgcttttgagtgttaggaagttggtgagtttagtggtgtgagagtcttcagtttgtaataatgaaactcagttaagatcaataaaagttaaagtaattatctgtcctaagtagtttcccccggtttctcttcttgtgccctgtccatgccagatggtgaacactcgcagcaacgggaatggccccaacaacaacaacaacaataacaacaacaatgaagggaacccaacccttgctcaagttcttgctcaacagactcagttaatgaacatgatgatgcagcaacttcagaatcagcaaaaccagggaaataaccatgcacctccccagaacaagttagcagaatttcttcgtgtgaggccgcctattttctctagtaccactaatcctgttgaagctggtgattggttgcatgccatagagaagaagttggatttgcttcagtgcactgatcaggagaaggtctcatttgcatcacaccagttgcatggccctgcctctgaatggtgggatcacttccgcctgaataggactactgctgaacctatcacttggcttgaattcaccgctgctttccggaagacgcatataccatcgggagtggtgtctctcaagaagaaggagttcaggtcgctcacccagggatctcgctctgttacggagtatttgcacgagttcaatcgtctggctcgttatgctccggaagatgttcgcaatgatgaagagcgccaggagaagttcttggaaggacttaatgatgagctttcttacccactcatgactggagattattctgatttccagaagttggtggataaggctattcgtcaggaggacaaatacaatcgcatggagcagaagaaacgccggattgctcaattcaagacacaacaggggaataatcagaagccgcgtcttactttaggaccccagtctgtgccacaggggggttcttcgtctgttgttcgtccgcagcgtcagttcttcaacaacaatgctggcaacaacatccgcaatcaagctccacgtcctgttgcagctccaacacagcaacagcctgccaagagggagcaaggcaacaagcccgtggtgtgtttcaactgtggagacccaggacattatgctgacaagtgtccgaagccccgacgtgtgaaggttgtccctgtccagagcagctctaccgcactagcattaaaggcccgtgtcaatcatgttgctgctgcagaagctcaagatgctccagatgtgattttgggtacgtttcctgttaacttagttcctgcaacagtgcttttcgattctggtgctacacattcattcttatctatgagttttgcgggaaatcatgggatggaagtagaagatcttagacgtcctttgatggttagtaccccaagtaatcaagcactctccttgcaacgtagcccctctgtcagaatagaaattcaaggagtaccatttctggccaatcttatactgttagaatccaaagaccttgatgtcatcctagggatggactggttagccagacataaaggtgtgatagactgtgccaacagaaaagtaactctcaccagcaatgatggtcgagttgtaactgttcatgtattgtcttctgagtctttaaggtcaagactgaaccaaataactttggaagagattcctatagtccgggagtatcccgatgtgttcccagatgatttacctggtatgccgccgaaaagggatatagagttcagaatagatttggtacctggaacaactccgatccataagagaccttatagaatggcagccaatgagttggcagaagttaagaggcaagtagacgatttgcttcagaaaggatacatcagaccgagttcatctccatggggagctccagttatttttgtggaaaagaaagaccatacccagaggatgtgtgtggactatcgtgccctaaatgatgtgactatcaagaataagtacccgctacccagaattgatgatttgtttgatcagcttaaaggtgccaccgttttctccaagatcgatcttcgatcagggtatcaccagttgagaatcaaagaggaagatatacctaagacagcttttaccactaggtatggattgttcgaatgtactgttatgtcttttggacttaccaatgcccctgctttcttcatgaacttgatgaataaggtgtttatggaatacctagacaagttcgtggtggtatttattgatgacattcttatctactctcgaaccaaagaagagcatgaagaacatcttcgccttgcattggagaagctacgagaacatcaactgtatgctaagtttagcaagtgtgaattttggttgtctgaagtgaagttccttggtcacgtcatctcagcaggaggagttgccgttgacctagtaatgtggaatccgtaaccaactggaaacaaccgaagacagtttcagagatccgcagtttcttaggcctcgcaggttattatcggaggtttatagagaatttttccaagattgctaagcccatgacacgactgcttcagaaagatgtgaagtacaagtggtcggaataatgtgagcagagttttcaagagttgaagaatcgcttgatatcagctcctatcttgattttacctgatccaaagaagggttttcaagagtattgcgatgcatccaaacttgggttaggttgtgttctgatgcaagatgggaaggtggttgcctatgcatctcgtcagttacgtccgcatgagaagaactaccctactcatgatcttgagttagctgcagtagttcatgcgttgaagatttggcgtcattatcttttcggtactcgtacagaggtgtataccgatcacaagagtttaaagtatatctttactcagccggatctgaacatgagacagaggagatggttggaattaattaaggattatgacatgggaattcattatcacccgggaaaggctaatgttgtagcagatgctcttagcaggaaaggctattgcaatgctacggaaggacgacagttgccattggaattatgcaaggaatttgaaagattaaatttgggaattgtcagtagaggtttcgttgcagccttagaagcgaagcccactctaattgatcaagttagagaagcccaaattaatgatcctgatattcaagagatcaagaagaatatgagaagaggaaaagctatcggtttcatggaggatgagcaaggaactgtatggttgggcgagagaatctgtgtccccgacaacaaagatttaaaagatgcaattctgaaagaagctcatgatactttatattccattcaccctggtagtactaagatgtaccaggatctcaaggaaagattttggtgggcaagtatgaagcgtgaaatcgcagaatacgtagcagtatgtgatgtctgtcagcgagtcaaggcagaacatcaaaaacctgccggtttgttgcagcctttgaagattcctgaatggaaatgggaagaaatcggtatggattttatcactggtctacccagaacgtcatcaggccatgactctatttgggtgatagtcgacagacttaccaaagtggctcatttcatcccagtgaagacaacatattccggaagtcggttggcggaattgtatatggcaaggattgtgtgtttgcatggcgttcctaagaagatagtgtctgatcgaggcagtcagtttacttcaaatttttggaagaagcttcaggaagagatgggttctaagctgaactttagtactgcttatcatccgcaaacagatggacaaactgaaagggtgaatcagattttggaagacatgttgagagcttgtgctttagatttcggtggaagttgggataagaatctaccttatgcagaatttccgtataacaacagttatcaagctagtcttcagatggctccttacgaagcactgtatggtcggaagtgccgcactccgcttttgtgggatcaaacgggagaacgtcaggttttcgggacggatatcctaagggaagcagaagaaaaggtgaaaatcattcaagaaagattgcgagtggcccagtctcgacataagagttatgccgacaatcgccgcagagatttgagttttgaagaaggagattatgtgtatcttcgtgtcacgcctcttcgaggagttcatcgtttccacaccaaaggaaaattggcaccgcgttttgtgggaccttataagattgtcagtagaagaggagaggttgcttatcagttagagttacctcaatctttggcaggagtccataatgtgttccatgtgtcgcaattgaaaaagtgtttaagggtacctaccgaagaagctaatcttgaacagatagaagtccaagaggatctgacctatgttgagaaaccaatccgtattttggaaatagatgagagaaggaccaggaatcgagttatccgcttttgcaaagtccagtggagtaatcactcggaagaagaatcaacttgggaacgagaagatgaattgaagtcagctcatccgcatctgttcgccagttcttctgaatctcgaggacgagattctgttcaaggggggtaggtttgtcacaccctgagaattcaaaatatgtaaattattgtttaaatggaatttttagaatttatttttaaaagcctagaaaagaagatctaattttaattaataaattccaatataaaatggggccagataaaatttcattaaatactttgcttaattctataattcctagatttttctgggatttatttgagctaaggaagtatttttaataaatggaattgcatttaagaaataatctaaattgaaaaaggttttaaaaagtcttcttttggctttgggccgaaagtcggcccaaaaccttctctctctctctccccggcccaagtcggcccagtccgcagccgagccgcccgcgcgcgccctcgctgccgctgacaggtgggtcccgcttgtcagtcgtcgtcttcctcgcgcagccgccgcccgaaaccctagcgccgcgccgccgccgttcctttccaaatccggccgcccctttccttctccggccgaattgatagaggggaaatgatcctcgggatctcctctaccttttctcctttggaaacatcggctaaatcgttttggaagttcgtggaatcgagttcgattcggatcggcctctttccttcaagccacgaagtttcctcctcgtcgccggccgccgtgggccttcgtcgccgcctccgagcccctttaaaaggaccccgagctcttctctacccgccgccacccttgccttcgcctctcgtcgtcggaaatgccctagcgccgtgtgccctagcgccgtcgtcgccgccgtcgctccagccgtgcgccgccgccgttccagacgtcgccgtcgctcgggaaggacgtcatcgtggtcgccaagtcgtcgccgtcctcgtctgccgcttcgccaccgtcggagaccgccggagcatcgtcgccgccgtcgacccgaagagcttcgccgcttcctcctcgtcgccgtcgccgtccgttgatcttccgccgtcgctttggtcgccggtgagtccgtcgtgccgtccgctacccgttggtgccctccgttcgtgccgtagtgccgccgttcgccggcgagcgtgcgccgtccgagccgccgagccgccgccgccggtggtgacatcaccgctgacgtcatcggggccgttcgtcgtagaccggtcgtggaccgatcgatctcggccgtccgttttggatcaagtcgatctcggccgtccgttcgtgtgaaccgccgccgtgcgcccggtccaccgcaaaccctagcctgctgacgcaataaatccccttttccttttcaaaaataattcattattgcgtcataattcaattaaaatcaatataagtgttttaatccgattaaatcttcaaaaattcatatctaattcatcttagctccgatttagttggttcaagtctctaaatttttctaaaattgagatctacatgttaaaaatatccacatgtactgttcatgcttgtttatgtgctgttttggtgtttttgctcttttctgtttagattccgtcttttccggagagtccgttttcgccggagaagagtttgaagagttccaaggccagcaaggcaagtcacacagatcccaaacaaccctttgagcatgttgatcctatttaaagctattgtttctattcaaatattgcatttattttcgaatgtcattgggtggaattaacctattgtttgttatagcccttttgttcttgattactttattccttgataccttgggttattataacttgactagttgagctttatatattggttcaactagatattagatataattgcttagccctgcttagaaacattagctcactattgggataacttatgactcactgttatttaatgatggtttaatgatagttcacgatggtcaatcgtgactggttaattaattaatgtgccaactaaaacctggtaatggtgggttgtgagcacatggttttgatggttgtgctcatgacaattaaggaccggttcacgagtttcggttgtgaaacattaaccgtgccaaccacaagccagcatgggcaacggctttatcttttgtgtagcatggttcattgcggggcaccagactgagaagtggcggagataagcccacgggggtcgctggggagtccatgccttgtttataagggggtgattatgatctaggaaggtgcgctgcagtggattgtgttatgcaaggggtattgtcacaactcctttccgaggtaccgtggtggtattgaggcacatggtgacatgatgtggggttgtgtcttgtgggtacagtggtacacctctgatcagagtaaaactattcgaatagccgtgcccgcggttatgggcgggtctaacaatgtctttcgtgattagtctcacccttctcaccacaatagaagatgctataactggtaataatttgattagctcctggtttggaatggtatattcctggtttggagatagaactgtgcagccgggatggttgttcagaatggttgggcctatgcaacagggtatgttgtatagcgttggattaatattgtttaattacttaactgttttattaaattctcaaatgtttgctaaatgctgcttttgcaaatgaaaccctactatgccatcctttgttatcctgtgcacttgcatatttgctgcgtggcttgctgagtatgtcatatactcaccttgcaatcattcatcagaggaagagttctacagtgaagctgatggtgtggaggattaggtgaagcccttgtcaagctgcctgtggagtggagccgtctgcgccgtttatcttattttccgctgcttagatatttattgattgagaggaactatctacctctgtaatgacattttattcgcttattaattagagtaataattgtactctattatcaatttgttattgtgtgcctcggctgattcctggacgagggttcacacacatgtaagcgtttggaattttggatagaaattccgggcgtgacattaggagaacttaagattaatatatcatgccaaaatacacaatttttttcacatgaatatatactaatttatccttgagctactaacttatcatataaaagataagctcgagctcagctcgacaaagctcgtgagcttgcagctaggctcgagttcggatcattaagagttcgaaccgcgctccaatctagtatgagcctcacgagctcgagcttttttgacagtcctaattggaagtagcaatgataggtcagcctcactgacttatttttaactggactgccacgtaggttcaaaactactccagactaagttgttgggggactgtggggtaatttgcaccattgcaatagttcaagggtgtaatttggactttttcctcttttgtatacttccttttcttttttaaaaaatacagtacaaacgcaagcctttcactcccactgggtgatcatcgctaccactgccccaaccaagtgtgttgccacactccgtctcgacgacaccataccaccgccggctaggctagtcattgtgtgatcccatgtcccgtctcctaaccacaagacatgtctcagcctcaccgccaccggcgccttcttactcactcatctcctgtcacacccaaagttttcccttcccttaggtttcaaatcactaataaatggcttcaagaatttgctttggttaaccactagaaaaccctagttaacaatacatttaatagtcggaattgtcagggagaatttttttcgaaatctctttgctctaaaaatcactaacaagacttaaagagtcaatatcagatcacggaggcaatgttgctaagttaaaagtggcaagttaattcttcttcctttgcctttggtcgtgaattgtgcccaattcactcccctctcagcccgtggtcttgttttgcatgaggaaccatatacgtgtcagtttgcggaaccatttcctttcctttccgtataggtagtcgagttgtctagccgtaggtgcaaccctaggttcctaccggccaatcgtttgccgtaccggggctttaccgtgaatcgtgtctagcccgccggtttagctgcagtcgttgttgtgtcgttcactcgttcatttgaacgaggtgttccctgtggttcgttcgttcgtccgtcccgagtcgtcctttaggttagagccgttcagagccgccggctcctttcaccggtttcgattgatcatttgggtgatcctgtgtcacgtagaattgactcgttgagtcggtatcacgtgaggcacgcttgccaatcaatctatcctttgatcctatgttctttcgggcttaaatccctgtcaattgattaaggtttttctgttaatagtaatagcacagagcatcttctaaaattcataacttaataatctgagctccgttttaacccattcaaattgcagtgaattcgttaaatgtcaagaatccattaaaattggtttcttttgttgtttcagtagctttttagcatgtatttattgtgtaccttgtttgtcgtttagactccggcacttctgacgctccggtttattttgaagtggtcgccgaggtcccgtcaattgaagagcaaggcaagtcatacagatatcattgatcatattgagcctatttgcaaaaacccctgcttttctctcaaaattgcattacttttataatgtcatgtgggatggtttctacccatactcagcctttgtttaccttaattcattgatattctgggataaaaatttgactagatgattggtctaggattgcttagccaagcttagatcaactagctcacaatgggattcactataatttagtccttaatttgattatgctatgccttcttggcatatggttaattaattaaaatatgctttacttggtgggtcgtgggcacatgcatgatgatttatttggtggttgtgcccatgacaattaaggaccggttctcgggaatccctggaagatatactcgtactaatcataagccatatgggctctaggctgaatcttaagtatatattttctagctagcacaccatttgcgaggatagatgtgatggagtatggatggacctgnattttggtctatgctgcttccggatttacctaggcacgagcggaggctgcctgctcctggatttggagtggggcgaaactctgagtggcatgctgttaggggtgtatatggagggtttgtcacgatttccccctttgcagtatcgtggcggtacttggngcatggtttcatgtgtggaatcgtgtcttgtgggtaaagttgtacacctctaatcagagtaaaactattcgaatagccgtgcccacggttattgggcggtcaaccagctcaccatgattagtctcaccttaataatttgccttaatgaactagtgtagttcaggtggttttggtttgggcctgtcgcaacgtggtttagcgttggacagtgatgatgttaatactacttaattatatattgttttactgctttcaacttatgatttacaaatgatgtttttactgcaaaatatcctatgagccaatcctttgttttatccttgcatcataccttccccttggtatgacttgttgagtacggtggttgtactcagtcttacttctttttcccaatcccctagaagcagaagttggttcagatggtgagttctatgaagtttaggattgtgccagccgtcaagagtttgcctgtggagttatggaggaagcttcgcgttgctgtgaagattaaatttagttctctagttttttcgctgcgtatgagtttattttgttatttttgtaaaacgtggaactatatcaaattgtcatctgtgtactatagttgatgtctggacagaggttaaatgcacagatagccggtgattcgggttattaaatccttgggtgagacatctccaccgcccctaattgttcttccatcgccctagtcatcactataaagccgccctgaaccccctcccccccccccctccctagtaacctccaaccttgaaaccctaatccggtaaagcctatcggagttcgttagggtgttagtgatgaggcttgccaaggaggttgtggtcgccattgtcgtgactgccaccatcattgtccttcacgctcgctgtttgatctgatgacattcatcatagtctattgagatttttgggaaatgtaagtaaaccaatgaaagatacaattactttggtaactctgtgaacatatcctatgcacataagctttccgtgcacaccaactagcaaatgttacgaataattatacaaaaaaaattgaacatttacttataatagtattacacatatatgcaaagtcttattttcaaattaattatattttaaccctaaaaaaagtgaaaaatctgacaactttttgagttaaaatatattagaattttgttttttttttgggttacggctaaaatataacaaatttgaagataagatttcacacttaggtgtaatactattgaaactatgtgtctaattttttctagaattttatgtgacatttgttaattgatgtgtatggaaaatttgtgtgcatagtatatattcctggtaagtcctatctacatttatcattgtcatcattcttgaggctcttgataccatccatttggccttgtttctttctccatgtcttatcttatgtttgcactgaactctcaaggtttaaggtcatacctacaacaaacccagtgaacatggagtgtggtgagctaacaagccgggttggttgtggtcacatggactcgtcggctcaacgagtaaccgaaccataaatgcatgcagtagctaagctaggcccagccacccagaaattacgccggtcgaatgtggtcacatccacagctccagacctgaaccgccgatggaaaactctgaaaactgaagcgaatagatgaacatgctgaaaaatcccagcatcaggcatcagcttcgtgcctcgagcccgtcccgatcccgaccggagtactacgagctaccactacctcctccgttgactccggcggccatggccatggctgcaagcacgatggtacaagtgtgtactggtagtagaagtagtaccaatgtacgagcacagtacattcttggcaagtgagcagtacagtggtagtaatgatggctttgctgctgctgctgctgtgctgatgatgatgatgacaagatcatcgtggcctgtagcagcgtagcgtgtcgcagtttgaggagaggagaaaagaaatggtgaatttgtgatgaactgatgatgcatgcagagtaaaactagagcgaatttgcaatttggggtcagattgattgattgggtgatggtggtgatttggtattccatattcacagcggcaaatctcctacaacaagaagtggatcaaaactaatgaaaagaagaaaccaaagagaggaagaagaagacgcaagaaacagagcaagaagatgaacaagatggggacagtggaggaatccatgtcctcttcagggtttcttgatctcttctcttccgtcgttgctgctcctgctgttcgttatttattcctcgatgacggcgagctccggccggccctcgccttccgggatcgccaccagcaccggccgccagctccgccgcatcagcaggctccgcagcccgccggaaccgaacctcctgcctccaccgccgcctccgcctccgccgccatgacccgacctgaagccgccaatgcccccaccttcgtcgtcatcgccgccgcggcgtcgcgccgcctccggcgacgcgacgaacagatcccgcagcgtgcggccgccgcggcccacgagcggcttcctgtactcctcctgctcccgcgcggcggccgcctccttccccccaccaccaccacccccgccgcagccgcccacgccgacgcggcgggacaggaagcgccgcagccggccgtcgacgccgccgcggcgcctgcggcggcggcggaggcggtacccggggctggccccggcgtacgacggcgcggggctgcgcgacgggctcggcgccgccgcccccgccgcgcaccgcgtcgccagcagcttgaaccgctgcggcagcgtcgccatggctgccgccgcctcgccccccctctctctctctctctttctctatctgtttcagtgtgcgtgatttagatgggacttggattccgtgcgggtgggattcccgtgtgcggtgagcgcgtggagattcgtgcgggatacgatgatggacggctgcgatggagtggactggcactggacgggggtgatcaatggagggggagggtggatcgggttgggggcttttgtttgggaggggtgaggcggaaatgatggctcaacggtggaggatgaaaggtgtggtctacacatgcaaagcgtggaatcgattcgatgggttgatgattggaattgggttttcttcgaggagattatgcctttcatgataattatttctaatatctgttttattagaatataagcttttttttaaggtgtagctatatttatggcgccgtatttttcaccaaaaaatagtcggcgtttatttatattgtaagtctctaaattacgtatataattttagtgtatttataatgtaaatatcaaaattacatatgtaaatcctaaaattacatatgtaaattcaaaaattacatactaattatatatataagttaggtgtaagcgggtgtaagtgaggtgtaattactgtgtaagtagctaaaaaaatcgactatagcatgtgtcgacataattttagctaatccgtttttaggttgtttagcaaatattaaggtttaagccaatttaccctatttagtcaattgcgtctacagtaaataaatttggtaggtgggtgcgatctagttcaaaaacttgaaaaatgagtatataggtacaacaacttggctagtgcatgcattttggttaaaagatcaatattccacaccatactttttatacaatataaaaaaagcagctaataatgccatctcgacaaggatctacatgtattatgtattgctttcaatttgttagttataataataaaataatctatcgatttgaaaccgaaagatatatgattatcaaaattaagtgcatgcaaatagcataatttccgagcgatttgattaatcaacatattcattatcttgggttatgaacatggcaaaacacgaaattgatccaatgatctactagcagttaagcttataataccaggattaatccaaggtgtgtatcaatatttttgactaaaatgcacgtggttgtcaagtttatatacaattctactcatttttcaagttcttacactaaatcgcacgcatctacaccaagttcttgtaccgtgggtgcaatttactccattctctttgtcaccttggtagcctaattttgaattttaaattactaacattcccctttcaaacgcctgattaactgaaaatgaatgaatttctgtatattcaattgttttgaaatacttgaactgtggtaagtaaattgtagagatgcttatagttagaacagatggaataggtttgttgtactctcttcggtccaaaacaatgttagacctttcaaaattaatgaaatgcaactttcaccacctaattctttcacataaattaaaagttattacatcaatcaataaatatataatgttacgaaagcttttataacaaacacctgaccatgttgcggactaagctagttggtttccttatagttgaaattgcacatcggggtttaagtgattccaagagtacgggtgcttaaatttacagataattattctttaacaagactttgttaccctcaatatgtacgtgttg

SEQ ID NO: 5454 - DNA, 24686 bp, Oryza sativa
  unsure (1)..(24686): unsure at all n locations
gatggtgtttatgcaaaaaaagctcctcttgtttgaacggaatagcacgcacatcctcccaccgaccgacaccctattccattttatacgaaaaaccactcgtctttcagaaaaaatacaacacgaagaagggaaaattctgcctacatggatagcgctgttaaaacgaaaaacacaagggtttttcccaaaaacaaccgcatctaccctctcccatcccatccccaaactctatcctcccctacccgtcccatctcctcccacggcactagagcgccttcgttcctcccccaccgtatggccgccatgtgtgtcaaagccggcaattacgctctgttctccccctccccctccccccaccccctgcctctctagccgccggcaatggggccggccgtggcggcggacctggccgcgagcgccagccgtccctcccgccgcacgggcaccggcgccgcggtgaccttcgcaccacgccgcacggacatggcggcaatggtgtggtttcggcgcaaaggagccagtaaatctacataacaaatgtatagatcaaccaatttaatactttgagtcgtcgataaaaatcttgacaacaaaaaatctatacatctagttatgtttacgtgtgatctcttatgagggatgccagctaaactcgggaggatttgtatacatgtttagaccatactcaaagtaataaccctatgttttcagcgccatgtgatctttattgatatatagataatatgagtataaaaggagggtatgtgttcctagccctatcttatagtctcgaaagttccgatgagatagtggttagacgatcacaagtcaaatttctcgggctcctagtggatcttgggcttgatcttggctggacgggttgtggcttgtctttcaatgtttactgtacagctgtatcctagaagaactcacaaaggtattgttggaagttttcggtatagtcctggtaaaagtccaagtaggtctcatgtagtcttttcaaggtgggcatgattttcttttatgaatacatcagttcatctaaagaactagcactgatgtgcaatcattattgccaggacatacacttatctagtagatggaaaatcttctagtagtgatgatttttaacaaaccggtacagatagagcagcactgctaatctgttttagtaatacttcctccgttctaaaatgattggcgtattccaccatggcagtgagaccaaggagcactgactccctttctcctttgattcgtactccaagctgtgcatcgagcaaggtatgctgcgccggcgcttcattatcccgcgcattaccccatgccgtcgtcgcttcgttgccccatgcatggctccacggcgccatcgcttcacgggtcgtgctcgcgcccacacgccatccaattccttcgctccatccgcacgaatcacatcgtgtcatcccagccgctcgacgaccctgcgtgaccatcccgctacggccacgatgtcgcttcccactccggccgcgaagtcgtctctcgctctggccgtggtggccgcgatccctgcgacggcgcctcctgctttgtctgctgcgaccgacaaaccatctcctgcttcggccatgtcttcatccatcgccgcctccatgtctttccaaaggtgggagaagaacagaaaacaccacggctgggttttggcatacgaaacaccgagaggtattcgtttttgaatttttttgagaattaatattatttttatggaaaatcgcaaaagtagtggtcaaccgggaaaaatcgcgaaagtaggtccctgtcgaacgggtgcagttcgataggtcgcctatcgaacggccagagcgcgactggcgaggagatcggaaggctgccgttcgacaggacctgtcgaacagcccccgttcgacaggaagggctgtgtcgaactgcccctgttcgataggatatccgtcgaactggcgcagttcgacagggtcgcgttctccatttatttgtaataagttattttttttaataatatgtaatttattttagtgtgtaagaaaggaaaatatttttgtaatgttatatgtatatgatttagggttttgataatgtttggtcagaaattgtagtatttatttgttggatatttgaattatttagtttcattatttgtatatttgaatgataatttgtcatgattcattcgaagggtatgctactgagtaattatccgaagaagtttatgaaatagtactgatagtactaagttaatcgtaaagtgtttctcaaatagtacggacagaacagaaatgactaaaagtttaatacaaatagataagtcaaggacgatcagtgcccttcgcacgcttgctaggtcctcccttcttcctatgcctaatctgctcagtgggatatgtcaaattatcaggggggagcctatctctagctgcctgctgtggtgtcacgtctggcccctgaccggcctccgtctcctgcgtcggctgtgtgacctgaggtgctgcgtgccagtaatccatccctacttccccctggggaggatcagtggaaaagaagtcctcaatgaatgctgtgcgaggggagtaagcaggcattccgtgatgcgtcgacgccgaaccgtactcatcgtctgtttgcacaagagggagaaaccaaaaaatatgacgtagttagtaacgatacatataattagaaactaaagcgtgtctatcatcatctgcttgcataacttcttgaacaggtccatcaatctcttactcctgaattgtctataaaaattagccccaaaatgtcgcatgcaccatctgctatgtaaatctggccatggcacggactgtgtgacatcttcttgaagcttctgtatcgctgatagcaaaccggcgtgtcggtcatgcagaacacacacatttagtctgttttcaacaacacacattttaatgtgccgcaaaaaccatagccagcttgatgtgttcttgctttcaacaaatgcaaaagcaacaggaacgacatggctatccgtgtcgactccgatcgcggttagaattgttcctctgtacttgcctgtcatgaaagtgccatcaacacagagcaaaggaatgcaatttctaaaggcctctatcatgcacccaaatgaccagaaagcccgacgaagaatattctccccatattcattcacctcatcgagaatagccatgtgtgtgcccgggtttcttgcctgcatcacctccaatagtgggggaagattgtgataagaatcctcatgagttccaaacctcatctccaatgctttctgttttgccctccaagccttgtcgtacgatatctcatatccgtactctttctcaacgtcatgcattatggtgaaaggggacaaagatgtttttctaaccacctttgaatataccatttgtgccacaaatgccgctgtcaggtttctgtgcaccagacgggtattctccaataaacacgtatgttgctcaaccctcgaacctacccataaagtgtcatgttgtggcttgtaaccatgcactctccaaggacatccaccctgtatgcacttcacgtcatacgtcgtcctatttgaaaccttcaccctgaactcacgcttctggacaaatgcccacctcttcaccgcatcttgtaagtgacctttgtcatgaaacatctgtccaactttcacctgcttactatcataacaccagtgggcatctaaaccatcgtttaccttcatacgactcattgatatggtcgtccaatcatcgggtatgttagtttcgttgtcccacagtgttgtatcttctccttccactacaagcgcaaggtattcctcgttttccacttccatctgatccactaccacctcattctcctccgctgcatcaacacgcataggcgaatccggttcttcatcgtccgagtcgttggcctcacgattagtaccacgaacaatgacctctccttgtgtattaccctctactacttcttcccctcgaccttgctcagtccgccaaacattttcagcttgtccaccttccaacggagtttcttccaccacggcatgacttgactcccccgatcgatcaacacatgttgtcttctgcaccactattgccaggctatagcctttctcccttactttactaacaaacttcctccaactcccagttgacgcaacctccactactctccactgccattcatgttgacccctcactggccacacggtatttatgacaaatttatcgtgcactggatctaccccaaacatattatacaaccaccctaacacgtcgttcaaacccatatgctccggtgcattcagactagtatcatggaaggcatatacagtcaaatccaccccgctatcacatatttgtataggagcatcgccataatacagacgaatgggcatatcacctgacatcctgataaaacatgacaaatagtctcacgtttaatcatttaatcattcgataattaccctattataacttatactatattgccgtgtactaatttacaactattagtaacaaacaactagtttaataatccaaataaaatataacacctttgtatctattttaacacacaacatatcaataatatgtactaactaagaactaatttaaccgtacaattacttaaatacctctaccaacatttagcaataacaaatatgtgctaaccatacatactaacatcgaacaatacgaaacaattaacaactcttaaaccaattttttattaaactttcatatgcattgtacttagggattactaatgtataccttaacttcactgctggagggcgtcgccaaccctttcctcccggccggcgcctcctcggcctcctctccggcctgctatcccctcccctcgctccctccggcgctcacggcgacgatgtggcgactctcggcggcggctggcgatgtggtcctcaaaacaaatcgaactcgcggcctgggtggacggggctttaaaccggcttgtcgaatgcccattgttcgacagggtcggtggagggccctgtcgaacgcccccggttcgacaggcctcgcggcgccgggtggtgggccctgtcgaactccctccgttcgacaggtgagcgtgtcgaacgccagccgttcgacatgcctttgtcgactgcccgtcgttcgataggtgccctatcgaattgcacccgttcgacagggacctactttcgcgattttccccggttggccactacttttgcgattttccataaaaataatattaattctcaacaaaattcgaggtttttggcatacgaagcggcgaggataagaaaacgaagcgcatatgcgagatgtgtcgggtgctgcctttgaagtacgacgatgataatttttggttttctacaatacgtcgattatttttaatcgaaacagagggaataaatcagtactaatagggtgacactcttatcaacactcctaaatgttgtgttaggcccctttttagcattacgtttgaattgaacaagcattaacaagttggttaatctgaattcaattaaaaacgtttgttcacgttcgcctcaatctgatgaatgcgggcttttccggaaaagccctgttcctgttactctgttaacagcaggagtcagggaccttacttacatcctgccatgcacgttgaccgtaagaccacatgcaaacaggtagtagtcgttctacgctggccaaaaggtctcacggtcaaccaattagcgcagaacagagttgtgaaacaaataaatagggattcactatgcatcctttcaaaacaagcttgggaactaacagtgctactgcctcactcgtctagcacaagcatcgtcagatcacatgaattgttgcatgctcagtggactctagcacgggcacagcagtatctcacaaaagcagattaaagcatccaaagcttaatatatgattgcagagcgatgaagcatcaaagcgcattaagaaaaacaatccaagaatggtttgcgtactcagttggagctccagtttcatagcatcgttctacaagggagcacccatccctaccgtcataacgtaaaatgttttcttcagttcaccagatccataaaagacgggatgcaacagagaaaggaattatgtagaggggccttcgattgctctaacttgtctcggctttagcgtccgactcctgggattttccggcttcagcagccttctctgcgtcttgaggtttagacacttcttctaaacaagggagcaacaaagtcaaaaaagatggcatgaggacttttaacaagcaagattacaattaaaaggtactaagatatataaaaaaacaaagataactggcactcttatatcaacttaattgacataacatagttgtttaaattgcttataattgatgcctagatgtacttcaagtctgcaatttcttggaggtacttcaaatctctagatttatgtacaatatgatgaatacaaactgatttgcaatttcttgggaatgtgcttcagttctctagacgtaagtacaatatgatgaatacgagtacacgcgacactaaccttaatctgcacctagtgacactaactttacatgcatcaaaaagtttcctaaccagtatgtaagtataatggttaagaaacttttgatgcatgtgattaaggttagtatcatacctatcacaaaatcaatgcaagtaagaaacatatcagactaattaccaccataatagttacagcatgaacaacataattcgggccaaactattccaaaatgtgcaggagaaccattaaatagcacttttacttctacaatcacaatatcaagaaacagtcctgtatgatgaaaaaaatagctttatcctattgagttgcatttatatgtgccaagcatgaaaggtgcaatattttgatcactgctgttaagagtacgaatcacacaattgcagatttttcaagaattggcctttcaattaatggcatttgtcacgtgcatgagtcatatcactcatctggtcaggcagttcaaactaaaccatactaatcttaccaaactgcaaaaataatgcttccttaatttatattttcacagaatcatattatgctatcatatagctaatagaaacaagtggatattaatgagaatctgtggacacaataaaggaagacaaaccttcatcgtcactctcgtcctcgaactcatcnnnnnnnnnnnnnnnnnnnnnnnnnnnnnnnnnacccatgccacccatcatctcagccatgccacccatgccacccataccacccatgccacccatcatatcacccattccgcccattccacccattccacccatgccaccaaaattctataaaaaaagacataaagaaaaacattagtttaaaaaacaatatatgcatgagcaaaaaggaaatctaggaataaacatgaaatctgaaaagaactaattaccgaaaagtccattccatccacgttgacatcagcacctaaaaaataaaatatatgcatatcaaaacgttggataaggaacaagggcttatttacattaataaggccagattaaatttcctggaatatctatataattaagttaaaaaataatatattataagagcagattaggtccctaaactgatattagttttggggcttgaatgtggaatctaaacgagtgagacaatgtaggtttatatccaacataacgagtaataacagtttgtcctgcgcatgatttttttttaccatgaccagttgaaaaacaaatggaatgccttaaagagaaacatatatggaacattcttcaaattcaaacatgtcattatgtgctatgatcaaatgatactccattctaacatgttaggcgcacttgcttcatctcacttgttctcattatgctgctactagttgcgtcaaacatgagaaaacaagtccacagtttatcaccgcaaaagaagtgcatagcttaccatcatcatcttcatcaacccatttgtcccagtcaactttcacaaagtgtggtgccttttgatcatctcgaacaagcttcttccaccatttggcctcagctttttctacaatacagaatatggacctaacacctacacttattttgctctcctgtagaatcaaaacaaataaacacgggataaggaaccacgcattttaatatagaggaaactgcagtcatatagctattgcacgagcatgtattacctcaacatttactttgtcgttcaactctagctttgattcgtataagttcccatcagttccagctgtagcagagaaagagaatacaccttctggttccagattgaccttagcatccttagcatcagctaattgtacagttatgtaaaccttgtcaatcctctgagcccacttcacttcagggtgccgactacaggaaacaaaaagaaaaccataaaaaaaattcaattctgagcaccttacaagaagcaaaagaatgagggttagatccctttgaggttaaactccaatacaaatacatcagcagcctacaaaaatccacaagtttactgtgtgccagtaatatccatgctatatgaacaagtgacaagtactccctccgtatcatatttgactttttttctagtcaaatttctttaggtatgaccaaatttatagaaaaatttagcaacatctacagcaccaaattagtttcactaaaatgtaatgctgaatatattttggtaatatgtttgtcttgtgttggaaatattgccatatttttctataaacttggacgaactttaaaaaaaattgactggaaaagaagtcaaaacgacttataatgtgaaacacagggagtattatacaaaatactgataaaaatgaaagttttcttaatgaatataaaatggtggtgtctggtaatcctatcataaagcaaaaccaacaaagaatccttagagaataccgagacacaattgccattggcatcagtatcagagttacctacaactgaacatgaactaacacttacaatgagaaagcactaatgcaaaaatgtattacaaaccagatttcaatctcttaaaaatatcacaatcgatagacaaaactacaaaggcacagaaatatctactaataagagatatctaggaataagagataaactaattgcctcctaacagttatcagaagctgcacgcaccatggcatgaaccaacttagagcaagtttaataataaagccaactatgaacttatagcacatattagagttgacatgcatagtagataagctataagcttatctatatttttcttctcctctctatctcatctatacaattaacttatccatcttaaagtatgtgaatggttagctcttacatgagactgagacccaaccctcttcatttttcaaactctctcttccacataagcttacatttggctacttggcttatagcccactattaaacttgagcttattattactttattattaaactcctggtcgtcagtgcgaagttatcctcgttaactataggactatacgagcagatgatcacctccaattaaccaaataaaaccctggctagctcaataaaccacacgagctacacctaaacagtagctgccgcacaagcataattaaccaacccgacacagtgggaaaccaaagcagagagatctaccaacacaccgatagctgggggcaacccgcgcacgtgcgcggggacatggccgtgaactgaggcgcaccaccaaaaaccatctaaacttcctacggccaacccccaaccccccaaccctagcaacaaacagatcccacagaaatcaaaacacgacgaaccctagcgtcaagcccacgcccgcggaagggaccccacgggccctctcgcgctgccggggatcttccccccgcgtgcacagcggctgccccctccagatctaaccgctcccggcgctggacggcgcgtgcgggcggcgcggagtatgggtttctccgccgaatcgggagccgaagtgatgatgggagaggaggaggaggaggaggggagcaatcgctcacctcatgctgccgtttaccggtggaggcgacggcggcggcggcgggtgagggccgagggttttgcgaggttttttggggaatggaagatggagaatgaaggagtggagaggaagtgtcttgaagtagggaaacggaggcggtgctgcgagggggatgggctgggcttggctgggttctcgtgggccttgacttcgctgcaaccgaaagaaggaaaaagtccacaaggactccctcgaatataggatgaatctgattcgtatcccttacccataataccagatatcttgaccctcttagctattaaaactgatgcaatatgaatcctttggtggttttgaaggtggttttcgttgatgtagcatctaagtatcgcattgacttagtcttcgtcatctacgtggcattaaaaaaataaaacataatgtgtggggcccatgggtcagacgacggcgtgaaaccaacgggaccaaggcggcacctagcgaaagaagagcataaggcggcagctacctcgtcagcgggggaagtgctggccacgcacggccggaatcatctaggcgtcgttggtcttgccttggccacggtggggaggcgagagaggacgacggtagggaggactaaccgatggtggttggggaaacgaggatgatagcaaggaggccaaggcaaggggtgagaagggtatgcaacagcaaggaatgctatgatttcccagcggcgtttgcggtgttatcttctccaaagcccatggccgcggctgcggcgtgctcaacaaagagccacttgggcatcgactggagaaggaacaacggaagttgtacccaagggggacaaagggctccgagcgtcatcgtcgtccgtgatttggctcccagggtgctcgacattgcgaatggcaatggcattcgccgagcttgatatctcccccagcaccaaacccttcctcctagcaccaatgcagatttggcaggcgagcgagcgatcccgtccttcctgctagtcctggggcctcgcggaccgcagacaagctcaccaccacctccaatttctcttccacagggcactagtgcggtgccaacactcctctacctatcgtcgtcctctccagcctccctgctgcctactcgtccttcttgctcctcccaagggctctccaactactgtagcgtccctttctaccgatgaggtctgtcggtgaaatgggcccaggggtacacacagtaaagggaaatatctttcccatctagtcgcgtggccacgcggcctcgtttccccccgcccctcgggtagcgaggtggctagggggcctcggggtgcggtggccagggggcctcggggtgccacgccacacccctcgggctttcggggcgtgctaccccggggccctcgcccggccaccacatggtggggagaggaggcgaggcgaaagacgatgctccgcgcctttaatgcgcggcgccccaaccgtcccgcaccgcattcaatgcggcgtggggggacgtgcggcgccgctcgattgacccatgtcaatcgagcatgaccggcttgtgactggtcacaggcgacgggacggggggcagtgcccccatgttctgctctgtgtcaggcggagtgggggcatgtgtgccctgtcccgtcggcacgctgctaggggcgccccacgcgcgtgatgaaccgccgaagtcttcatgcaattaatagggaatgacagggatgtcccccgtgtcaggcagaggacagcgctgggccccacctgaagataggcgaccatgttgcttccggttgaagcaaaggatagcggtatgattaggaccatgtgggtcccccctttccgtggaggggtaagtgcaaacggtgcatgtggtatccccttgaactataaaaggaggaccgttaccactaggaaaaaggacgattggaggagaactcaagctcgaaggaagaacaactaggttcccatcggagcttgaaatcccttgtaaaaactcaccataatcccacacacaggagtagggtattacgctcggtagcggcccgaacctgtataatcctcgatctcccacacagtcccgacagcgatcgagcaactagactgcaagcggaagtaggctcctgtcatcgtgccatttcccccggccgaactcacaaggggggggggtctcacgaccacctgctagggaggatcactcctcgacaaggtcgctgctgcctccggttcctctttcgtcaggcatcgcgcatggcgccaccactccctcccctgtcgtcatcctctccagcctccccgctacctacccatccttcctggtgctccaaggggctaaccggccccgctgcattccttctcgtttacgaggtcaccaccacttccggcctcttctgccgggcattggtgcactgcccttggtcccgccaaggcgccaatcgtcgccctgaccacaagagagtgggagggaaaaagaggaagaaaaatacaattgttgacctatgagtcccatggttttaatgttttttttttttattataacatgtcaatgcaacacatggacgtcatgtcagcaatacaactctcactattaccttaggagtaattttgtacaagttttaatagctgagggagtcattataccttgtttgacggttgagggatataaatcaaattcgatatatatatatatatatatatatatatatatatatttaatgtagtcaaagtggactttttccgtgaaagaatggcataggcctactcgtgctacaccaaggctccgtttagtggaaacatataacacaaacttcgcatgtatactccctgcacacaaactactaaatgtcacttacgattctcgaaaagtttacgcatataatttctaatagggttacacctatgtgtaactcaaactcattatattttagcctaaaaaatctgatgtttttaagaatataaatatttagaatttctctctgtatatatgatgaatttaataataaagtttacacgttgatgtaatagtattgaaaatacatgtgcatttttttctagagttttatgtgaacacgatatatacacgtgaaaacttgtgtgcatataacaaatttgctataataaaatggtaaaagttgaaagtataagggtgatataattacgtttatacgagtttaacaggctaacttgcgagtagagccaaacttagttccttaaggttaaaagagttgaaccgagcaggctcgttttgattttttttattttaagaataaatttcacttcgggccactttttattactgatgtttcactttggaccaccctttaagcaatattttcactttggagtgggtaaacctgcctttgtttcactttggaccacccgactctcttctcaagcatatgaacgatctcgattacatcatctcctactcgtcaatgaactgccacagctatatgtaagactatttcttcgacatattaaaaattggatgtagatcgataaaagagtaagggtggtccaaagtgaaataaaggtaaaaatacccggtccaaagtgaaaacattagtcctaaggtggtccaaagcgaaacatcggtaataaaaggtggtaaaattaactcttttatttattaaaatatttacataaataattttctatttgaaaattttacaaaactagtcgccctcgccgcccttttacaaaacttagtcacccaccgcccatcgctcgttccatgagttcagatcacctcactaatgtatgcataaataagtgagtaggcgatgacgaatgacctttagataaccttattcatgtatgcataaatgtgtagatgatgaaagactaataagcgcttcatgcgtgcctgcgatgtacacatttatatggatgaatacaattcataatagaagattccgttctacatatggatatggtctgttgcatccatgaatttcgaagtatttgaagatgcaccctcagtgagttgataaccaccattcacatggttcaaaaacacgagtgcatttgaagggagccacaaagatgatactacagttacacaacataaaagaaaatcccgaaaaagtgtccatttattgcagaagaggagtctatgtttatgatttgctagcagcttctgcctgttgaactgtggcaccaggttgagcagaaactgctgctgcagcagctgatggagaatacaccttagctctacgaagaatctcggcaacaacccagtgcttccttttgctcaagggcctagaaggatcaagcttaacctggagagaaattatccagtcatcatcaaaaaggtttttcttggagataaaaaattaatgcgctcttaggtcgcactttgtgaactacaaaagggggagattagtctccagcaagctgataaaatagaaaagtgcagtaggacagctcaagatcactaatatattcgtcataagagcaaatatgttagtcccaacatatttttttttctaaaaaaaaaatccctgtcacaaactcacagggtaaagttgaacttttatgctgtctttttatttatttatttatttattttaacaataggtggtgcaatcaatagtcagaacataaaagtttctgttaaatccagtcccttggtaatgtggatcttcgggcgcacaaaacaaattaatttgaataggcaaaatcttatgatgtgaatatgttaacactgttatcacatttgcataaagcaaaactaattagaaagtggcatgttaacattataactatgctttgcaacaaattatctttcagacctccgtccatgctttgccaagttgccatatcacataagatatgagaaaattcagaggcaaaagattatgccactattaaaatctagtacaaccatcattgtcaaaattctcatggaaagattgttttgcatctgatgaagtaactagcttactgaagttcagagcccccaaaaggggcctctcttgtctggagttgacactcctgattaaagggttggcttactgtttagtgtatcaattacgccaagaattaaacttcagattgtgccttaactttcagttgctaatgttatagattgaggctataaatacttgacatatcaaaaagctctggtcaagaactattatgtgcttatgattaaccctcaaatttctgaactatatgaaacaatgtacataactaacaccaaaatcaaattacaagaacacaatatttaagataacttatcacggtggaaaaaaaacacaaactgtaactcaaagagtaccactatgcagtagtgccctagtagctcatatatgaacatcataaatagaaagcagtagcatataatccaaacagttgttcactgccgagagtagtaaaatacaaaactaatactaattgaagttgttttcagaaatactatcatggcattgttaacgagcagatatgcaagcagacagagaaatgtcaactcttaaggattaggtgccatgacatgtaatgatgtcaaccatatggttgcaacctccctacaggcatcaatttaacagctggaactatacagaataggataacaatccacaatactgtaacaactagttttgttacaagtcaaactccttcaagtttaaccaagttcatagaaaaatgtatcatcatttccaataccaaacaaatatattataaaaatatgttcaatggcggatataatgaaattaatttggtgttataaatgttgccacattttcctaaatgtttggtcacaattaaagaagcttgacttaggacgaaatgaaaacatcttacatcctgaaacggagggagtagattataaaaatagctcaaaaagaaggcatcatgtgcactctatatattatattaccacattaattgaaggaaaaagtaaatatttacaccattagattgttatgagtccagagtataacggtgtagattgattattggatattataggcatttgagtcgttgacataatacaactctattctatgtaggcaaaatctggtcaagaaatacaatagaatccaactccagttccaaagcaattaggagtagttgttaaaacagatcagtagtcagtattcatgtactgattttctctttcctttgaaaggattcactcagggatgctcagaagcatacaaattaaaaaaaaaaaggtctctgacccggttcaaacaaactggctggctagacaacatcacttccatgtacatacatggtggttctggacttccagcagccatgcacattgagagaacagagaaaggcaggctagatatttaacaaatgaaaaaaagtttctgttgacatttaatcaaattttgctaaatggcacaatcaaattccagcttcaaacatagtagtacaactaaattttattcatgcaacaagcataatgaaaggcccgctgctaaactggccaatgccgcaaacatgagaattgtgttatttttgtgcaaatatagttcaagacataagcatgacaggtgcaatggtgagctatgcaggtaacctactgatcagttagttgagcagcttaaatatacagttgaaactgaagagaaacccccaacccaatctaaaagtacaatgcttcaaaaattcaagttataactagcagcattctggatggtgcttttgaggagtgacgagcaacatgacaagtagcaatttaagctaccaaggcatcaattactgtgttaactagacacagctatcaagatagcaacctcctagaagtagaaaaacatatacataaaaacacatggctcaggcagataatgcaatcagagcaaggcagggcaagcaacacatattttgttggctccaagtgatgcaacaacagatttgacactttaaagcaactacagcatgactcgagtcaaaagacaattcaatagctggattactgggcaagaggtgatcagtaggcctctggtggtacaattgccttcggaagttatatataatcatgtagaattcttggatcaaactcgcatttatatttgtaagttacaatacgccatttgtgatttcatattttcatgtatttcttatcttccaaaaccgggatagaaattgacttgaacatttctcagtattgtgcgaaaaaaaggcaagatctttcatttactcctttcacttctctgtgcataagggaataaagaaattttataagtcaatggtggtggcagtgaatcagccaccacaccaactctacagtagatccttttatcaacacattcctgaagttctttagtattacaaaacagtctttctacatatcttattccgcctctaaaatacaaatttataattcgaagctttacgataatgaaattgtcgcatatatatgcagtataaaagtaattttatgaccagagtaatgtaaaagttgtcaagtgcttcatgtaacttaaatgacaagttatatataaatgaagggtgtgttcaatgaaaaaaaaactcacaatcatttgtttgaaacaatattacgagcatttagctggtgaatgaataaattttagatgatatagcattatagccaaatgaacgacatcacaccagagaaatcaaatgctcgcatcacaaatcagcatggattaaaaaaaaagaaaaaagctgaaacagagagagggggagtggagaggggagctcggttaccgacccggtcgccgatgttacagtcctcggtctcatcgtgcgccatgaacttggaggtgcgcttgacgtagcggttgtacatcttgtggtggaagaggcggtcgacggccaccaccaccgacttctgcatcttgttcgacaccacgatccccaccaccggcttcatcgtccgtcccgcccccaccccacccgcggggagaccgcccgccgactggcgatgggatcggccggggactggcggcagagagggcggaggaggccgccggcgcggagaggggggcggcggctgcggctcgccggctgcgcaccgggagcggagacgataggcaagcacgacagtgagtgaggaggggggcgaatcggttcgattgattccaagggagaagctagggtttatgacttgggcccaggatgctccgatgttgggattttaagttgggtggcccgcgggcttagatgttgttctaaggggcccaattggggaacgaagcctgggcgcctccgccctttgtgctgttcgccgtacatgaaccagaatagatttctagatcatactcctccgttcctaaatatgttctagatcatacgccattgattttttaaaatatatttaatcattcgtctttttttaaaaacttttttgaataatattcaaaagcttgagtagtagtattatatttaacaataaatcaaatgatagaaaaagaattaataattacttaaattttttaaataagacgaacaatcaaacatgttttaaaaagttaacggcatcaaatatttagggacggagagagtatatattttgatttttcatctgtaaaatattgcattgcatcaaagatttgtgtacatgtagatttaacttgtagttatacccaattacattgcatttatacttagttacataaaacttatattagttatagtgcatcaaaattatgtttttgacaactattttttctctagatttatgatttttatgtgtttatccttttttttcattcaaaatgggttctatacattagttcaatattctgcaagatttagagttccaaatttgttgaaagatcaatagattagtctctttccagaatggtacaccaacttcttgcaaaggaaggaacactactgatctttcaatatatatgggcaaaatagaagtactcaacactttatcggctgcatttggcaaaatccttttttttttcttccgagaaatatggtacaaacatatacaaacacaagtacacaacatatgcgctcttaccctaaatgcaaacactcacaccctagtcatacaagtaccttcgaaagaccgaccgatatatcttgagattgacgaaaccacggacgactcactatcgacgggtatgtcgtttaccattataaaataataagctattcccatcaaataataataaaaactataaatatgagcacccatgtcaagtctataacttcaattgggtagattggtctaaaaaaaaacctaatcgattgaattacgcttactttgcaaaatctttttttttacttgcaaaataattaagggaacatcaacgtcttgcaagtgggacctccttagttgacatttgccatagtcaaacaaaaaggatctcacgtatacaacacgcaccgattttttattgaaaattataccacgtacgtagtcatctaagcaacttgggcctccttcataacaaaaggaaatttataagtttttgctactttggaatcagggtaaaactctaaacaatttttgggacatactaggatttttatcattttttgtaaaatcgctcgatttccaaggagcaatttttttttttacaaacggtaccacgagtctacgtagtgaattaaggactagcctagatgctttgcgccgtgaaattttttaccataataacgtggaataagtaataacacgatgctagtacaatttggagagagatggtgctgttggtgtttaggatgaaaatggtcggaaaaaccctctaccatttttatttctatatttctttttttccgaaaacggaatcgaaacggtataaaaaaacgataacgatatcagtatattggaaatggaaacgtcgaaacagaacctagcgatgttggttggaagaaaattcatattggaaacaacaaagtgaggcataatcacatatttaattatacatgaagataactttataactttattcttacatcattacactccacataataccattatatgatgattaatgatatgataatatgttcgacgaataatataaacaaagttcaataatactttaacatcgataagttgaagagaccaaagttcaacaaagcccacatgccacgccctagggttaaccgtgttttcccctagccacttcccttttctaatgggctacaagtccgccaggcttccaacattcatgagcttccgatgggttggactagctgagccgttggagaactttcagaattttctcagaattttgacggaaattaccggataaatacgattaccaataaaaacggttgaaaaaacctccatcccacttccgctatcatttccagaagatattaccatttctatttccaacactgataattgccgataccgactaaaacggtaggtgcagaccagaaatgatagccggaaatttccatactgttttcaaccatagggcatttgggtgaggggactaaggtgcatttaggagaagagaaaaagataatgcacgcaaaatgaggtatatcgttagcgtgtgattaactattttaaactagaaaatgactaatatagttttttgcaaaaaaattctatatttttttttttcaaaaaacactgattagcagttcaaaatgcacgcgcgtgaaaaacgaggaactttctctcctctgtttaacacaccgatgttagacttacagtatcagtttagaataggctgaacctttatatatctggtattcgaaagaaaaaaccacatgctcagttgtagtcatcttaagtcgtggatttgataaggatctataccatattctttacccccatctttctaacttctactcacttgttttatacgcacatccttctcaaaccactaaagggcgtgttttttttaagaatatatagaaaaattactttaaaaattatagtaatctattttcaggttttttaaactaatacttaattaattatgcgccaatgtataatacttaattaattatgcgccaatgtatatttcattttacatgatggagagaaggggttccgaacacaactttaattgtccgacaccaattatttttcttggttgtccaagtactctggctttccattctaaaatataaaatataaagacactattatttttctccatgtcttataatatatggcacgcagtcatgtatatagtactaactagctcatttaaatttgctttgttttaaatcatctaccatcaaacttccaatcacataattatttacatgtttcgaggtgatccaattgatgaggtgattaaatttactttttgtttttgtgttagtggtggttattttttatattttgggataaaaggagtatttgttttttttttgaaaaaaaatacactctagatccaggggcttagcccccggtacttttgttatagccaaccatttctcttggcttctctcttgaattcgcctttaacaaaagatggtccagtacaggtgatgagagtgtgaagagatctatccttttccttaaaaagaaagaaaagaaaagaaaaacaaagaaagaaagagtggatgcccccaacccaaccaagcacgtgccagccacgccgccccctcaccccatcacccatcaccggtcgctctccacgccagtacacatgaatcctcttcctcactcctcattgctgctgttcacccagactcgcacagttcatgctcatgcgtggaggaacggtcgttttcttttgctccttttgatagaggcgctaccgctaccttacccttacctagctaagctagggtctcccttcagtgacaatgatcaacgatggagtaattccaacgccatgagatccgtgctgttttgggtggtataattggacgtgtttggttgcctacaaaagcttttatcccgtttatgtttctatcttgttttgtaattatatgaataggaaatgcatgtgaaaataaaaaacggttttgttatatatttatcagcaaattttctaaaaacatattgtaacttgcatgtaattatagagtaaatttcacgaaaatagtacttcaaccaaaatattagaaaactacagatttaaggtcttctatcataaaactacaaatttagtgcagttagccgatgcttatttctcggatactgtcattgtcattgttcttctctgagaaaagaagttgacgacccgtgggctttcacctccacatgacattgctccatcaggctttcacccattgcagatgcttctctcatgatacaatccgcttcctgctgagcctcctttcttcttgatccacagaaaaaaaaatggagaactagcgctgacaatttatcgcggaagaaacaactcaccgaaccgagaacactaactaatagaatagtactactaacttgtactaatagatcccgcagaaaaaaaaacttatactaatagatatcaagaaatagaaacaaactacaagtctatataacatagaaaaccaagcagccatgatgggtacgtgtgcgatgaatcccgttccccctcctgatcttcctcttcatgcctgactcgttttcatcacctgaagctaaaatttctcacaaaactatagatttaggatggagtgtaaaaaaaactaagcagcaattttatcacaaaactataggtttagtgctaatttatcccaaaactataacatttatagctccaacataaagtttgcaatagggatttaaactctagaatttgtatccttgtgataacttcaatatgaaatatgtacttttaagataacttataatataaaatctatagttttgtggtacttggtcttaaatatatagttttgtgataattttaccgctaagtctgtagttttttgatacaacatctcaaatatgtagttttgcgtagtttggtcaaaatatctatagctttgtgaaatttactctatttataatgtagcttgtatgcaaatttcatatattttgaaccattagatttactctaagattcatgctagtgggaaagagaaaatcgtaacacacacgggtgaggggatttggtcccatgacttccgctttgcagaaatagctccacatggtgggatttttcaaagttatatccaagttatactatagttttatattataattatactataattacatttgataaattttgataaaaaaattgtcaataaatatatatatagataatcccaataaaaaaatacctctactaagttaaaaacggagtcgtcctccttccatcccctcctcccaccaccacggtgtgtccgtacgctgaaagtaaacacgacatccaatgttttatctttaatcacccttctagcttatctctatttatatgagcctggcccattacaattgttacaaaatactccatcatagcatatccctatttgttcggtttggccatgatattatcgttactagtttaaaaaaacttaggttccatgaatatctcacgtttggccggaactatctagaggtttaggccctgtttctttcagcttgggattattataatctagattattgagtcagattactataagctagattgttataatctgtagtagaataagcggttagttgtttctttcctagattattagagcctagattattgggtttgcaagtctaaagagggagtggggtggtattgtgggtaatttttcacccaataatctggaaaaagctcacctaaatgagcttatcagattataataagctgggttccagattataataagctacttcaataagttgtctgtttcttaatcccaagctgaaagaaacagggccttatatatgttctcttttagaaaagtttgtcatttttagccttttaaagtccatatatataaacgaacttttttttactacataattataatcagcttttgtttaattaacaaatttagctacaccccaaaacctatgttacaatgacactcttttgtaactgtggagagagaatattaactacctccgctctaaaaaaggtaaagtttttaatgtattattatcagatgtcaatatcttaaatcattgatagatgacaaaaataatattagtattaaaaatgtgaaagttaaattagtattttttttatgaaaaactctgtcatattatttatattttaaatattttctatagatatatagtttgaaaaaaaaaatcaaaaaatcgtgaaatatatagtagtagtatgctatatatatgtacctagagatcaagtaataaagtaatgaatgatggatagagtagtacggtgccatctcgaataagaacaaggtaggctcaaatttgcccgagagctttagccaattcagtggcacgacatcaagattgaagagatacaacaccttaatactccctccgtttcacaatgtaagtcattctagcatttcccacattcatattgatgttaataaatctagacatatatatccatctagattcattaacatccatataaatataggaaatgttagaatgacttacattgtgaaacggaggaagtatcttcttatggaaggtcataattttacgaaacatttaatgatggccccaaaaagattatacattaaatgtccttcttcgacatttcatttcaaaaggagtactaatgattttggagggagaaaaggacaaaggtcagataatgttggacattatgatagaattaatctaatagtctctatcatgtaaaag

SEQ ID NO: 5455 - DNA, 2189 bp, Oryza sativa
gaggatccccaaatggccataacttggccatttgaactcggaattggaccgttcaagtctctaatttttccttaagaagtcaagaacccatttttgtgctttgtttctgcttgttatatggagtttattagagtaaaagccttttcttttctgttggtcgtgtagacgctgcagcttcggaagatccgctcttcgtggaagttgaagccgacgtttgggaaagcgagcaaggcaagtcacatcatccttgaacatattgaatcccagtttataaaattattttgatttaaattattgcattatcgctttatttaaattcccgcgttatcactgttttatctagccatgcctatttacctttgttatgaccttattattgttattgttattatttccttgttcaccctagaataaacaaaaccccaactagtggacactctactcatggtaccactagtatgattttaggtagatgcttcgctggttaattaggcaacattaggtggttttacaactctagactttgggaatattctcatcacctggacactttggaatggatggattattgtggaattggattcacacttccccctctattcaaaatccccaaaatggttttaggctgggctcggggtgcatggttttgatagtagcacctcggccatataaggaccggtcttcgggcctctgttgcaaagcactaccgtacttccacatgtctagtgggtaaggcttagtttgtggctcagtctggttataaacaaaagtacacggatggagatggacgaagtcgggggtcgatggacatctctaggacaaatgaaggctacacgagctgcggcccggtagtcgagatgtcatggcacagggccggtgtcctgctgctaggggctcagtcctgcctacctgtcccgggggttccggccgtaggtggggttgggtcggtactcttgtctatggctaggatgggttggaaactatgtcacgtcttccgtccgtataccgtggtggtatgtggcacgtggttacacgtgaggaagatgtgtcttgtgggtaaagatgtacacctctgatcagagtataatctattcgaatagccgcgccctcggttatgggcaagccgagcaatgtacccaagttagtgttttaattcttaaaacctgcctaacaactaaaatgtggaatggttggcctgggttggcttgggacgagctgggacccagggtcgggttgccagttcggtctgaatcatcgtaggccttgggttaaggcaggttcgtgtgggttcacggccttgattaataatattgtatagttctagaatcgtgtttacaaaatagctttgagcaactaagtatctttaaatgctgtttactgcaaccctaaccctttatattataactcccttgtactcccttgcatttattatgcacttgtgggtgtgtcttgttgagtacggtggttgtactcagtcttgctcaattttttcccaaacccagaagaggagcccctggaagatgaaggctttggtgtctagctcgtgcctgccgtcaagcgcctgtggtcgtcgccctagtcttccgctgtttctcgtttgtctttgtgtgtgctgggccttcgccgcccatgtaataaattaactatttacgcttccgcttgataaactctgaaatgtatcaacttttggtgtaccttgcctcctgggacaaggaataatacacgcacgtaaggaacgcccgttgggttaattccggtcgtgacatgtaccgaaatcagaaggatgaaatgcatggagatcaagctatatatgtcattctttctctccgtgctcatattgatatattcatatataatattttcatgtgattacataagcatgtgagactaatgttttgtttgagccatttcttgtttagtctcttttcacattgagaacatggagatgatgaaggtatgcttctatcttagtgtacacatatgatcaataacttctattcttgtatagggtaagttcacaatcttttatctctaattatgcatacatttgtttctcacaaaaatattttgtatgcatacatttagggggagcaaatcctataccttggttatgcatgtacttgatccaagttattcacttttatttaattgagatctttacatgtgagcatataattgagtatatggca

SEQ ID NO: 5456 - DNA, 4719 bp, Oryza sativa
cccctatatgcacctgaactgtttaggctgtagttcaaattaaaaatgactatacagtagttaatgttattttctgctatcctgtagctttcagtaaggtgatacattggtatgcatgagtaatgttatatttattcatgttcgtgcttatgcgggacattttgtttgtttgttgctgaaaagctacattttccaacttttgcagaccagggatgaatagatgtgaagttagtgaagatgagactaccaatgctctgaatgcactatatgtcagtccagcccctggcaatggcgttgcttcggttggacattctcatgttgcttcttcagggctaacaacatcaaacactttgaatgtaaatggacatgttgaacaaagtaggaaaaggaagaatactctgagtgacggaaatgtttcctttgatgtttctcagcaaatgcaaggttcggtttatccactgagcaaccaacatgctcctattagaagtaaaagtgctgctgatagtatccagtttcctgttgagagagattctaaatcagttgaccatttcgttgagaagaaaaggtccaagagcaagaatcatggtagctcttctgatggaggttctgtctactgtttttccttctattctcctagtttggtttcccgtatgaattcactctagttgcatcatttggttatgtttcttttctgaaactttctttattcaaatacaggccatctcgtggaaagatccaagaagcattcaaaagtaaaaagcaagagagagatggatcatgatgaatacagaacttctaagaaaattaagaaagaggagcggcgccagcgccagtctggcatagattctaaccctggatatgatttagctagtggagacgttcctgatgaggccaaagctttgccttcaaaatcgatggccttacagggttcgagtgaaaggagtgatgttcctccatcaaagtataaaagtgtttctaagtataattcttcagaaaaatctaagagatctaaggatggggatgtttttcttcctgaagacaagaacaaggaacattcttacccctctgatgcacaaaaaccagatttgtctagtaagaagaggatagtgaaggaatgggaggagagtcagcacaattcaacacctccggtgagtaaaatgtctattgtaaaccaaagctcttcttccaaagaaacctgcaaggatcagaacttaaaggaaacaaagtcaaagttaacaaagtctgaagaaccgtttgccatgacagattcaaaatcaataaaagttgcacattctaatcaaacttcacgcaatctaaataatgagctatttgaggacagcacaccttttgctgttaaaagtggtatgtctgaaccacctgaaaatcgatcttctgaacaagctttggatttggctgaacctgcctccagtgatttggcctactttcagactacagctgtaacttcaagctcctcaaaggcttccggctctcagagaaggaaacaaaacttccacgttgcaaaaacttcaccaattgagtctgtctcttcatcaccacctagaatctctaacaatgacaaggtctcccatgacaaaatactgggaaaggatggatctacatgtgctaatacaaacaacatgcagagcttggtaaagaatactgaagttatagtagataatgttcggcaggccaggaagtcacatgagagcatgcttgctagtgaacctgttatgaatggtttttcacaagggaactctgataaagataatgaattgcctcagttaactcaaggccatgcttccaatgggattatttcgggaaggagtttggatgatgatctgcagcatgcatctgggaggaaagattcttctttgaaaagctccaatgcagctagaagtcataaccacttgcattatgctaataaaaataacttgcttactgatggctcttcaatccaacataggatggcagtcttggatactaaaggtgattccatggtacatgaaaacaagagaagtgttacttctctccaagacagaaatggatcaactcattacccaccagatggaaatccccaatcagaggtgtcattcggaaaagaaaagtcacatcccaagagcaacaagcatgatatgcagaattccaaagcccaaatgctcccctcacctctgaaagaaagtaaagtggaatcccactccgctccattaagatctaatgcatcaaaattgacagcacagttaaagcggggcaatgttgaaaatggagggcaacatggcattacaaaacaagcaatttctaatcctgcagacacttccagtccagttaggaaggataataactcaactggatatgctctcaaagaagcccgggatttgaagcacaaggctaatcgtttaaaggttcctcaccctagctctctttgctgtaatgcacatgaaagtgagttttttatatgtaaggttctcacatacttgtctgcaggaagaaggaaaagaacaagaaagtacaagactttattttgagtcagccttaaaatatttgcatgttgcgtcaaccttggaacctcctccaagcattgatggctttaaacaatgtgatgcagctcagaacttgtattccgataccgcaaaactctgcaagtaagttattgtagtactaatatatatgttggattacttgtacttgattgaccatagttttcttcctcaaataattggcactttcctgatccaaggtggaattccacatatatccatcattctccacgctgtgcgtcgatttttgtgcttgtaaaatcattaaagggtattttggtcctatatttatagcatatctttcccagtattcattattcagtcgaaagtgcctaatatttaaaaagcatacgagtattgtccttttccttctaccagcccaatttattgctatggtgaaacgtggtacaaattgagagggtgcatgatgattggatgatgacatcatttctgtgactctgcaatctgccatgcataatattttttagtgacagttctctcctgggctatgtttttttttatcttcttcatgaatactatgcatgaagaaccagaatgtactgcaaataaattcctggtagttccctcatgttgtaagttggaagtttgaagaagaggctctttcgtaatagaataccgatcgacgctagcgaggagagtggaatcacccgttggcctgaacggagagtggaatcacccgttggcctgaacttttcttctgcatggatcgacttagatggggtagtctaataacttggttcgcctgacggctgacgctgttcacagcacaatttatgtaaacagctgttgtactcaattcctcatgtttcatcactataattaattgattcatgtgattgtccagctttgttggtcatgcatatgagaagtccaagaaaatggccgctgctgctttagcatacaagtgtgtcgaagtagcctatctcaaggctgcatactataaataccctactgcaagcaaggatcgccagatgttgcaggcaattgtacagaatccaccaggtacttgaccttaaacactaaaatttaattacatacattagtctagcttgcattttagaatttcaaatacttttagtggtcataatgatattctttttttggaagtgtgagctcatcatactagtaatatgtgccgtgcccaaaaattcagaataccatatccaatcccctgcccttgctgatatttcactgttacattcatactttatataactgcatcttttccaggcatcatcatattgttactgtttcttctctggattgtgtttgttgctttgctatttacttctgtttattaccttcgtaggtgaatcaccatcatcttctgcctcagacattgataatttaaataacaatggattatctaagggcccttcaagcaaggatgctaattcgccccaagttaccgggaacaatttgttactagctgctcgcaatcaaccacacttgacaaggttactagcctatgtaagttcttcatacattgatatatataggcagttcaaaaagttctggtttcgagagtggtttatcttttatagtgtatcggatgagttcacaatctgttatctatgtaataacaaattaaactgttcactatgatggtattagcaaattgcacccaacaaatctagattggatatcataaacgagcatattggatagattttggcaagtcataattaagtttggtttgaaggtgacttgtgaaatgtttgtcgggaagatcttttttctgtcttaagtactatacttgttttacatcctgttgtgatgttgctcatgaattctgctgcataaccttattgctacatattcaaatggcaatgccgttatgtggagtcatatggtgatgaaccaactcattccattccccaaaaccaaaaagggttaggtttgggattagaatctaatgaccctaaaaccctgaagtgaacacctcataacttgatagtacgttacttacagtgcgtcatgccatcgattacagttatgatctgatgactctgtttatattcttagacaaatgatgtcaactgtgccttcgatgcaactcggaaatcacagatggcaattgcttcggctgctagcaaccaagaaaatggaatagatggtctttcttcagtaaaaacagttttggattttaacttccaaagtgtga

SEQ ID NO: 5457 - DNA, 2252 bp, Oryza sativa
aatttaggtagatgcttcgctgattaaataggacaacattaggtggttttataactttagactttgggaattctcatatcatttggacactttggaatggttggcttatgttggaattggacacacacctctcttcctctttcaaaacccctaaaacctgttttcggtggggtttgggtgcatgccagttgcgggaagtagcaccccggccactataaggattaagctcgggcctctgttgcaaagcactaccgtacttccacatgtctaatgggtaaggcttagtttgtggctcagtctagtcataaacaaaagtacacggattggagatggatgaagtcgggcgtcgatggacattctccagggcaaatgaaggctacacgagctgcggcccggtagtcgagatgtcatacggcagagggttggtgcccaatgctaggggctcagttctgcctgcctgtcccgggtatcccggccgtaggtaggattgggtcggtactcttgtctaaggctaggatgggttggaaactatgtcacgtcttccgtccgtataccgtggtggtatgtggcacgtggcaacacgtgaggaagatgtgtcttgtgggtaaagatgtacacctctgatcagagtaaatctattcgaatagccgagccctcggatatgggcaagcctagcaatgtacccaagtcagtgttttaattcttaaaatttgctcaacaactaaaatatggaatggttggcctgggttggcttgggacgagctgggacccagggtcgggttgccagttcggtccgaatcatcgtaggccttgggttaaggcaggttcgtgagggttcacggccttgattaataatattgtatagctctaggatcgtgtttacaaaatagctttgggcaactaagtgacttttaaatgctgtttactgcaaaacttaacccctatattattatccccttgtacccccttgcattaattatgcatctccggtgtggcttgctgagtactgtggttgtactcattcttgctcaatcttttcccccccttcagtaagagaagctttggagaagaagtcttaggtggagtcctggcttataccccagttgagcgcctgtgaagatggagccgtaggcccgctagtccgctgctgtttatttttgattgtcaggccttaagtgcctttgtaataatgtaaatattatcgatataataaagatgtgccttttgtatcatgtttgtgtggtgtaccccggcttttcctgggacggggattaatacactagcgttcgggaaaaggcaattttcccggtcgcgacaagcaattggaggatccgacttcatcaaagcaaattcctgggcatgatatttcgaactttcaattagcttaacagaagataaaagcatacttttgaggaaggctgaaatgtttgaatacataccggtggaggagggttgaaggcgttgtatggcaccactggtagcaaatgcgaatagctgaccatgatagcgtttgagaagattttgtacattctctccttcatgaccttaaaatcaagagagtctggatcttcacggttcgggtcatgcttgccatcaaactcaaaggccgtacgggatctctctttaattggagctagccggctcttgataaaatgccgggtgatctgttctccttgcaggccttgctccttcagtttcagcatacggtccattagggcaagcgcctgattctcccattggaagtgagttccaggtgtcctgataactggaggaagacaggagtactcggggagtgcaggctcggggttttgtacatagaacagtttgcatgccagcctttgtttgaggttttgaagggcatgaaaaaatatttttggctcaaagttcccctaagttggaaaccagcccccccaacaacacatggtttactcttgttcggttggggcttgaggaagaagatgcggcggaatagggcaaaatgcggcctgacgcccaaaaaagcttcgcaggcatgtatgaagttggcgatgtgaactatggagttcgggtttaggtgatgcaaactaatcctattgaaatccaaaatcccccggaagaatcttgaggttggaagagaaaatccgccatagaagaaatgagaaaataccacgacttcatgtgtgtcgggggtcgggaatgcttcaccgaacgccggatgtcatccaatgatctccttcgccggaagaacgccgtgcgccaccttctccttcagg

SEQ ID NO: 5458 - DNA, 3052 bp, Oryza sativa
ggccttacgttccttcccacaatatggcccgtgtattagcacggaaagtacggctagttttaattgggctgacatgggttgggccaaatgttcccacggactccgaagtaaagcccttcttcttcggcgccggccaacttcgctcgccgccgcacaatccatttccataccctcggccgtcgtgagaaacacccttaatctacactgggatcaactcaaccaactctgaagtatacacgactttcgatccagccctaattcgatcgtgtgccgtcgctgatcctttttacttaacaattttttttaacagctgatcgccaccgtaaatcctctttgtctctgttcggctaggcgattcagttgattaacaatgcagccacgaacagagcagcagaagcttcctcatcatcatcaaatccagagcaagtacgcgctacctcaatttcatattataaggcgttttgatttttttttcttagtcacacttatttgtgtatgatcaaatttatatataaaaaaaagaaacttagtaaaatttataacaccaatttagtttcattaaatgtgacatagaatatgttttaataatatgtttagtttgtgttcaaaaatttatatattttttaaaacttgattagacttaaaaaaaatagacaacttataatttgaaattgagggagtacgtatttaacgatcttatccacaggtatgtatcgtaggctcctatccaccacctgcgtgttatatgtacttgtactatagtgcaaatgagcaatcccgctatcaatatgaaaatctgcttaggtcttattcgtttgattatattcccatgagaaaaagattataggggattaggtacggaattaatcccctcaaattaaatctcgattctcttgagtgagggattaaattaaaaaaacaagactttaatggttcgtttcctacttaagagtacaaaatttagaaggaaaaaactagaattgtgatgataagcgggaaataaaacagattacctgttgcacttgcatccctagattacgtacttgcttatacgaatgtcaatccagtactactacggtactgttatacgtacttgtgtacttacgctagtatagtgattttatccatattaaaaaaaagaagttataaacagtagtgaagtgtactagtgatggatcgatccaacatcaaaacaagctacagggatttgatcaacccctgcacttgcgtagagagcatttcggacactgtcagtcatcatctgaatttctgaaattctgaacctgacgtacgcaagaatcagcatcaagtacctgacgaaatggttgcttggctgacacttgtccagtgtgagctttccgttgaactgtcaattgcttccctcctttttcccagcttttctgtacttgttgcccatgtcgttcagttcctcatcttcttcaattttcttctccatttctcaatccattgtcagtactacatatgtgtgtacttctcgcggcgccattcttgtcatctaattgcaggttagttgtaaaatgtaaaatcgaattggacattttgaaccaggtcatggattaattgattaagatgctagaagaaattaacaagctgtgccatgcaatatatcatgcatgcatgcatgaatatgatggctaagtaggtactaatgctaatatagaagagagagagagagagagagagagagagagagagagagagagatcatctgcctaagtacatatttgaagaagctctacttaattaactagaaatggcgccaagccactcttcttgttcgatctactgctagctgctgctgctgctgctgctatactactcgatctcttgctcgatcgatcaaacgcagattgatcaagatcaactcgatctgatcatggtagacaggaaatgatatatgcatgatcgctcagaggcaaagtgcgtgattagccatgcaatgcccggtgcaactcgatcaatgggagaggaagctgaatggagagtaggagtcggagccctgcgacgaggcgaccatgtcggcggcgccgccgctcgccgggaacccgcaggcgccgagctggtccgccgcgtcgccgccgccccagaagccggcgaccatctgcgcgaggtcgtcgacgtcctcccggagccccatcatgccgtaggcgtcggcgtcggagtagcgccgcatgtcctgatgatcggccgcggcgccgccgcccctcggccggaggcagctctccggcaccacgctgctcaggtacccggagttgtcgtcggcgccggagaagaggaagtcgtggccgttcctgtccatgtccagcagcgacgacgacatgctggagcggtggggatcaaccgggaccatcaccggcatcgtcgagcactcgcccaccgacgacgcgcccgacgccgcgccatgtccgtggtggtggtggtggtggtggtggtgaccgtacgagccaatgtgcggcgccgcgcccacgccgccgccgtactgcaccgaggacggcgcggcggcggcagcggcgtactgcggcgcgtggaacggcgcgaggaacggcgggtagttgtaggcggcgtgggtgtagacgaagttggtgcgcgcctgggcgcccttcatggacagcgcggcgcggtcgtacgccagcgccgcctcctgcgccgtgtcgaacgtgcccagccagtgccgctccttggtggtcgggtcgcgtatctcggcagcgtacctcccccacggccgccgccgcacgccgaggaacctccctggctcctgcgcgcgccgcctgctgcgccccgacggcggccgctcgctcatcggcgacgacggcggcgacggctggctcgccggcttcggcggctccgagaacgccatcaggctggcctggctgctgctgctgctgctgctactgccgctgcctcgagtgttcatgaccaatgcaatattgcaatattgcaatgcaatgcaagagtgagagtgagagtgagctaggctttagctaagctaaggtatatgaatgagctcgagctaagcttagcttgtgtgtag

SEQ ID NO: 5459 - DNA, 3162 bp, Oryza sativa
tgatggaaaattttgtgctgagcatctggtgttgtgggtggtatcctagtataccctcccactcggtatttaccacttaccaggtccgattcccttcattcccagtataattcccttcccgtttatcctggaacgcagaagcttctcaagtattacctcaagtctttaatattaattttttttaactgttataggatgggttattagttgttttggaatcgaatattgttaaattctaaattcacgaacatgacggctttcaccttttaaagggagataatcaagtaatacctacaagtgaaaaatacctctgatcaacaaagcatataagatgacgtttgatagaacaggtagcggagctggaagataccaaccgtgtgaaggcgcccaaacaaccacaaactgtttattgtttagtattgcaaaactagattcataaacatcagcagaattacgagcacaagtgtgtttaagagactgcgtaaacatctctactagtctactacatccaacagaacgaacacgatatgatatccaaagtatctgaaacaggacatttgatttagagcaaaacagttcagagctgcaaaattaggctaatcctcaatggtaccaactgaccagcaagctaaagcttcttagcaactcttggctcctccactttttttggtaccctaaaacaatggaaactggcagataataagcaaacaaagaactaatagccgtgaaagagaaaaaagcagtttcaaggtacatatgctggagctgcagcagctggtgcaggttaccggtccctatttgatgaaaattgcaaatatttaacaaaaggttataatatagttttataaacaaaattgagctatgtaactagcttcagagaagaaaaaatcagtaatatctaaacaaaaatgcaaacaaggctgtagtttgaataaaagacagctggcaagcatgcactttcaacaatcaaatgcataggctgctgctgagtacgaaatgccatacatatgatagctgcagatctcaacataattgacgacaagcatccacttatcagatctttcctagaataaaatggctctagtgagtggtcaacaagaggaacatttttttaaacaataattttccaagtggcacatagaaccttatgaatatcttacctgagccaacctctcctacctcctggaaatcttcctttcttggcttgccatgctcttggcaagcttggcttcaaactggtcggaaagagttctcttcctagctttctcagcttgcacttgtggatactctccataaggtcccctcttgttgttgagcatgttacccttgaccttcatttacatgtcatggtataatacatagtatgcttgtcaatcttcttggcctcccggcacctgtgcagcaggcgcctcaggacgctttttacatcctcctcatccacagaatcttggtgggagtccaccctccctggaacccctatgattggctagtactacctccgtaggttataagactttctagcattgcccatattcatatagatgttaatgaatctagacacacatatatatatgaatgtgggtaatactagaaagtcttataatatgaaacggaggaagtacatgttaaggtacacatttataggcttgatcattttactcaactaaatactccatatccagagtggcatcccttctgttttggctaaatcacagctcaatccactcgataccaaactaaactccgcagatcagcacctaaaaacacagatctacgcaacaaaaccatggcgcatcataggcgcggccggcagaagaacgcgtacaacgagatagcgggcgagcgacagaggggagggattgagccagaccttttccgctgcgacacctgagcacgctcgccgtcggcggcgaggcgaggcgcttctccgggctcagcgacgccgtcttcgccgccggttcagctcccttccctcccttacctgcggcgaggtttgggaaatgagacgattaaaaggggagaaattctgccatgaagcgagctattatcctaaattttaaaatttaagtcactttgaagttttttcattatattctatttttaacatcagattttaaacggcaaataacacaaagtaagaaaacttttacctataaatcatttgtgatggcttagttcatttttttcaaaagcttgtcagtctttgttaaaatgtaaacgattaatctatcagttcaaataagcgcatctggtgtagtggtatcatagtaccctcccacggtactgaccggggttcgattccccggatgcgcattatttttgctctatttatgcattttttgttccatttttgtgtaataactatgctatctctttttttttgcaagtggctttcaatgcatagttttgtgtaattataattcattttttttattttttttgtttaataattatgctatatctcttttttttttccaaatggctttcaatgcatattttagtgtaataataatgcatcttttttttttgcaagtgcctttgaatgcatattctaaaggaaactaggggttggttggttcgattccccggatgcgcattattttttgttctatttttgtgtaataataatgcatctttctttccaagtggctttcaatgcatattctagaggaaactaggggccgaagaaaaaaaactgtgtaataataattcattttttttatttttttgtgtaataattatgctatatctctttttttttgcaagtggctttcaatgcatattttagtgtaataataatgcatctttttttttgcaagtgcctttgaatgcatattctaaaggaaactaggggttggttggttcgattccccggatacgcattattttttgttctatttttgggtaataataatgcatctttctttccaagtggctttcaatgcatattctaaaggaaactaggggccgaagaaaaaaaactctcattcagaatcttagaggctgttcagattgatgttattttcatccatacttttttttaataaagttgtaaaaaaatatctacatttagtttgttgccaaatttgataaatatataagaaatcctgtcacttgccaaaatttttaccattaaagtttattttaactacaatctgaaca

SEQ ID NO: 5460 - DNA, 4397 bp, Oryza sativa
cttttgcggaaaatcaattaaagatagctcacgtgcgaggaagacgccatcgcgagaggcggaaccgagcgaggaggaaaggagggcggaatctcgcgatccccaatccgtggaggggcgctccgatgcgccgattcggcgagagatcccgccgatcggggagctcccggggtgggattccagctgcgggatttgggggcgctgagcttgagctcgggggaggcggggggtgggcccagggctgcgagcggcggcggcggccgcggaggcggggggtttggttgtgggttgtggggttgggggtggatgctgtcggtgaggaggcggcaggaggatgcacgcggcgtagggctccggggcggcgccgcagcgggcggcatggaggacgacgcggagctcgaggagggggaggcctgcggggacgagacggccttcgtcgaccccgacgtcgcgctctcttacattgtgagtggtggcccgagcgaaatgcccgcggtttcctctgctcctgttgagttcgtcgcggtttctatgcttgtttggtagttgcccgatgacgatttaagcttagttgagtagtttgatcggttatattcgtttagagaacggacatgtctagcttaaattttatgcttcgtaggagtgatgctgctgatttagcatgggaatgaagtgattgcattgatgaatcatttgaagtctgatcaattcgttgcttcggttgtcggatactggaaacaattgcattggtgcagcatttaaagtttgctctttctttttttgtttgtttcgtagtagttgttgttgatgatactatactagtctatgtagatgaatcctttgatgacgctggttattatgtaatagaatgtgaatctactggttgcaattttggtattttgtgcggtttattcgagattggcagtattagcataacattttatatggtggaatcaatctctcctccttttcttttcccttttgaactgccaggctgaattcatggtgctattacttggatttgttcatgcaaggctacacgttatttttgatagcaggactatgtgcttcctcgagctacttttaatggatcaaacatcactcttagtctacaatgcccagtgaattaattaaatacgcttatgttttgaggttactgtcaacagttactttatagtaatgaaacggaattttaaactcaaaatttccaatgcatgctttatatctgaaatcctttggaccagaagaaacggaaagggaaacaaattgaaaaggcagaaatagcgaagtgtttaattatcaaaacttgcctataggtaggttgccttttatggataacttgcaacatgaatgcgatagacaccagcaactttcacttgaagacgatatattgtattgtgccaacaatcaaatctgttgaatggttccttttttgttcttgatgtgcttttttccctcaggatgaaaaaatccaagatgtacttggccattttcagaaggactttgaaggagctgtatctgcagaaaatctaggtgagcagatatgagttgctgacgtagtcattttcactttggtacactatagagagacattaaaacaggggattaaaccatgacaggatcgaagtttggtgggtatggttcattcttgcctacttaccagcgttctccgctgccccaaactagaagtccacctaaggcggcaaatgttagctcaagatctccttatcaccagcctacagaggtgcttaaattagttttgactgtaaacattcaatgttttaaaataatgttctgatgagatgacctgtaatttagagcatgtcccagaacactttggctgtggcagctccatctgtttcaaaacataatggttccatggtgccactttctgatgattcaagtaagaaggaagtacatcaaagcacaaaagttgaaagagcctctagcacccaagattcattgaatgggctatctaagtctagtgaccacaatagatttaaagttcggatcaaagttggttcggacaatggtttggcaagaaacaatgcagctatttacagtggtttgggtcttgatatttcttcaccttcatccatagaggatagccctgatggctgtgggagcctctctccagaatttaacaatgtgccaattgaatctcccaggaccattcttcaggtaaattactgcatgaactctttgcacttatttttcattatgcaaggttcatacaatgaataactgtcttcattctctaaatatatggaacagatcatgacatgcttttcagttcctggagggttcttgttatcccctctgcgagatgatcttgttcaactgacacaaaaggttgtgcctacatcaaagaaatgggaaacaaatgcaaacacagaaaatgtacaagaaagatatgaagggtatgcggctaaaagggtgaaatctgatgctaagaaaaagaaagctgtagatacgaagaggtcaaaaagcagaaatgatgtcagcgcagttatgaaaaatgagattgatatagaaacacctgctggtcaaaagatcgtattggaagctctcaacataccattgctgtctaatcccagaaccatggaggcaaaggacgggagccagtttgaagaggatcctatgcgagacaccttggtggaaaataaagatgcccgattgaaagaacggaccatcaacagtgacttaatggcaatcaaatatgaaaatgtcaaagccgaggcagcggaatgtttagagaacagtggtcctggcagttcaggaatggatttttcagcagtcaagggggaagtgaaattcaaggcagaaaaagcagagatccatgtagaagacaggaatactactagtgaaaaggacttccaatcggatagaaaacaagaaagaaaaataaaaacagagagtaagtgcaatgccacaggagttaactttgaaggtaacaaggttatgaatgaaagaacacctgttgtcggcaggagcataggaaaggtttctagtaaagaaacattacttaatgatattaatgaagaaaatgtctccaagagtgagtccagaagaagtcagaaagagcaaaacatgaatgcttcatcatcttctgatttcctggaagatgacaggggtgtcctttcttctggtgcagttaaggagaggaaaaatgattcgcaatccaaatctagccatccaggaaggaaacccaaagcaaaatcacatagagatgttagggagcacttacctgaaggatcttatggaggcaaggatgatacattggagaatggaagtgggctgggagagttacggccaaaaaaaatttggaagaatgatagtgagagggattctgatatgcctgggacatcaaaaagggaaatttcatctagtttgaagaatgataggcacacacctgctgaggagcagaggatgcatgtacctccatctgttagtgcacctactgcaaatgcagctcctatgcttcctgcccccgtcgtgatagaggaacattgggtatgctgtgacatatgccagaaatggcgtctcctgccatataagatgaatccttctctgctaccaaagaagtggaaatgtagcatgctacagtggctgtaagttcaacttttcaaatccacatataatcttcaaatttcgtttattttagtaccttatgttccctttatacttcctgctcattttgctgcctctcttattacttcattgaaccaatgagtgtatcagtattcggtagttagcataataacatgtaataagaggcaccatgtgcattgagggttgtttgattggactgcctaaaattactccatccgttctaatgcatatgtttgattattatttctcctaattatatgttctcaataaatattaaagatataatggtaacacaatgcttttaatgagaaacatactaatgccatcactaaaattgtattacatggcgaactttctttccgttctatctcgaatgcaagaaattttttgggtggagtgactagtggctacaggattggagtttgggtatactcttttaatggtttcatgtgccccctatatgcacctgaactgtttaggctgtagttcaaattaaaaatgactatacagtagttaatgttattttctgctatcctgtagctttcagtaaggtgatacattggtatgcatgagtaatgttatatttattcatgttcgtgcttatgcgggacattttgtttgtttgttgctgaaaagctacattttccaacttttgcagaccagggatgaatagatgtgaagttagtgaagatgagactaccaatgctctgaatgcactatatgtcagtccagcccctggcaatggcgttgcttcggttggacattctcatgttgcttcttcaggg

SEQ ID NO: 5461 - DNA, 19271 bp, Oryza sativa
tctcctccacattaattaattagctgttgtgtaatagcatcttgtaaaaggcttcaaatagagaacatcacataatctatactatcttcgtttcaagttaattataagacattttagcattgcacacattcatataggtcttagaacctgaaacggatgaagtatcaatctagtggatatgctgatttttttatttcttatgaaaaaaatgtttgcaattgattaattaagcatatataatgcagagtgaaattagcactgttaattcctcttgtttgtttaactttggagcatctagaaaaggcttttcttggagtgtacaaagccttgacttccatccctcatgagaacaatgagaatttggattcttatggagagctgcatttggggcaattcttgcatctaatgccttagcttcctacaaatgcaagtatagtacaatgagaggagagctacatgtgtagagtgcatgcagagagagagatcttatctgatgaccttgacttcccctactacacccctctcttgtgtgtgaatttggcatatatgtgttggcctgtgaaaatattgcattgcaagatggggtcaggtcaagccctagctagacatctgaaaaggtgtgaggaggagaaggtggtgttcaactggagatggggagaaaaaaggagaaatctaagggcaaggaggctccacacaatggccttgacaagatgtactagaaatgcataagttagttaatttgcagagagaccagattaaactgataattataattatgatggaaacgagcacagcacacaagacacatgttcttgtctattccttagggtcacacccgggttttgggggtggcctttgcactactttgactttagacctcccttatagaaccaacaagttttgtggaaaagacacacaccccaaaaaaataatatgtatgctaggacagtgtgggtgtgggtgtttgtgtgtgtgtgtgtgtatgtgcaattgtagaagtatgcaaggcagttcactaaacataatcaagggaaaggtagaaaaagaccacttggggcatgcacatttgtctcaccaagttgtggtttgaataaaaggagatcagacagagtttagtagtgaaaaggtgcactcacaattcacagaacaaaagctccacatagaacgcttactttaatcatttcgaatttgaactctgattttcaattgttgattctatgctaattccaaaaaacttccatatattagatattttggtggatatcattccaattgtattggtaccttaacaattgtcagtgcttgctacgaaaactctgtttctagttttcagataattgatggcaattaattagtactgcatcaagttcaaatcttcagctcgcagattggacaaggttattgtactggtcaaacagttcgatctcacagtgttagtgttgctgttgtctatgtgattgattactaagttattaattaaacaagcgaccaagtaccaagaggagagtgcactacagcacacttgtcccattttatatcgaccaccaaaaatgacaagcaattacgcaactgaagatgatgatttggcactgatctaacgaatgaaagattgttcccactcttcaagttcctatgatccatgttgattggtctgatcatccccaatggcattgtcctgcatttgactgaacaatgattaacataagcatgcatggtttcttgttgttaactcttttgtttacttgggattggcaggtggcaggtgatgatcagtgaagcagcatatgatatctaaactgagagtagtagtagaagaagaagaagctagtacagaggagtgtatgtgttggagctaaaactgacaagtacgagactacagctccttgcaaaagggggctcctgaccatacattgctataggctggctctacactctacacactactactgtctacacatgcaattatacacacagagatgaaatgcatcttcgtctctcccagtcccagctactaggccacttgtgcgagctttgcctacaaggatgatcatggatgcagaggcagaggcagagcacgcagcaaccactccctggaccctgcagcagcagcctgggcaaggctatgtaggtagaagaatggagatatgatgtgtggtagatatctacatactatataatagatatatatgtttttttggatttaagtaagatacatggtagaagtgtatgccatgagtgattttcaggggacatcggtgttggtcgttgttgcttaaggagaatgatggtgacaaaaaatgtatgttagagatcagagtcttggagttctattataaagccccgttcggtagtgagctagtagtggcaatgttttccttttagcatgttttccaaactgctaaccgactgctaagattagaagcttaatcagttgctaaacaatttggtatgtgttttctaaggatttgagtttaaggactcttgtatggatttttatttgttgatttcttaactaatgttgttggtttaacttaactagttttaaaagaggtattttactgttcttaaggttgtgcagtaccaaatggcaaatcgtgaccgttgatctagcatcatccaacggtcaaaaatcgtccgtacctcattgaagcggtatcgtgggtgagagggtacgtctgtactttcacgtgcggcatcactttctttcgtgtttcgctttcttctctctttcacgataggaaaaaaatcgccggggaagagcagtgagagaaactagccctaaatcgcagggctggggtggcgagaggcaagggcaacgagagatggtggcgagagcacgggcatgaaggtcacgaatcctagatggggacattcccggtggtagcctcgatgcgactgtagtgtggtgacctcgatgtgcgatggcggcgcggcgcagacggccggcacggacgacctgatgcggtagatggaacagaggagaagagagtggcacagaggatgtcgctattggctgagtgggcagtgattagcagcggtatctcattttcgttagcccgatcatacccctgctaaaccaacggttatattatattgatacctcgtgttacattgttccccgtagattcttaaggacgggaaatatgatcgtttagaaaacattgaaacacttacactgtaacataaaacatatggtttcgtaaaagaaaaaaaaagtatatgcatgccattgggattggtgagatgataaggtagaggcagtaaaaaagaatggagacggctacgccgacgccgtgtacaagggaacagtaggtcgtgcgagtgagagtggcctccccgtgggacgacgtgtcgccgccgcattgccccgcgggacgccagccagccacagccacagagccgagccatacggccgcggcgcgcacgagagacttgtacaccggctacggcgccgacaacgctagctactatagcgcgcgctctgggctgccgcgccgcgccggccgctcccaggacgtgggcgcgcgcgtgcgcgtgcgcgtccgtgcgtgcgtgcgtgacggcgtctgcgcgcgcgccgcgccgatcgatcgatcgttcggctagctagctgtggtagctgccctgcgcacgcacgccgcgcgcgggctatgtatgcaccaccggcgcaatgcacaccgccgcgcgcgaccggccggcgccatactctcccccggcgcgcctctcgctttgtactcaactacgacttgcttctggtgtcttactacgtaggagtacctgttttcttttctttcttttttacacaacatttaacaaccctagctacaacattttttaattttctctcttgttaccatacaaagcatcaataataaggaatggaaatggtgatagctagaaattcttgttctaaaaaggagaaattatcggccaactgagcattgttttcatatcgtttttgaccttttccatttctcccatatagcatttttgtttttcttttccaacgacattttgcagtcgttaataaatagttaaattggtaaatatgaaaaaattttgaccggtcaataatcattttcataatgtctctgaccatttttcatgtgttaaagatacagctatgagcaggtttcaaaaaacgatcggttttcacgagaaccgcttggttttcgtgaaactgcccacggtcaatttagggttacatatcagttttaggctagtttccgtagtacattgattgaaaatccccgattttatcagtttttgggtaaaccggtgagaagggtttttttatttccaaaacgaaaaggtaaatcccggccatgagcgagtgaaaggcatgacacacaggtagctagatagcaatagcatagcaagcagctcgagtcactactcactagtagacgactaccagtgtgtcacacactcacactagtctatatacatatagctgtcaaatgtatacatgtgatgggtatagctagctcagctcttgaccgaccgggcatgcagtccaagtgtcgtgcgtgtagaggataagaagagtcgagatgatgtacacagtacagatggatggaacgggggtagaaggataggatgatatgtgtaggagtagagcactgttcacgtaagcacattgctgatgatgatgatgatgcatggtgtggtcgtagacgagagagagagagagagaggctaacttcacttgttctgcagaggaggcgacgcgtcagctgcctctgccagcgccccccgaaatggtaaccaaggattgtgtttggtttgctttggttgtgccttttccaccggggaaatggtaacatctcctcatacttctcctcctccccaactggccaaaccaacaagaagtatatacactagtagtagactactagtactatactgtactattggagtagtactagggctagtgctagccgtatagtatgagatattgagatatgacaacatttttttctcctgtgttttgggcctctttggatcattgcccaaaaaaaatggcattcaaaaatcgtcactcatttggtttagataagaaaaattggcattgccaaattatttagcatcctttctatgccattgcatttggcttggctaagattggtatctgcaccagtactgtaaaaaaacaatagtggtcaagctctatttttgtgttttttataagttagtctacgatattttctaatattatgtaatagtctaatatttaaataagtatgaacaaagcataggatggcattttacagcaacagagcccaacttttgggcctttttttttgccaggattcgagacgtacggcagtggcagtgtgcaatgcaatcgcagttcgacactcaaaaaggcaaggatggccacaagcttgggagatcatgctactgtagcacagctacagtaagacggcctacagggaggtatgatgagtttttaagacaatgttgactcctcgggaaataaccagcctgtatgccagattcattcgcccaatcactggatctcataatcccaggaaaagacacaacaagcaggaattctgcaagcaaaggtccagacaggttttgccaatcgtttgagagatggaagaatatccagttcagaataacaccatcatttcattttccccccgacatctcaagctgaatcatcatatcagcatcatcgtacaaccaaaagaaagaagaatcgtatagaatacaacgaaattcgtgtttgactgagttcaatgccccaggtgaggaaacagcaagccagcacccataattcagttttgcagcactggatttcacaggttttgtattgttcactgtaaattgtatacaagtgctagtcttgaggtcttgcctctctcgacaaatgtggcttccggtcatcatgtgacaggcatgcagcccgcaaatgggatttccagtgtcaaaatgccaggaagagcaagtgcttacaatgcttacaagaaatgggactcacaaaaaagtgaaatcaagaaaaatgacaacagcaacgccttcagctccctaataccagagaagttaaagaatcatagggatttcaactttttcttcttcgatgctttttgggacttggaatctttagcagcctgcatcccagaatcgttcatcagtattttccaccaagcaaaaatatgtaaaactaaaaatattcaaactattttccacggtatagctatgtgtggctgtgctattatgaacggagtatgtccatctggtaagccaagaaggcagtacttagaccctgatttttaccaagtagactatgcaatgacagtaacccagaagcttagtctcctgattctcctctttcttgtgaaggaaaactagtaaaagggtattacagtattattacctttagatttttctttttatttttcttctttttcttgctctgttctcctccgttttgaaaactcttatccttctgagcaatatgatatgactgtcagatacatgtcaaaaaactttcggcgtatggtatataaaagcagcaaaattgaaacaattcacagacattctcaagtgaatgttcatatacttgccttattcttcctttttcttttgacccccttggtttcttctccatcttttgaatcatcagaatcctgatagtcttgaaattgtaagcgcggaaatcaaataaacaaattatatatgaaagttatcatcaacatatatacctcagaagaatctccgaatgatgaaacgtgccgtactattcttcctgaagttgacggttcacctagattgacagaataaaatggtaggtcaaattcactggttcacataaacagttaataatgggcaaacattgggaatgagaaaaacgctggtgtaggtcaatcctaataccttagcagacaatgcagaaaccaagcaaccttagcattagctggtggacaaaataaatgtatgatcaagtcttataaccgtttttactaattaaggtttaaattgtttgaagtttcatgttcctatataagacagatgtgcagcccacctttgagccattttctatcttaaccatcaatccatcatatcatagaaaaaaaatatcgagcagtcatgtaataacaaatgctccaaattacggaagaagaaatgggaaaataaactgtaagacaaggttaattttcatgctcttatagttttatgagtatttgtactaaaatgcacaccattactggtttacgtaaatcattacataatgtaatctataatgacataggacacgcaatacatgcattccaaagaaccagagtaccagacatatgacagtgagatgataagaaatccgtacccttgctagcctttattgtttcttttgcatttctcacagccaatttgacaaggtctgggttcagagattccagcccatcaggctgctgaagctttctctcaaggaattttgctaaagcagcagccttgtttgtagttagtggtcctccaggatgagccatcctatttaaaggagtacagtatttgagcctttcagggtcatgtcatgagcataacaaagaacaaaaacccatgaagatcatactttacatagagcaagcctacaaaataaagtccacagagctagactccttggtcactcgtgcatgagaaaaacaataacacaatatattccaagttatctgctatgatatctaccatagtttaaacctaatattatgtttcaggcaaaatccaccagaacttgaaccatcgctcttttttacttccaaaagcgagcatagatgcaagaggcactgattaattcatagtataaacacagctataccataatccaaacatgatagttgtcaaacatatagtatttcgctatctcagcaatacagatttcaaatatgtgatccaaatttctgctagcaatatattcagattagtttcctaggaggacttgaaatctttccctattaggagtcttatcttttatctcctatatatgctatattgtaagccacatgggaaggggtgacgtcccattgttattcccctgcgtttgtaaccaactcctcaatagtgatcattgccaatagacgctcatggtttttccccgtaagtgttttctacgtaaaaattcgtgtctccgttgtgcatatattttcataacaagtctactttgtcatttttggcttatgtgcaggcaacaggcaccagaggcaccttggggaaaagaaggcgcagaattgcaaacctcctagcttaattgcttaaacagtgagaaattgctataaagcaactcaaaatcccagttcaatcaacaagcctataaaaacgcacataaatgatactcctaacgtaataatttgaacttcaactacacgcaattccttcctctgaatcacacaaacagcaaaacgaccaaaccctaatccgcattcgcaaggaaacacacctagcttagctcgatcaatctgctcacgaaaaaggtatagaactaatcaagtagccgcttatacgcgggaatctagctttccccacaagtgacactagacgaatcgcttgaatcagcaaactccaagctacgaatggatctggagtcagggaaaatagaaggaaaggggggcgacggatacgatacgacacctgggctgggggcgggaaggggcagtaggcgctggaagcggcgcgaacttgctgccccggagcgcgcggcgctcctcgtcggtgaggtcgccggccgccgccatgacgccggccgcaccgcacgatcggcggcggtcggtggaggtgtgcgaagaggaaggcggcggctcgactcctccggttcagttgggctcttggaccttctttgggcgcggtcggagtcggaccggactggaccggagcgtgtgttgtgttttgactttttgagttcaaacgggaggagtacttctgtatgacatacaggtgggtccgggtataaaaattcacgcttccgcgtaaactttgacgaatttttgtactccatactgttttggcttctacgatagaacattcatatggctagtttatccaaaacttggacagctagttcaaaatttggcttttaataatttccatgtgcttcagacattcatatgatgcaggccaagggtgtgtttagttccacaccaaaattggaagtttgactaaaattgtaagtttaaagaaaaaagttgaaagtttatgtatgtaggaaagttttgatgtgatgaaaaagttagaagtttaaagaaaaaattgggaactaaccaaggactaaatagtgcgagattctccgaagaaaatctgcaaagcatgatcaatgaatacaattcatccaagattcagaaataggggaatccatttcccaatcccacgacatgctaagaattgatgtagtagtattaatgtagcacgcattacacaaagctcgtcggatcgagaaatcacaaagatgctccaaacttataatgccaggacaaaagatgttcagacttattgccatgttatgtgctatcattgaacattttaacagttgaactggatgtattcacaagatcaccgaagccccggagttcagatggtagcagctaaagctagttctgccagcatctttacatcacatggtaactcggcaactacattacatgtataaaagagcaaacaaaatgacgtacacagttgaggatgaccaacagaagattcagctcaaaacaaagctagtattactgggtagtacggcaagcatgatcagaaaaatcgatttagacatagtagatcatgccgacttcgacgaggctaatgtggggtatgtgcagcgccaccgcgggacccctgcagttcttgcggaggaacgagtaagcgtagtcgatggcgaacgtcttgaggaagttggagttcttccttgccttcacgtaggagtggccgatgatgtaagtcacgccggcctccttggcgtccaggagatcagccagctcgtcccgcacctgggggtcgatccgctcctcctccgcaatctcaaaacggactctgcgacgccggctgagactaccggactcctgctcgtagatggactggaggctccggagcgtctccgacctgctgctccttgtcagggacgtgcctgaagcctcgttattggagtccctcatcaccagaccggtgccggttgtgtcctctgtgtgtatgacagccatcctcccttccgaagattcgtagctcccagaggaggctgcctcctcggcttccatttggatgaacttggcaatgctcatcaccaagtggttctcaaagttctcgtcatctttctgcacatctttgtagccatacctcacgatgcaccggtacatacggtattccctggggccgatccgtccaatgaggtaccgttcgtcctctggaacgaacggcacaggtacggacttgacgcaaacgaagaccagaacctgatggaaagcaggcaggttggtgacaaagtgcgagaagatggaaggcaccccggtgaccagctctgtgtagatgagaccgattccaggcacccgaacgatcccaaggctcggaccaagtgtcaggatccatttcattgagaccttgttctggagatcaaacaggtacttcctccgagagccgtagtgccatacgtacatgacgagcatgaacacgaaggcaaatacgattggtgcccatcctccctgaggaactttagtgactgctgccgacaggtacaccacttcgattgacccaaacgccacgacaaataacaaggcgagcaggatgtttttttgccacacaaatatgataaccaatgccatcaaccaggtggtaacaaacatcacaacgatacacgcaagacctgaaatcggcagaggaaatgacaaatgagttgcaataggagtaacataatactaaatatagcatgagaaactcctttgttttttgagaatcagataagagagctatcatctctcaggagaaaacaagaaagctaataaactagtctagttcaaaaagatgcaagcatacattggcatgcatcgccaaattaagttgaagagtgtcactattaagtagtgacctattcagaaaaataacagctggtgcacctattatgccccatgaggaggaaccaggtagctatatgaatgtgattctgaattacagaattgttgtctactataattaataatgcacattcctttaaccttttaattattcaacattggaatataaattcaaatttacatggcatgctggtaataggggatctaaactgtttgaatttataacctaaagcagtcctatagtccatactgttttcttagctactgcagtattgaagatctgagttgatcaaagttaagagtataaagaagtgttcaaacttaccgtaagcatttccaataactgtcgtgtctcggaaaccaagtgtcacagcaagacaaagaaccatcagaatccaattaatctcaggtatgtaaatctgaccatggatccaccttgatgtatgcacgaccttaacccgtggaaaacatcccaaagaaagacactgcttaacaattgaaaaggtagcagatatgatagactggctgcccacaaccgctgcaagagttgcaatgacaaacactggccaaaacagggatcctgcaaatatgatgcaatatgaagcaagaattcttggcaacatacaaaacaaattattccaaaatatgcttggagttatgaagattacttggtacagattggtaaaagctatcttctacagctgacatgtttctggaaagaaatgcagcctgccccatgtattgcagcacaagacagggatatatggcaccaacaaaagccaactacaagcaggacaagagctggagtcacaacgatagaatgacaaataccaccttaataacttaggatgcaatatgcatccccaaaaaaaatgggaattttatgttgcaacttgcagcataccctaatagatgcagcagtgaagtggccaagatcagcaaacatagcttcagtacctgaagtcacagaaattattaggaaacccattcactaaaattgtaagataaatggcttgagccacatagaagggctattcaaattcacctgttatagcaagaagtactcctccaagagaaagccaaccatcttttcctgtcatcttgaagaactttataacataatgtggagaaagagcaagaaatattctgtggttccagtggatgatattataaagcccaataacaccaatactcaacagccatactacaacaatgggcgcaaacataaatgctaccctatgagttcctcggtgttgcagtgcaaacaggccaacaagcacaatacatgcaatgaacaccacccaacctgcacaacagcaagttagttaaggtagtgaatgctgttcactgaaagaaacccctagtaatggctgctggaataggtaactgcactaaaaatcttgtatggtctcctaaaagaaaattgtatgagagagagattgagagagatctaacaggttaaatctacatcaactgtagtagcctgcaaattcagttagaattaagttctcactatatgactcgatcagacaaatatgctcctaatatggtatccagatttaaaactttaaagcagcttgatgatactaatgaacttcaaataagaactgggtattttgattcaaataagcatcttgtatggatgttatttccaggggagatttataaggccaaaggccaaagcggatccaaagtttaggaagttcaacttatgacatacagttagcaaaaaaagcaggtaacttacaaatagccaacaatttgcgacagtgtgtaatgattagaaaattagcaagactagatggactactttcttaaaacagcttgctacagaaaatgaaatgattagaaaatgctggtgctagggaatatgttgagcaaatttcttagcagctcataagcagtagaaaagacagtgctaaggcataccatctggtattcctcctgggccagggtcttttaaaccagagatggctgacaagactgcagcagacacaacaagagaatttattagcaaaaccatccaggtgaaaaagcatgcgttgaataattgaaaaaaaaaagaaagacgaagctaatctaatgtacatgccaggcataccagagatagcaggtgtgaaaacaccatcacctatcaccatgcatgcgccaaacagaacaaaaagtagtaaacaagtccgtagcttcctgtgcttctccaggaatcttttgagtggagaggaaataatgccaccaactccaggctgatagtacgttgaaagctcttcgtctgccgattgctggtttggaagcaggctgaactttgcatgcctgcagagaagtgagtataaagcaaatgttccacctacataaacaaaaattataatcaatcaaaaaacatgataaagatgactcttaaactaactagacagaacaatgcataaattcgttaaagaatggagtagcatatttattgacgatgacatatgtgagttgttacagaatatgatcctctatatactcctgatcggcttaggcagatgtgcacgatcaaaactcaagcacttttgggagttgaagaacataagttaaaatacaacgtatgtgtttctgttaaatttctgataacccagcatatagtactatgaagttactcaccttccccattatcatctgcgttcaatacaattattacatacttcagcaacggaagaagtgtcaaagtccaaaatatcagcgaaaacaatccaaatatggttgtctcatcacggtaattattcagcctcccagaaaatgcacttttgtagacgtacaggggtgatgtactcaagtctccatagaccacaccaaagctctgaaatgctagcagagagatagttctgcaataacttttccattggtcctgcaaaagcacaatcatcagtacgccgaccctgtgattgtgaatagtaactattactgagaaccgatcagtacagtccagtatgtaaaacaagagagaaagcagatattggtagctgggcatgtattaaacagattattaatttgatattggtagctcatacttttattagactactcttttgtcgaggggaaaaaccaacaactatagatcacgcaaatttagaattgtcgggattaaaagtggtagctgtacacgtctcaataaaaaaaatgtgatgccaatgcgtcaacgcagcaaaaatgtgtaatactaatgtactagccaaccccatccccaaccaaacaccaaccaaaagcacagttgacttgattcatcaactacatatggctctaaaaccaagctggttctcagtttcagcgaatttaagcgaaacaagttcaccggattgatcagcacgaccgcaccgtctcgtattcgattgcaaacagtaactcgccgcaccccgcttgaaatcgcgaaatcaaaatcgaacgagaaccctctcggaatcaaacgcgagaccttcctgacggtaaaaaggcgagcaaaatcgagacgcgcgcgttatcacctcggcgtgacgaccacatcggagtcctaaccactcgcggagtcacaacacacaacccacccaatcgccttatccaaaaaaaaaaaacaactcctcccaacaatgaacagatggggaaaaaaattcacagccccttctcgaaatcgagcagaatccgatccaccaccggagacgggttgggggaagttacctgcggcgcggccgggccggtctctgcgtccattgcgctcccccccccccacccaccgtgacgacgggctgcaccgcgaagcaagcagccccagatcaaatcagatcaaatcaaaaccaaatcagctaacccgcgccttggcggccgtggggtcgcctcgccggagcaggagagaccacgacgacgacgacgacgaggaggagggggtggggctagcaagaggagagaagcttccacgcggcgcctggttttatagcggaggagagcgcgcgcttggagagctcacgtcgccgtctcgacgaagaacgcgtaggagcagcgtggtgcggcggcggggaggcgggggcggggtgggccccggcgcagtgggttttagggcggggcgggtgactggagtgtggggtcaggagatgctgccgccctgcgggatggtgggccaggggtggcagcgagacgtgtgttgccagccgggccgagaggagcctgcccggtcgtggcctggaccgtggggccccgtatcacgcggacacctagacgcacgggtgcaattttgacacgagcggctgggatctggtgtgccgtagctgacagtggaccaacttgcggtcaggatgtactccctccgtaaaaaaaaaaacaaaaaaaaaacactaaacgatagggcacagtacaatgaatatgggcaagacgccaaaaagcgacctcttgcgccatggctgcgacaacctcagaccaaatgcaccttccttttttttatagggataggcttcgtggttcatctagataataatcaaacacccgaataaattgtgcttggtggcaccttgtatagtttattaaacacctctctgtagctatactcccttcgtggctctgtcctagaaaaaaaacttgtgaatacgtatttagatatggttagaaattggtttttttctgaataaataattgttaactactacagttgtatgactgtagagtcggttgaggatgctcgtgagagcttacatcaaaaattggcgttactcatctgccaattaccaacgagcttataatggttaaaacctacttccttggtccaaaaaatcgaatctaggactggatatgacatattctagtataataaatctgaacataggtatgtccagatttttagtattagtatcatactagaaaaaatgcccgtgcgttgcaacgggtaaaaccatttttgtattgatatacattgtaccttttggttttggataaaaacttattttcttccttcctattcagtctcggcccaacccgctacttctctctacttggcttacttcttttgaacctagaccacaagtagagctataggcctatctcgtatagtcgactgccgtgttcaacctcgaagataggaccgtgtagtatgatgccagaaccaatactccccatcaaatacgatccaatctttctcaatctcctaaaattggttgagtgctcttattcactcgatcttttctttccgtttttatcaaaaccgcagcgaatccataaaactctaggatataaatggtgacttctaaatatagagattgaatctgataaattaaagcggaaataaaagaaaaaattatggggaaaatgatgatggagtagtggagaattgatttttcaatcaattggaggagggaaagcatgagaaggccgatcgatgtggcggtggtgctagagttcggcccgacgacgaaaaaaccgggtagataaaaaaaaagaatcctcacaatgtgcacagaccctttctcatgacaaaaattgcgaataaaatataaggacaaaaaaagcggatgggaaaaaaataaaagcggaaaaaaagaagaaaaaaaaggcggataaaagagagggacttttttttgctgttttataatgtgtttttttctctggtaatttttacggtcttttttctacaccgttttttagacgacagtttcttttttcgcgtggctttctttattttttttacgatcggcgacttttatatttttgtacagtcggctttttctgtttttttcagcttttttccgccacattatttttcccgtttccagtccggatcggactttttttcgctgtttttctttcgcgtttcattacgatgcgttttcttttcccgcatgattttttttcaccctttctaaaattatggaatttaagtagtagagattaaaactgaaaaaagtattaaaacctactcaaatacagatgacgtaccaaaatattggcaaaaatatcttaaacttttataatatgtaaagattaattactaggttattttttataggagagggagtactctacatagttagtgtggacgttctaatacgatggaagtatgatcctcggttgctgctaccaacagaacttgcaagcatattcaatccgacacctcgtttgagcacttgaagactagggctgtgtttagatataaagtttagatccaaacttctatcacatcaacatgtcatacacataacttttcagccacatcatctctaattttaacaaaaatttaaactttgcgctgaactaaacatagcctagaattattaccaaaccaaatccaatcgtgtctctttaatatatctgcacgtttattctacgaattcatagtagtagctctataatctacgtacggcttctttgccacggaatattatgatgaccattaacgatcaaactaatttcaacctgtggtcaaaaggccatcatattccgcgtgaattaattgagctgctttttcagatgaaaacgaagataaaaggtgttaaacactcagactccgtgactatacgtgcgtgtactgaactccaaagtccaaaaacgtcctatcttaagggcgctcgggactgaatcgtgcaaaattctgatttgttcatttagtttttttttttggtcctagcggaacttgattcgaatagtcagatggcgtgtcctaaccaccttgtcaaaaacaattccggccacataatgaccccagtgactccaagagccgtgatataattaataataagataaagtacagtgctcgtgagattgactacaggatcgcatggaaccaagccgatctcacaaattagattggaaaactgcaattattgagttaatatatgcacagcatatgtcatctaaaaaaggagtatacagcacaggatccttattttaaaacccttttgacaatgaccagcacgtttcactctactacaattctcttacctccgtcgttttccacgtcgtgtataatatgttcttggtcaaaaaaataacaggtgctcgctgatttattttataccaacatttatatattcttcaagagtttcgagcagctcatatatcctttttagggtgtgcttaaatgaagtgttcggcagcatggcaatatagaagatttgtgttgttttcgcgtgcacgcttttcgaattaagatgtattttttaaaatatctatggaaaatttgattaaaaacatatactaaaaaattttaaataattaacactcaactaatcttttttatcaaaacactcaattaatattgcactaatgcctaacctcgttttacttattttcctaatttttttattttattacctctcgtacacacactaaggctatgttctttcctcatgattgggaacactttcctccagcacggaaaacaaagtagtccattatcgcgtggttaattaagtattagccatttttttcaaaaatggatcaatatgatttttttaaacaacttttgtatagaaactttttttaaaaaatgtactgtttagcattttaaaaagcgtgcgcgcagaagacaagaaagaggggattgggaaccctcaggaaggaacacaacctaagaagctttaagctttaggccctgtttagatcccaccttaaaatttttcaccctgtcacatcgaacgtttgaacacctgcatgaagtattaaatataggctaaaaaataactaattgcatagattgcgactaatttacgagacgaatcttttaagcctaattgctatatgatttgataatatggtgctacagtaaacattactaatgacggattaattaggcttaataaattcgtttcgcgttttactgacgaattctgtaattagtttttttattagtaccaaaatacctcatacgacaccctatataatacccgatgtgacacgtaaaaactttatgccggtgattaaacaccccattagtgccagtacatactacgtgcaagtggagtaaacctgttctcctggcaggaataatgaattaattagttgcacatgtgaccagtgtgtgtgcacgtgaaggagtagatcacagctaactgaacgacggctgggccggggcaacaacgcgattggcacgcggaatctgcaggggattggtacatgaagagatgagagagcccttgtcgccacgacgagacatgcattcgcgtgtgacgtactctcgcagtctcgctcgctcgcctcatccgtggaagccaaccaccgagcagggccgtgcttccggac

SEQ ID NO: 5462 - DNA, 25130 bp, Oryza sativa
tagcctatgtgagttcttcatacattgatatatataggcagttcaaaaagttctggtttcgagagtggtttatcttttatagtgtatcggatgagttcacaatctgttatctatgtaataacaaattaaactgttcactatgatggtattagcaaattgcacccaacaaatctagattggatatcataaacgagcatattggatagattttggcaagtcataattaagtttggtttgaaggtgacttgtgaaatgtttgtcgggaagatcttttttctgtcttaagtactatacttgttttacatcctgttgtgatgttgctcatgaattctgctgcataaccttattgctacatattcaaatggcaatgccgttatgtggagtcatatggtgatgaaccaactcattccattccccaaaaccaaaaagggttaggtttgggattagaatctaatgaccctaaaaccctgaagtgaacacctcataacttgatagtacgttacttacagtgcgtcatgccatcgattacagttatgatctgatgactctgtttatattcttagacaaatgatgtcaactgtgccttcgatgcaactcggaaatcacagatggcaattgcttcggctgctagcaaccaagaaaatggaatagatggtctttcttcagtaaaaacagttttggattttaacttccaaagtgtgaatgatctactaaggctcgtgcggctttcaatggagtctatcagctgctgacatgttcagaatccaggaaaatgacatccctttacaaggtgctgttggatgtgcattccatatttgagtaatgtcccagacttgccagtagcatttggttgaaaagttcaactgtgcgaaattcataggtcttctcatttaagtgtgctggttaatttgtacatgaagtgtttgtcttatcttctattccggaggcctgtttttacccattgctagcatctagttggatggttttatccatgagggaggttgctgaagatgtgctttgcagattgcactgatcaacttgattttgggcaagactgcctagttacagactgcacttgataagcttatacacaatgctactggacagcagctcctttgtagataatcttctttcctccatgctgtaaatgatgtattttcgtcatggagttgacttatggttgaatagtatcatatgttcctttgagaagggcaaaatggtggtttccacttagcaattttgatggtacgtttcagttacaaataaattaagttcaacacactctccgcaccactaatgcttatgtaatgtttgattctttagcaggtcagaggacaaaagtgttaattagtgtgctaaccaagaaatcagccagtggtgtctctttttcagtgccacttctggataaagttcaagcaggtaccttcactgatactatagtaccttagtacattcaaaccttgcacctcatgatagtgcggaataaaatgacttcttgaatgaattggtctcatgctattctgcaaaggtgaaaatgacctcttcattgataccatcctaggttgtataggtaccctgtgacttttgcagtaaattagactatatgcttaagtgctgaaataagaacattgtaattccttggttcttctttctgtaatgctttctactctgtagggttatactataatttacatatgcatgcacagcaccaccactgtaaggttcttcgacccaaaactagaactgaaagttaggaacttccactatacagatggcagcacctgaactgaaaatacattgattaccattttccactccttactcctaacagtaatcagtgatgtttgtcttttctttttcagatttcaaacaagaaatcacttggaccatcacatgtgtatgaacaatgtacaaagattttcatgtacaataggctaactcgttccttgactatcagtacgacgactataaccagcgcgtgtacatgtatatatacccgaatggtcgaagcgtttgtcttgcgtgctggtacactcgtgacaccaatgtacttttagtccacatttttcttctggcaaattttgttagtttcacattagtcgttgagatgtgatagaacttatctggactgagaatgtgttgcagaatgcaaaataagctctgtattctgtactgtttgtatcgcgaatcgcatcttcagttcagttgagtaaagtgatgctaattttagttatgcaattatcctttgtttattctgcaaatgaatactgtggcggcaacgtaaatctgcatgtccacgaaatcatgctaaaaactactcacatggcattctatatttaaaaaatgtgcctgctcgatcgtatgctgcaatgcaaatgtgtgtgtgtgtgtgtgtgtgtttttttttttttggtgggggggggggggttacaatttcgatcagaaaaatcatcatatgctgcattgcaaacttgttaaatttggggttggtttcgatcagaaaaatcgtaaaaagacagttatgcaccacagttcggtttcgattaattttatactgatgtatcagatcaagatcatttccatttgcgaacaattcttcagaaatttcatctcccagcctaacacatcggccactgcgtatatctcttctgtacgcggatgcgtcgtgtcgtccgacgaaaacttgtgcaaatgcagtgcctcgccagcgccggcgtccacccagctgaacccgatctccttcttgacgcctctgtccctcatcttcctcctcaccttggcgacgccgtcccagtcgcccacgtcggcgtagatgttcgacaggaggacgtacgcgccggactccgtcggctccttctccgtcaaaattctggcgatcctctcgccgatctccgcgtcgccatggattctgcaggctccgagcaagctctgcagcgccgacacgctcggccccgccggcatccgcatcatgagctcctcagcctccgccagcctccctgcccggcctaacatgtcgacgacgcaggagtagtgctccggccacagctcgacgccgcgatcggcagccatcgagtcgaagatgtccctgccggcgtcgaccatcccgccgtaccggcaggccgtgaggacggcgaggagcacgacgccgtccggtgcgacgccggagcgcgccatgtcgccgaagaggctcatgacggcgccgtagctcccgtgcctggcgttcgccgagatgatcgccgtccaggcgatgaggctccgctgctccgtctcgtggaacgccttccgggactcttccaagttgccacgcttcgcgtacatgtcgatgagggcgccggcgacgtactcgctgtcgccgaagcccatgctgagagccctggagtggtacatctggccgtacgccatggacaccgtctccaccgcggtcaccgcgctgaggacgctcgcgaacgtggtctcgttgggtgtcaggcacctggccatggacgagaagagctcgagggcgtcgttgcaccggccgttctgcgcgtagcccgagatcacagcgttccacgcgatgatctcccggcgaggcatgaggtcgaacaccatcctcgcgtcgtccatgcgacgcgccttggcatacatggtgatgaggctgttcgacgccgccgcttcgccggacacggcggccttgaggcacgccgcgtggaccatctgcgctcccctcgccggacagtccgctggcagcgccgacatcagcgccacgaaggtgacctcgttcggcggcacgccgtctcgccgcatgccattgaacagcgtgagggcgtcctcgccgtccatggagatggccgtggtccatgacacgacgtcgcgctcgctcatggcgtcgaacagcctccgggcgctgccgggagcgccgcacttgtagtacatcgcgacgagcacgttgccgatggagacgtatccctcgacgcccagcttcaccgcaaagccatggacttgccggccgagctcgagcttcccctcgccgccacatgccgggatcacgctgcagaccgatatccggtcaggctggacgtcgccgtccctgagcatccggaggaacacgccaatcacctcggccgggcagtcgccgtcttgcgcgagcccgcagatcaacgcgttccatgagacgaggtccctcgccggcatatcgtcgaacacactcctggcctccccgagagaccctccacgtgagtacgcagtgacgagcgcgttgccgacgaacacatcagccgcgagcccggaccgccaagccagcgcgtgcagctgccgcacgaggaagccctccccccggccggcggccagcgagagcgcgacggtgcacgtgacggcgtcgggccgcacggcgccggagcggagcatccacgacgcgaagtcgagcgcctcggccgggtcagggaacgcggagaggatggtgttgtaggagctgacatccctcgcccgcgccgcggcgaacaccccgacggcggaagggaacgacccggtcttggcgtagcgggcggcgagggagttggtcacggcggcgaagccgtggaggccggtggttacggcgacggcgtggagcgccgggagggaggccgggtcggacgccctgacggcggccgagaaggcgatggggttgacgcggcggtggcgggcgagcgacgggtggggaattccgtcgaacgggtggtgggcggcagcggtggagagcgtgcggatccgcagccgccgtagtggcatctagtgtagtttttcaaccacggatttgagatcctctcactaaagtcacatgattttgagtcactgacatgtgggccctctttgttatggacccacatgccagagactctagtaggataaaagcccaagggccaaacccctcctcttcttcctccggtctctcgctcctcgcgcaaatctccggtcgctgcagcccttcggccatggcggcgtcgtccgtgctgcagcctgcggcggccgccgccgcgtggccgcgcttcctcccctctcctcgccggagcgccgcccaggtactaaggtttccttcacttcttaggcctgcaactcctgtttcgtggcgtggggcaggcaattcgtcgaatggcttgtggttgggaagaaatcaagaaattgcagcgcagcgacagtaaaattctagggtaattggctaaggtagtgaagatgctacattctcgggaacgaatcacctgaccgggctgaaatctgtgtagtgtagttcaaggcgtactgtaactttgtaggtgcagtttgtggtgaaaattttccatctcgtgtgttgtttgaaacatgaaactagctcagtcttagcttgaaacaacaacagaacttacttcttggtgtagaaacgttaggtgtgttgtgactactgactagtttcccataattctgtccccctttttggccttatccagttgcaatgtaatcttatcagatgtttctttcaggaagagttgcttgatacactaacagttcaacacaatatccttttgatgtttatgttccttgtatacaattactctgaatgagaaaccccccatttcatattataagatgctttgatttttttctaagttaaacttccataagttcaatcaagttaaagaaaaatatagcaactcttataacacgaaattaattctattaaatctaacatcgaatatattttgattatatgtttgcttgatgttaccatgtttctatgcttttctataaatttgatcaaatttaaagaagtttgatttagaaaaaaaaatcaagtgtcttgtaatatgaaaatggagggagtaacaccctattagcatccctacaacaaatcactgattcctgaactattttgtggttaaattaaaggcttctgaatagttcttatttatatccgaactctcagatgtgtcatttattcttggaacagacatatcaagttctttccatgcacaagtttgagtggaagcgccctttcagcggtaggtaccaacattcgctgcaatttacaacattcagtgacaggactggagttgtaaacttgtaattcaaactttggtttcacatcgttgccctgaagtgttgagataaattttgtgactgcatctgcaggttcacaccggtccggtattcttcttgtttgcagaagttcaggttcctctgtaaaagcagctacttcaagcagacccgaagctgtttcctcttctcataacgatcaatccagcaaacatttatttggttctgtttcagatgcttataccattatctctggctattggattggccctgatatggatgatggctgtggtaatgttgtggccattctccaaagaattgtatgatactgcatttgctgttaaaccacatgaattttctggcgtttgaagataatttttatatgctagatcatcctccacattaaagtatatccataaccttttccaaacaatgcctatttgcccggcgaaaaaaataatgcctatttctgatcgtattatttcttatatgaatcaatgtgccactgcaaatggtttaatcatgtgtcattattggtatgtttgcaaaatgtattgttagattctattccagttggcctaaaagtgcaggcaggcttgtttaaataagatctgagtgggatagaactagcagagtcttttgttacaagctacttgacacaaattcacagaatcacagtgatatttacatggtactattatgaaagataattaagaaacgacttgccaaagcaagtcttctcgtcaacttagcatatagactagtcactgaaagtgggcccactcacctcctatatagagcagtgtacacctggagctggagctcaagctatagctcaggtgactgacaatggcgtacagggccttggaggtgacgctcatctcggcgaggaatctgaagaaggtgaacttgatcactcccatggaggtgtacgccgtcgtctccgtctccggcaacccgctcgcccgccagtgcacgctccccgaccgccacggcggccgcaacccgacgtggaacgccacgctccacctcgccgtccccgccgccgcgccgggcgcgttcctccacgtcctcctccgcaccgagcgcgccctcggcgaccgcgacgtcggcgaggtgttcgtccccgtcgccgacctgcagctcgccgccgccgcgcactaccagtacctggtccacaaggtgcagagcaccaccgagcactgcggcgtgctcagcctgtcgtaccggctaggccccgtcgtcgtgccggcgccgccgctggcagcggacaccggcgctgtcccggcgtacctggtggtgccgtgctacgcgaacgcgccgccgtacgtctacctgtcgccggccaatcctgcccgcggcgaggccgcgtcggcgtcgccgtcgccgccgccgcggcgcaagaggagcggtgactttgggcagtggctcggcggcgccgtccggggaatgttgtccggcgaggccatgtcgccggacacggcggcctacgacgccgggtacaaaaccctgatcggggtggctgatggcagacgtgtcaagttctagctagtaggagtactattccagattagcgtggcttgaataaaatggaaaaggtttcttatgtactttttgcatggctgggagactaacttttgtacgaggaagtattgggtggaaaccgtggtagaaacttaaaacttggaaactaatgttggatcgaaaaatggacgtccgagattcgtccacgtcatcattagtaaaaaaatttactacttatgaataaatctatgagtaaaatttttactcgtgatgacgtggtcgaatctcgaacgtctatttttcgatccaatagtagtttctaactttccaccatatatatggtttccactgtatatttttcctctttttactaatcagtagcacgttttcttttctttcttggaatatttatgcattactcgtcattcaacaaacatactctgcatgaaaattcatcgccgatttatttaggtcagtttggacgccttaggtggacaaacgagaatcgacagtcccttgttgatgccgttattccaaggagcgcttctgatagttgtgattttttttctactctacccattctaaaatataatatttttatgttatttagcaaataataaggttaggttaaaaaaattccttttcaagtcatttcatttgttaatgttttttatattttgaattggtcagactttctttctaattggcttcaaaaaaaatgatgagaatcatgagaataaatgcataaatgcttatattgtgatatactccatccatccaaaaatatattagtatctagcctttaaaattgatcttaaaatataacaacttctccatctgcattcttttctcagccaatcataatatttcaccattcaaatttcctacacactttccctcaaaaaaaaaatttcctacacacatccttttctcaaccaatcataacattctccaaatttaatttcatcaactttctaaatacccgtgttcaaccctaacaatctctaattttatgacagagatagtaaaatttgaatcctaaaaacacctatattttactccctccattttatattgtaagactttctaatattgcctatatttatatagatgttaatgaatctagatacatacatatacatatgaaaaggaggaagtagaacggaaggagtagttgttatagtgtaagttgttgcaagataattttgtatactcatgttgtctagtttttttcctctaattttttttggggtacatgtatttttttagttgatgcaaagggtggggaatttttattcgaccattaatgaaatatttcattgtctaaaacaattcaacagatatctcaagatttcaaacgtattttgaagttgtttgattcacgtatatccaccggtgtcaatgaggtttaagtaaggcttgagcaggctccagtgccactgagtaattaactgaccaaaaccaatcaggacacagaaatcaacctgctaaaccacatcagaaaaaataacaaattgaaggagacagcagaaacaacatgcatatgttcttgcccgctcagattatttcctctggatatagatgaatcaattctgtccatcttgcatgagactatgtacagtcatacagattatatctgaagaacttgctaataataccgcatcaacattattcacgatcgagcatacgcaccccggcactaatctgccgaagaccggtcaggattcggtggttaccaatctgtctcgatcggtttggcattattcccagtgcagtgttaccttgagcatctatatcattctcatgtaattaactggattcaataaaacttccttcatcttaaaaaacctggggaatcttcagttttgcatcattcatgatgtcatgatgatgatgactcaattggaagtttggaaaaagttttaagataaacacagtaattcttcctgattcttttacggttactctctagactccagtggatttattctcaggagatatttatatctctcatcattcaagaaaagatatttctgacgagaacatcttcagttaaaacaaaaagaaaagcagttacactttcactacttcctatagcacattcgagcagtaaagccggttaaggaaaacaactccaagttaaaagaaggaaaagcagttagactttcacttgctacagcacattcaaaggctgagtagtaaaaaagccaaaaactcgcatcttcagcaacacgcgaaagaagaataaaccatttaaaaactcgaaaaattgagccagacaaagatatggtatcgatcctctgctatgataatcatcgaaaattatggacacgcagcactagaaaggccagtcctgcaagaactatatcctcaagctatcatctatccagcatcagatgcctcctgatctatcctaccattatattcaaacttatttgataaaaaatctaactgcaggaaacctccccaatcagggagagtgatgataatatgtaggctgctcgattattctccattgaatatttgaatggctcaacaatccggaggtgttgctttgtggatcttttaggaaaaagttattccgatctctacactaattagaaatacacatgttgtttaattatagacattagaattcaaacctagtaaactctgcttcactaatagtgcgcttttatgtacttaaaatggtccgttgaattatagatattagaatctaaacctggtaaactccgctacactaatagtgtgctatgtacttaaaaaggtccgattggtggctaataagctcgcaccaataagttattactcaaattacgtagttacatgtatttctaatataactagtagtactagcaaatatgatacattatcactcactagtaattactattatagagcatcttaaatctcatctcatataaatatgatacgcataattatatcaaatcatcatcccgttcacatcatttacacagtatctcaacatatatccatctattatttcaataatatttgtcataaattgatccatacatatcatagtaaagcgtgggtatcatctaattacattaggttgaacattcatatttccaacgatactcacttggaacatgtttgaggatgattctagttgttataccgtcttttaaaatcttcaatcaccctaaacagtttagattctcccgtagatatcaaattctataaatatgtaactgtacaatctagaaaataagctagtaaaaaccaaaagataagaaaccctctttctatattctcgttagctgattaccgataaattgcttctcaatatttttgactccttaagacatttctaacccaatgactaagatagtattcatagtattaaataagcagccacctaaaatgaaaaatgatgtgacaagtgaataaatgaggaaagagaagaaaaccatgtcttacatgagacagagtttctacacaacatccaagacatcatgtgatataatttgcattaaatttgagtatggaatagtggtatttgcattgaaagagtagtgtctagtattagtttcttgatgatgtgaagtttatgaaaactgtgtctagtgtcatgggttaggaatggccttataacaagtttctagttcctgctttaaccaccaactttctgccaaactttggtactttaggtagttttggaatattacaagtgggtcccactccacctcttatacatacacctgcatgctgaagctgtgaagcataccatcactccactccatcacctcctgcttgagcaagcaagcaagcaatcgctgcagccaactgttcgaccagagcgagttagccatggcgtacagagttcttgaggtgaccctccactcggcgagggacctgaagaacgtcaacttcatctcgcgcatggaggtgtacgcggtggcgaccatctccggcgacccgctgacgcggcagtgcacgccgccggacccctacggcggccgccacccggcctggaacgccacgctccgcttcaccgtcccgcctaccgccgcctccgccgccggctgcctccacgtcctcctccgcgccgagcgctccctcggcgaccgcgacatcggcgaggtcatcatcccgctcgccgacgtcctctccggcccctacgacctcggcgcccgcccgccgcagttcgcctcctaccaggtccgcaagctccatcgctccgagacccgcggcgtgctccacctctcctaccgcctcggccccgtcgtcgcgccgcagtccgtcttcgcctacccggcgccgccgccgccgccgccgcagctgttcgagaccgctcctccctcgccgccttacgttcccccaccaccggacgcctaccttcgtaaaccgtcgccgccgtctccaccacccgccaagctgtcgccgccgccaccgccacagacacagacacagccgctggcaaagccgccggcgccggcgacgccgtcgcgagctggcgggcacgtggcggcgctggcgccacctgcggtggcgaaggccgacaggcacgtgtcgacgccgtcaccggcgaaggccgactggcagatggtgggcacgccgacggcgacgaaaggggcgagcaagcatggcagcctggagttcgagcgggggctcaacgccgggctggtcggcggcgccatcggcgggatgctggtcggcaccgagatggtgtccgacgcggcgttctaccacgccggctacagggccgggctcgccgaccgcgacggatgggccgtctactaaaccgtcgtcgccatggctgcaggtgcagcgccatgcatggtcggtcggcgaagatgcttagctgaataaaagtctctggttttctttttttggccttttgagattagctcaataaaagtcgatgaaatttactttggctgagagtttgtaactcttcctcttcggctagtgaattaatcgacttgttgtatatattttgttactggttatgatgtaatatatggccacgaaaatccaagaacatgacatgctcattagaatggcttttgagaaattaaaaaaaagttcgaagaaaatctttgaaaaggagtcgggagttcctgcttttttattatggaagaaagaaaagaggtaacccaatttgttaagaaaaatcggaccctaaaactttatcattgtacgattaacttaagaaaaaccggcaagaatctcaatgaagaaaataacaggactactcaaagacggcataccactataacctagcacccttaggactaaagtaccgatataagtcatcgttgtcaagcttaaagtataggagtacaagcaactccgacttcctattacaaacaaaagccaacgatcacctaatgtagggagcgtgcctaaactctaggaccatgaaagaaaaaccgcaacgacgcatctaagaaggaaaatttatggtgccggtgacatcgcctctaaggaagaaaggagggaaatataaggtgccaatagacgtcgatgtcaaaggctttcatccaatattctccctgccaactacaccattcacaagtgcctcctctatatcaggaggagttaaatgttatcattaccaagctcatcaacccacccccatccatggtcatgacctagtctcgttggatttgtgcaccgctcccgactggctttctacaacattatcgctgccaccaacccgagcaccaagagtcacttagagccagggaggggagagtcgaggcctttgccgtcgccttccttgcaaccacagtggtttccggcactctgctccggcggtggtgagaccccgggcggcaaaatttaaatttgaaacagtaaattcgataaattcgatcaaaatcggttcaaatttcctggctcccaaccccgatatctcactcccccgccgtcgttgtgaaccctgctctgctgttcatcagttgtagacaaattcggactctgttccaaaatcccagtcgatcagttaatccgagacagttcagtatagtgccagcaaaatcagctaaactccgtataatagcaatcggaaacagcaaagcaagcaagcaagcccgaaatcgacatgcttaccaacacgagttcgagtccacttccatgcacgaagctatatatacatacatggatgcatcgagcttttgttgccaaaacaacggaactttccatcgacgatcttgctgagaattgctagctcgatcagctccgatcgagatcatgatgacggcaactactccccccgccgtcgccgtcgccggcgagagcccgccgccgctcgtgcacctcgcatttaacctctactccaccggcttcatcgccgcgacggccaccggcttgcgcgtcttctcctgcttcagctcgccgctcaacaaggtgttcgccagggacgtcgaggtgtgcccggaggacgacggcggctgcggtggcggcggatggaaggtggcgatcgccgagatgttcaacgaggcgttcgccgccgtcgtgttccggcgggagaagggcggtggcggcggcaccgtcgacaagatctgcttctggagcatcccgaacgggcggatgtactgcatgcacaagacgctgccgttcgacggcgccgtgcgcggggtccggctggtgggggagttcctgctcgtcgccggcgacgagagggcggcgctgtacgagctgccgcacgccagcgcgccgccgaagaaggtgaaggtggtggagacggcggcgaacccgctggggctgggcgcggtggtgcagcccgacgggaacgcgcggttcgtggccgccgcgccgcagaggatgaaggggatggtgcaggtgcaccgcctcgccgaggaccacgtctacgtgcgcgcgcactactcctccctcgccgccatcgcgctctccgccgacggccgcctgctcgccaccgccggctccaagggcacgctcgtccgcatcttcagcaccagcgacggcaagctcctccaagcggtatgtgcatatatatggccctgtgctctgcttcgttttcaactttggaatatactcccccgttccagatcattagtccttccttttttattttggtcatagttaaactgctttaaatttataaaaaaataataatatttttaacctaaaataaatatattataaaattatatttaattatatatttaataaaataaatttggtgttgtaaatattgctatatttatttatttattataaatttgattaaatttgaagtagtttgattttaatcaaagtcgaaacgactaataatatggaatagtgggaatatatcgtatatctttatttttttccccttagattgtttattttttcaagtttcatattacagtattgaaatatggtttgcgaataactttacaagaccgttttgtcctttatttttgttagttttttaagtatgtgaaattaatatggcgtttgcgaatatgaaaactttttgggttaaatttgctttagttaactgatatttagttttaatgagtatacttactaaatatgccttgtttgcgaatattttggtttagttttcgctagttagttgatcggtatgaaaatgggatactaacgatctctgtgatcgttacatttaataaccaatataaaatcttaaccggccacccacaactaactaaatacaaacaaccacgcgcggcggcggcgcacgtcgctctgctatggcgtcccaaaacccaggcgacggcggcgacgagcaatcgccaccgccggctcctccgtttccggcgcgccccacctacctatccttcagccacgacgcttcttgcttgatcgccgccgacgaagcctccgtccaatggcgctgctgcgagaccttcaagctgcgcgggctctacgaggagagcggggccaccgccgccgccggtgacatgcgcgaccggaatcagtcgacgtgcgccgtcgtccgccgcgccggcgcggggtttgaggtcaggcgtttcaggccgggctccctcaactacagctcgcgctacgacagcgtgcggatcggcggcggcgacgacgacgacgacgtgcggtcggtgcacgtccacggcgaccggaccgtcgtcgtgcacgccggccgcgtggacgtgttcggcctcgacgacgggaggaggaaggcggcggtgctgcagcggcgggtggagaccggggacaaccgggccggcgcctgcgccgtgtcgagggggccgcccggctcgccgttcgcgttcgcgtgccccggcgtgaacgacggcaacctgcgcgtcgagcggtgggtcggggggttcacgccgctggtcatcggcgcgcaccgctggcgtgtcgcgagcgtcgccatgtcgtggggtgctaagctcgtcgccacggccagtgtcaagggcaccattgtgcgtgtgtttcgcgtcgccgacggcgaattgctccaggaggtgagattggcggcggcgccggcggctgaagcaactgctaaaaaatctaaaccccacaacactgaaacaaaatctctaaccaaatttagagcatgcgtaaaatatttttcaatattgtttttatgaattttaggttttttatttattacatttggtttattgttttgtattatatgcgcaatatcgtttaatttagctatattaggattgcatttttttatgatacggaggggtatgttactgtgtttaatgtaaacacctctttgtttagtccatttcttgtattactatactataattttttacattttattgttcaccaagtttttcttattgtttatatattacatgcacaatatcattttatttggtaacaaatatcataatgttaaaagatgcttttcatccatttctagatgaaaagaggcttcgatagagctgatatctacagtattgtcttctcccccgattcagagtggcttgctgtctcgagtgataaaggaaccgtacatgtttttcatatcaatgtttgttcgccatcttcctccaaaactggttgccaagatacaactcaatcatatgaatcatatggtgcaaaagcaatgaaaaaatatgtttcttctataaaaggtaattttaattttgaaacttgtttgttagctttacttatcgtaaaaggtaaattgtattttgaaatttttgtgtattattttatttctgactcattgatgattttaatatgctttcagatttacttacattaggatatttcgatccagaaaggtcggtagctcaattccatctatgtgataatgtaaaataccttgtcgcatttggtacaagaccaaataaaaatattgttcttataatcggtatggatggaaggtgagttaaattatgataatattttctcaactttttctttcttagtttagatgaaaaaaaatctgacctctaatgtttgtgcagtttttaccggtgtcagtttgatccagtaaacggtggagaaatgaaacagcttgagtacacgaattttttaaatatgtagggatgatgatctgttcaaaatcagaatatgtattgatattatcatagttgacagagaagttatcatttttttcacttgtcttatttcgatttgtagttaaaagatatttttgccttcatagatttgatttatttgtgtatatagtgtcatcgtattattctctttatagtgtagtgacacgataatatacaataatacttagcacacttgaatcaaacttaattctcttaaactgattgatttaattttagtatatataagttctatttaagttaaaaaaatgatattttgagaatagaagaatactgggataactatgaaacatgtaacatgtagcttgaactatgatgttcttattattaccactctcttcctcgggcttgtttgtttggatattattagtgtatggcgtcgtgatagcgggctattaaaacgttgacacatgtcaaatctagctccgaaagacaagcaaacagtcgattcgcgacggttgccgagaaagcgacgatctatcaagcgcaacgccacgcctatcaatcctaaatggctacgaaacacaaatatcccctttgatgtgtgcttgtgtacgtatatgtatgcacaataatgttaaacgtgaaaaacgtaaataaatgtttgtgttgtactatgtatcttcctaacaaccagtcgagtgcaagtgtgcaacaaccaaggggtcattattactgtagattaataataaccgttcctataacaagattcgacacgaaagtgttcctctaaaaaaatcgacacgaaagagatctataataaccaaaaaaaaatagtaatattaattggcgcccgcctcctaattttgctggtaaaaaaaatataaaaatgtttttttcgattacatggcagacgcagatgcgtgcgcaccattatgcacgtgacaccacactcggatcctaccgattaaatatgtggttttatgatactccatcttaaatatgtagttctgggataaatttagtggttaatttgtagttttatgaaacatcaccttaaatctatagttttgtgataatttagctaaaatattatgaaatttaatcaaaactttaacacggccaatcaaataactaaaaattttgttcatcaacaacaataagcatgtgctcttaaaaatataggcgtaccaatagatacactgattttctggtaggataaaagggatgggagatgattttctggtaggataaaagggatgggagattgagatataggaaaatggatgaagggttaagatgtactacaccgaggttagaagaatgagtaagattaaaagataccctttagccttgggatttggaatattttaatcctatagataaaattcctagaaaacctggagaatttcaatactacaggagaaattcataaggtctttgaacaaacatttgaattaaatcatttcctttataagtattcctataaaatagataattccatatagattacggagaaaaaaatatctcatgtttttttttcttcctgcaaactttaaatcatttttttgaacattcaatatattgaacattaaaagcacaaaacgtgcactggagatacatgattgtttttccaaagagcagcttgtaagagttgctttgtaggataagtattgtcattacaagtatgactaatattttgataattcagcacttcagattcaactttaaatcgttgcgttcctcatttgtgtcaagtagaagtttcctttctttttttttaatttcgttaggaattcaataagcatgttattccatttctatattttcttctattttatgttttttacatgcgttttacagggttgcttagtgggtgggatgttaacgattccgatatggcactaccgttccgaaacttggcggtacgacgtatttcacgtaatccggtggaaaaccaatatattcctaacaaatttcgtgaactaaaatttaaacacaaatccctaaacttactgatacattaaaaaatcgatcagcttcaacgaaatttcggttgaatccatcgaaatcagatcgaaatagacagactctgatcgactgccattatccaaacaaagtctgatctagggctgtcaacgagccgagcttgagtgagctcgtctgcctaagctcgagctcgacacaagctcgagccgagctcgagcctattccacattcgagcttttaggcaagctcggttcgagctcgttcgagctcgagctcggctaccgagctcggtcataagtagtataatatatattttaatgataatcttttgataagtataattattttctagttaatcacactaataaaagagtagaaaatgattaaaataaatatattatgctaacacatgctaatttattgtgtaaatagatactaatatatatatttacctattagtttattatattaataaggtgagctcgagctcgtcttgttaaagctcgcgagctttgctcaggctcgggttcggctcgtttgaagctcgagccgagctcgaatcaagcctagaacgagcccaagctcgagctgctcgcaagccgcgagctttttttttgacagccgatcgattgccatgccatcccacccaccgttcgttggtttgatgatgatccaacggccaccaattaaaaaccttgtagccaaaaaagaaaaaaaattataaaaaccaagaggtcgcgcacccaaagccctagtcctcctccatccccaaactccgccgccgccgccgtcaccgccgctcgccaccgccgcggccgccatgagggcgctcgacgagaaggagacgaagatggtgttcgagaagctgttcaagttcacggggccgaacctgaagcacctcctggagcggccggcggtggaggggcccgacccgcaggccgggcgctactgcctccgcctccacaagaaccgcgtctactacgcctccgaggcgctcgtccgccgcgccaccgccgtcgcccgcccgcgcctcgccggggtcggcacgcccatcggcaagttcacccacggcggcgcgttccacctcaccgtccacgccctcgacctcctcgccgcccacgcccgccgccgcgtctggctcaagcccgacaccgagcgctcctttctcttcggcaactccgtgcccaagtcctccctcgcccgcatcacagagaacaccaaggccaacgacggcgtcgtcgtcatgtccatggccgacgtcccgctcggcttcggcatcgccgccaggtcggcgcaggactgcaggaaggccgacaccaacgccgtcgttgtgctgcaccagtctgacgcaggcgagtacctccgccgggaggaggagctcatgtgaggtgagggctgaggcttcattttactcttgtgggctgattgtatcgtaggacttagctaaccttacatattatgccttcttttgtgtgcaacaattttgtcatttgcttagcatgcgcctaattggttgagatgagaggattgtagatgccaagtttattcaattgcaatgctaattggttgctaaatgaggggtgcttgccccagaatttgtgaaatcaatcttgccaaattccgaggtcgaatcgatgttttgatttcagagttagctaaatgagggagtgtttggaccagactatgtgctaaattgtgtgaaatcaagcatgctgaattctgatatcgaactgatgtttcattggatacttcatcgttttgactgtattttgtgtattagtattgattacatttgtcgataaaccttgtgagttacagctgagttgcattgcacagacattgtcttgaatttggtaatccaaagatcatccttatgcggttatgtctgtctttgtaatgtgttcacctgccttcattgataacttggaacaggaaggattcactctcctcctgtagcatgcattcttcagattagatatatgaagtgggttagaaagacatgttttcagttttccatataggacattgggtgagcttggctgtaggcagcctttgggcgatactgtttctgttatatacctctttttttgttcatccatagtggatcgatgtagaagttagactgatcatgtctaatctatgttcaacatgattggttggatcactattttcttggttcagaatgaatcaaaaggtttcttttttactattcagtgctgatacgagctgtgcatagcattggagtccctacaggcctacactgggattgtgattgtaggtttatggtttgaatatttttttgggtccacgattttattttagttgtagcatgtgcagactatttggttggcctgaattgctgtaactacataaaacagttgtcacccaccatgatactctgcttcttttgttcccaatagccaccaaaaaaaaaaagaaagatatggtggtacaaccaaacgaccctatgacctgactgtgcagtaaactattctttgacgccacataacttctttgcttgattacatggtctgtagaacagtttttcgtacaagaatgaagacacttgtagccatgtacattcggcttaaaagcgattccgattgtgaatgcaattctgattttccagctatccttcttgcaggtgttgaggtttgacacattggcgtgactgcaggactgaaggatgcgcttcctcttcatgcgataattcgaagtttttctaccaccagtaaatgtgcgatttttacctagttttaagatagtggaggtctgttgtatcatctatctagtagaaaaattttgttcccaggctgttctatgggcctaaaagtgttctgttaagctgtaacttatcggtaagctactgcatgactgaatgctgcaggcctgcagtaacatttgatcgtgatcaatgatatacttgtcttatggaccctacggataaaccctgtctgtccaatcttcatcagtttacgttaaaacctctggatttgtacgcattttggctttgataagcagataaaacttacaaataagatatgtatttcctttataggaataatgtgcattgaaagagagacacaatgactgaagggtaaatactgatcgatcagccacagaaaaaaaaaatcagaacgtcacttggcgacacaatcgtaagttcgtaacgcagcgtccgggcggttgaaacttgagaggcaaaagggaaactggagttgcgatgtcataaaccgagtgaaaatcgtcgtcttcttgttcactgcaagcacaatgttcagagtgcacacatacaccatgaaaagaacggcctccccatctcttgttcacatcttcaatatgctcctctgcagaggccagtatgcaagggattggaagctaacgagaaaatttaacaggtaatgtcaaggatacgatcatatcttgctaaaagaccggaaaattttgacaggacatacatactttatgtagtagtataaaattgcacattcctgagaggtttcagcactgatgtacgggtagtggtgtataagtgggtaagccacgaacccactttagattaaaataatcaattcgtgatttattttcgtttataaatgggtttcacgggttagccttagccccttgcaccctgcctacgggtgttaaattaattttcagtctaacatgtaacagcgatgaggctggccgccagcggcgtcggaggacacgacgacaagcacgggaggcaatacagcgaagatatctcgaatcctagccgcacgtttttaatcctccgctctaatcctagccgcacgtttttaatccaacgggagagggtttgcgcgttcgtggtcttcaatatcatgggacatttaattatttgccagttttaagatgtgccaattaatgatttgccacttgctgtttatgacatgtggaccctcacgtgacaaatcatttaaaaccactcataagagtgacaaatagttaattattcccaatattggagtacggtgggggtcggagttttataagcccatgaagcggcccaatatctgagcccaataaccttgaaaccggcgtcctcaggttatccttgcacggaagagaagtctgatgagccaattaaaaaaaaaatcagaacatgagtcattcacaaaggaacactacccaaaaaaggaaaagaaaagaaaagaaaagaaagaggattgagacattcagtatttcagtgctagcatgttgtaatgcagagtccaacagagagttatttttgctgcttttttattggcaggaaagaaattaaacttaatggcgatttcgcttctcagaacagaagaaggcatgacatgcaaatgcaaagactagaggataaccaaacaacatggatgcattcaaggcgctaatatagaggagaatctgggggccttgggggttcggagttttattttccgacctccttcataaacagttgcatcttgctgcaagaaattcagataagtcattgatgacgtataccatgcattattaaatttcatataatcatgtctgagaggtttcagtagtgaactagcgatggatgtcaaatgctgagtctcccgtgcaacagagatgttggctttgccttcgccggtgtttcagtccctttgctgatcagccatagaaaaagttcagaacatgaactcattcacttggttctacgaggatgaattcagacattcagtgcgtataccgtgccgtaaactcgtaatgcggcgttgcggtgcccaacttagaactgattttgctatatctgaagtctgcacatctcacacatagaaaaaaggggggaaaaaatctgtggacgagggggttctgggttttgttctccgacccctgtaaattgtaagacagccaactaaactcgcagtaatctgcttatgttgtgttcgtatgtctactctctcagattttttttggtgtctgctttcatttccttgcaccgaagactgatcagcaactgaaaaacaaaacaagttgagaatgtgatttggttctacttgtatcagaggggaacaaggggaaagaaacaatcaccgttgctccactcttacgtcaaaaaaaaaaaccgttgctccactcgaatgtgacgattgatcatcatgcaactgatgcctcgcttttcagaagaaggcaccacatgcaaagaagctctgaatctctctgaacctgtgaatggggttcggagttttattctccgaaccccctaaacaaatcgttggattaaaacgtgcggcgccaaatccttctccgtcgccggcggtgccaatctcacctctactcctgaaatactgaaggtggccactctccctgatttttattttgttgctgtttgttctcagtttcatgcgcagaagactgataaccaactaaaaaaattacggtgactttgtcaatctcaaggacttgccgattcagttttcgaagatgctcataggggtaggatttatgtgcgtgcgttcataggggtaagtgtgcgtgtgttataagtgtctgtattatactgtataattctaaaaagaaaaaaaaaatcagaacatgacctggtaattctatcataacttcgctgataattaatcaactgctcgaacttcgctgttcagaagaaggcatgagtgcatgacatcaacttcgctgttcagaacttctatcagtgatcggtaggaggggttggggtttgcttctcccaccccgagcacggatagtctttaagggcctgttcagattgtagttaaaataaactttatgctaaaattttggcaagtgacaggatttcttatatatttatcaaatttggcaacaaactaaatgtagatatttttttacaactttattaaaaaaaagtatggatgaaaataacatcaatctgaacagcctctaagattctgaatgagagttttttttcttcggcccctagtttcctttagaatatgcattgaaagccacttggaaagaaagatgcattattattacacaaaaatagaacaaaaaataatgcgtatccggggaatcgaaccaaccaacccctagtttcctttagaatatgcattcaaaggcacttgcaaaaaaaaagatgcattattattacactaaaatatgcattgaaagccacttgcaaaaaaaaagagatat

SEQ ID NO: 5463 - DNA, 44379 bp, Oryza sativa
  unsure (1)..(44379): unsure at all n locations
tgtatgtacatgatatttattaattattttttcattccgaattgtaattacattcctataggaaatctagactcttcttctaatatttatttttttttatttcgaggtttcactatttatatatttctatatgaactctgaactcttcttttaatatttcttatctttttaatcctgaattttagttatttttaagttgtatttctacaaggactcttgacttttctttcatttgttattatttttaatttcaaatttcagttattttaaaattatatttctatatggactatagactattctttcactattcctactttttaattctgaagagatgagctggctgcctggttgattaagcaagcttatgatgtactcaaagcttgagatgattagtatgtttctggacacatgcaaacgtgtgaaaggtcaaaggctcaaagcatgttatgttccgaactgttgataagctcgatatttaattaagatatactcatgtaagagccaagacatctgcaaaggtaccattaaaatagcatagcaaatgcaaaggtcaaaggtaagcttgtgtggattctgacattattgttttatggttggtataaatgtattctttttcagttaaacgattttttttagcacgggaaaaaaagaacgccatgtctcatgttaattatcatgagggtttctgtgcataagcatgcatgtaccactagtggaacagtataatttggaaaatcttttttacaatctttaacaagatagtttaatgtgttacttgtaactacaattacaaatcatctataactatcatgttctatattttaagcggattatttgctccacacttgaaaaaaaggtttgcaaaagaaaactttcatctaatagaccacttattttacaatatttatcaattatgtttctcataatatttaatttatccatataatcaagtagataatctataccaataattggctcgataataaaaatcaatagtagactttttcatgaaaaaaatcaatagcagacagcgtactcgctgataacaaggcgtatgtattgatttgctcgattttaaaatataacagtacagtctctcggaagtacttatatggatgaagaagtatgcgtgattgagataagtatacgctcgtgtatgtaaatgtttgcctttataccactctctctaaaataaataaatactagtagatcaatggctggatttcatgatcagaatctgacaaggtttcatggctgctttcggagaatgaaatgggcttttgtgctagcctgctaggtgtgcatccacctgtccatttgaccgtttcctgccactctggcaaggccccctttgaccaacaacagcttgcttcccctctctattattggataactgtggtttgcttcccttcccactacaggtccagaggagcttacctgctaatcacgacgccatgatttctaacagtccccattattgtgttgtgtttctttttcttttttttttgtgggtgtgatgaggaactgtctccgttattgtcatggacaatacagctcggtaatgatgatagtattatcagactaattaacatgtcaccagtgacaattactagctgagtttctgtgttgggggggtcctgtgtgctgtgattatgccaagagttgtcgtttgcctcctgccctcccaggctcccactggaaagtctattcgtctttggagacgacgtcttcttatttttatattttgctaaaagaatatttaaaagatggatcgatatatgatatagtattcgaatgtttaaattcaacttatatataagcagaaataagaataataattttgactctaaatgaaatcgaattcaaacttatatgtttatgacgtgatatattataatgtatcttctccgtttcaaaatataagatattttgaacggtagaagtgttacatctatttaaaatcccttatatttttggatcgattggagtattaatttaccttactaattttattaaaagaatttagtattatttttaaacgtcatgcataagacaagtgacaaaaacccacctctgtttcagacaacctgttaaaaatccagacgaccagacgtgattgagcaattcgcatcacatcactcgtcgagtcatagcagcctgatgatccaggacgccacagggaagaacccaagaagccaacgtggtagcaaaggcggccggacacgtggccgtgcacggcacgagggcacagggcaaacggcacagcgaccgggctggcacgcggcgtgaggagaggcgttagcatgcgtgttcgtcgccggcggccggggaaaacgtcggcgacaggtcactcacactcacaggtgactgctgctgatacgagtgatcaccgtctctgggagatttggacttgggtaaagtcagggcatgaattgtcggcccatcgtttccggagaatgggccgtttagttcgggaaatgaaaatttttagatgtcacatcggatatttgaccgaatattgaaaggggttttcgaacacaaatgaaaaaactaattttataactcgcatgaaaaccgcgagacgaaccttttgagcataattcatccgtcattagcacatgtgggttattatagcacttatggctaatcatggattaattacgctcaaaagattcgtcttgcgatttcccccttaactgtgtaattagtttttattttaatctatatttaatactccatgcatacatctaaaaaatcgatgtgatgtttttgggaaaaacttttgggaactaaacgggaccttatgggcccaaacttttttgatatcatcgttttaggcgagacaaatttattaaacctaattaattcattattagcaaatatttactgtaataccacattgtcaaatcattcagcaattaggcttaaaagattcatctagcaaattagtcgcaatttgtgcaattagttatttttttagcctatatttcatacttcatgcaggtgttcaaacgttcgatgtgacatagtgaaaaattttggagtgggatctaaatagggcctatatctaacattgtggttaaggatgtaaagggggtgtttagattcaggggtgtaaagttttggtgtgtcacatcaggtattatatagggtgtcgcatggggtgttcgggcactaataaaaatactaattatagaatctgtcagtaaacagtgagataaatttattaagcctaattattccgtcattagcaaatgtttactgtaatcgcatgctgtcaaatcatagagcaattaggtttaaaatattcgtctcgcaaattagttgcaatctgtgtactccctccgtcccataatattataatctaggactggatgggatgtttcatagttcaatgaatctggatatgcatctgtccagattcgttgtactataaaacgtcctatccagtcctaggttttaatattatgggacggagggagtaattagttatttgagtaaagtgtacgggcgatccttaaacttgtagaggtgtgtcatctaggtccctaaactctcaaaatgcatatccaagtcccagaacttgtcataatgtgtcatctaggtctcaaatcgccacaaccccttcaggatgctacgtggcgttgatgtggcatgccacacggatatgacgtggtattattttgactgacagataggatcaatttaattttttttccttttttcttctctttttccctttcttctctttctctctttctttgtgatccgtgcagaagaaatggaaaaaaagaagaatgaaaagaaaatgaaaaagaaaaagaaaagaagaaaaaaaagagaaaagtacacgtcacgtccatgtggtattgccacatcagcgccacgtagtattctagaggggatgtgtcaatttaggaccaaaataatacactttgacaagttctggtacctgaatatgcattttgaaagtttagggacttatatgacacaatcctacaagtttaaggatcaccaatgcactttactctagttattttttttagcctatatttaatactttacgtaggtgttcaaattttagggtggaatctaaaccgatgctaattcaaactcaacgtcaacagctaagaatcgtgttctgaacacacagcaggctcacgtaggccacgccacctcaccctgttgaccgagtcaaaccaagcggaagcttccaccgcaaggagccgcggcccacttatagcccacggataaaatcccccgcaactcgcgcacagcccgcccggcctgtctagcgcctcgactccattcaactcgcgcaaaaccgcggcccgccttggccttgtgcggcggcgaccatggccgccgccgcctcctcctcctcgccgccggggaccgcctccccggtgctcagcgtgcggatcgtctccctcgactactacatggcgccgcccctccccggattcgacttctcctacagccacttccacggtgcatttcccttcccccctctcttctccacccgcctctctcgacctccggctcgcccccctttgttccgtctctgtaccgcgcgcatgtcgagtggctgatgagttttgggtgtgtgtgtgtgtgtggatgtaggcggagaggtggaggaggtgccggtgatcaggatctacggctccacccccgcggggcagaagacttgcctccacatccatcgggtgcgtatgaccagcttctctgatgattttttgtttgtttgttcattcgtacttggaattagctaatttcgctcgtcatttttgattcaagacttcaaccgagtctgcgtgtgtttgatgctttgagcgtgagtgtgagtgacgctgtgaggctgtaacacatttgtgtaattgtgtttgcgggttggtagccatccgcagcaagtagtcctcctcatgtattatacagtattcgtgtacaacaattgatgctcgtggcctttgctgtctggattcaaatttgaaaatttggagggaaatgtgtcaatgtgcttatcctcactgtacgcgcaccaaattcgaagtttggagctccaatttcacttttgaagtcctcttatcctggatgagcttaaccttagttctctactccatatatttgatgtttgcttgtattatatgcaatatttaatactgtgtgcaatcattttttcttttgagtttggatatacacacgatgattagctctatcatatttcgaatttgtgttgttgaatgaatacagatatacttgattttctcatcttgcttttccccagaaagttattcagactattccattcatccttagttgttccaactagttgtttttcttttctgtatctaggtccttccatttctgtatgtaccttgcaaagaggaccttcttcataacgtcgaaaaaggtgattcattctttgtaatgcatcatgtacatgctattactgttgcttgtgcaatttgttacatggattattctatttggaattgtaccaatgattttctatccacattacctgaaactttttttctgatgattttcatatccacattagtacatcaccagaaactttaaattgcttgttatttatttatttatttattcatcttctaactgagtcttactgctatgtcacaaactttttagacactaattcctcttatccaccattgcaatttttatgaacttgatttatgatttgaaaggttacttcatatgtccaaagcttggccttgtatgcatctgcaacacatttagataatttagacagtatgctgaatcctttgtatgtgtctgtgccttggtgagcatctcttagattttattctggccaaaagggcagctgtgtctagaaatcaaacaggccttactttttctaaccaaatagcctaaatgtgttatttgctttaaatgttggtattgatgctccctgattaactgttgcttttaatgtcaagaacatcgcttgatgacaaggatgaattgttgactcttttgtgccctttctctaggtaattcatttatatctggtctattgagtgatcttgagaaagctttgcaggtattttgaagtccaattatttttttatggtatgaataccctgttgtattttttgatatcatcgtttttcttacagattcgcagctcatcaaaaaagaagcatgtgcatggatgtacccttgttcgagcaaaaaagttgtatggctatcatacatctgaggaactttttgtgaagatttatttgtatccataatttaattattttttaagaaaatatatttgctgctatggatgtttgaaccagttctagattatttgttctttccttctcacctagtctttccatgaacatattccatatatttatttataaatcaaaactaaacaaaatatttactgaaaacttggaagaagtgatactgagttcagttgtggaacaatttctattcagttgtgatactatgttattgcatccactgtttcttttgctgcacaatttctgtctatctgtgttcatcctgaaagattatattaggtgcatataaatcagttgatgctgtactttaagcgttgcttgccatacacatagatttgagattttataataaatgcatgccagtattttgtttccttctataagacttctccgtacaactgattgccttgatataatctgaagatattatcctcatgaagtttctcgagctgcagcccatctattggtatgttgaccccttctgcttaatttacgaccctagtattttccagtagctaaacatgtctgacaggaggaatatagctgtgatacctacttctagatttttgtttctttaatctcactacttttttggcaatggtactttgttttgttactcgctctattcctttttcattgttattgtttatttttcactgtctccgagttacaatttgggcattctctttcatagttttacatcaaagtatatcaataacattataatattacagcagtgcattgattctcactgttgcatatgcgtgttgctttattttcatgatttgaagctgtaaattcattttcccaagcaacctgaaacttggctactaaacagttattccatctgggatataatctgtcctttatacagattgtcactgttttaatttgaaattgtgcagttcatcttgtgaccttccttgtaaatacactttattcttctcaaatgggagtattttaaactatttcctgtggtcctgattttgagctgcttggtttcaggatggtgctgttcttaatagagtattccaaccttatgagtcccacattccatatcttcttcactttttggtgagagcaatgctttcttttttgttttacaatatttcattttgtctctttcgcacaatcatagagtcttaatataataaataccacagtcttgcttttatgatactccctctgtccacaaatataagtgtttttggttggatgtgacacatcctaatacatcgaatctggacagagagtgtccagattcgttgtactaggatacgtcacatccgggcaaagcccttatatttgtggacagagggagtatgtagtatattgatatttgagcggctggagatgaccatttctgttgaacttatattttagattgactacaacttgtatggaatgggctatgtacatgttacagacttcaagttccgccctccattgccagatgattttcatccaaagtcatctcttcacagcaaggtggactgctccactgaatcagggcataaggtaagtattatttccattagtctttgttggttgatactttggtccactgcttctacttaatatatcctgcctcttttccttaaaaatgataggtacatccggataatgtcgcaattagaaaaccgacaatctggatatcttcaacagtaccacattctttaatactggctagttcagccacttcccattgcatggaaggaacaaattggaacgtcactaatcgacatagttctttgatgcttgaagctgactcgagaatagaaggtccaatggcacaatgacactaacagcttttttttattgtgtatctatgtgttgcactaacaatttcattggcatgtctaggcatcctaaatgaaaagtataagatgtacacttccctttcacaagctacagcagatagcaaaatagttcggtcacttttatcaatttgggaggtatctttcctgctttgtctatatgcatatatgctagaaaatgtgctaattgcctaacctctgcaatatctgttttgttcaggaactcgagcacttaagattgttggaggaagcaaaacctgttgatatgggcagacctttgcgggattctgttcttagaagttttcttcatggaattaaatatgagactgccctttctatgctatgtccaaaggaggaagtgtcctatcacagagttccaaccatggaagaatctgaaaagctcgaagaatgcttaaaatcattgaatgatattattgggactatcacattttcacagaatgactactgttctattattgatagtgatatttctgcgggcactcaacaggagaaccagatcacaaatgttctgtgtttagagccatcggaagagggaaacactcagtgcccagtgtcatcatctgctgctcaaagaacatcatctcaattatttgaagaacatgaaaaggtaatatatataccatatatcttagttatttggttagtacttgcttcaaataaaagcaattttgctcaaagtacttactattgagtccatttgtaatttaacttgaggtgtatcaattacaaatatggttaaatcaattttcctttataccataaagtgtatttaaaatagtttcaagctgaagacctgcatggtttagttgctgaatcttggtcactgataaaatacatgatgaacaccctgattacatcaaacaaaaccattacatagccacacttgagatggtggcacgaagatatcactgggtctgaaagggcacagatagatgcttcaggatatgacgatccatagacatattctctgatcctgtcaatcattttacatgctgatctttgattggctggagatttccattctggtattaggtatatgtcatctttctgcattgcataatatttttttttctatttgggtgcaattattacctattcttgattaattcagatcctctaatctcctgtaattttttcgtttgtagcttgtggatgctgaagctcttggccttctaagctggctggcctcctcacaagctgcagaagaaccaacaactgatgatgagttggtcaatgaagccattcttagccctttattttccaagaagtccattgcagttgccttagagtctgcacagctggattttgatggtgcttctcagcaggagtgccaggatattcttgattcaattggacctgtgattggagaagaacaaccaaatgatcaaatgtcctaccgcagttctgtaaggctcggtgagagtagttccctgagcaatagtattccgcagattgatgggtcatctgatgaaaacaaggaagttccacaagaagatggtaagtataaaatcgacaggaaaagggctggattgcctagttattcatctcctcaaagtagttcaaaagccagtaagcgtggaggaaatgaacttctctggggctctttgccactttccattaaaaagagatcagatttgaatgctgatggtcattcaggtggtgcgatgcctactgagaaggtgctaagtgcttctttcatgagtggaactggaaagaactcccatgctaacccagataacactgagaggggatcttctagtccaacaggtgaacatgacccattgtgtgattctgtgagagatttgatgaggaggaggaggagatcttttcggtctgaacaatcagaagttggtaattctggagatgcagcatacatcgttcgtaaagagaatgaaattgtgaattctgagcgactagaattgcatgatatatccagtgacctttcaaattcagaaatgtattattctggcagtgaatatttgcagatgacctttgcacggaagcctccaatgaagaatgaagtattatgtttggagggctcttcagcaggtagtgagctgcctcaatgtaagttccacaagtgatatttattttatcatggtcaatgtaagttccataagtgatctttattttatcatggtgaatgcaattcatttgatgcatatagtcgttgcttgtgtgatattagctttgatgttgtttttacccatccaatatataaataattgtgttagtgcctacggtatgattatgtaacagatgttcattgttttctttcagtttttctagcattaggcttttaggtccattgccatttgcatagctcattattgtttcccctctggaacagtttggactaccaaccattataccagcatgaaatatttgcgtgtatgcaaaagaccattattcatgtaaccctataccaataatgaattatatttttatctgttgatattcacactattactcatcagggttcagtaaagatgttggtttatcatgtctcaaagcatcatttctttttcctggttttagttcctcactgcggatcttgtgcctttgagagccttgcaggaaaataggagttatgggttgtcatactcatatgtgtctcagtgaaacaaaattgccggaaatctgtagttctgtgaaataggttaccaaatctgtagttccttgatagttatgaaatttttttaggggaatatgacttatgacactagttatatgcgtgtagctactcaggaagtgtaggatattagcatggcatgggttttagggaccgtcctacttaatacaagacatattatgttgccttactataggtacaatgctattctgttaaaacttaaatctttcttggattttctggtatcattatttacttaatatcatttaaagcacattgtattttttttttgttaatccacattcgttctgctatttttcagcttccaaactgggatttgccgatatccctccgttttttaatcagaccgctgaagagaataagcagaatgaatcatttcaacgcatgggaagttcatgggatacattgggtgttccaactcatttccaaaatgatggatcagccttatatttgctgacacatgcattttcgccaccatccactgtagccgtgggccagtggctaacccaacaatcttgttctgttagtgtctctggtataggtaagttcctgtgcaaatcaatttaacaactatgtattgatgtcctcatactctctgttattttaggtcattccaactatggcgagaaagtgtctgttgatcaggaaggagcaaacaattctactctttcaccatatatgggaggtcctgctttgatggatgattctcctgcatctaaaatggctttggagcatagcattacgacatttcctgatgatacagttatgatagaaccagatctttccaaccaagaaattaaaaatctggctgattggcatgacttttcccagatctctggtggagatgagaaggataaacttacacctctcagtcaaattggattctgtgatcctgctagtattggtggcggacagcaactgactataattagcatagaggttgtaccacattcttttttcttttgttcccgacgtatatgtttctttttgttcactcttcatacaatgtaggtgctaatttacttttcttttttagaaatatctatgtctgcaaccagtaggagtttttttttttttggttattaatcatgccagtttgacttgctctatccagtgaaaagaaatatgcaaagttggattaccacataacatttctttcatagctacaggtaataacagaaagcagaggagagctgcgtcctgatccacgatttgatgccatcaatgctgtatcgctggccgttgaggatgatgctgacaatactattgaagttcatgtgcttatacgtggaaacaatgacagttcacacaggaggaggttgtgcgaaatcactcgatcttggaattgtttgttgttttacttttccatttcatcttgttttggcactaatcagtcccttcttaatttttgtttttgtcaatcaacaccactatctcttaataagtctacagaatctcaagaaattgaactgtcctaatcagaagagttgtgtacttgtgttaaacgtgaaatccagtacattagtatgtcagtcgtaatcctagttcaacaagagaggtttgcaagaacactgagtgactatggtggtgactgccacagtggcagtggcaactgatgtcatatttgatgagggtacactgatttggatcactatcttatttatgagtgttaaggatttgatataatgccatcagaaacacatttgttgcttccatgtgatgggcctatcatatgtgctgaccatatcctatgcttctggacttcaagaacaccatactactttgggttcttttgtttaggattttttcgatcgtaaaccacatgcactttcactgttttagagttacaccctcatgtaaccataattgtttgctttcagctaaggaacttgtttgattcttttttgagggctgtaagagtttagcttgttcaattgagatgtctttagtgtcctttttttcttgtaactgcagaaacctggatggagtttccggttgtgacgtaaatgtatttcctggagagagggaacttttgaaccatcttattaatgcaatatgttcaattgatccagatattatagttggatgggagattcagttaggatctttaggattccttgctgaaagagctgctcatctgggtataggcttactgaaaagaatttcaaggacaccaccgcatcagatgaaacatccacctatgaacccagtggacgaatctagtcaggagcttcctggagcatcttcagctgatgatgttattgatgatgccagtgaaaacaattggagtcatgctcatgctagtggtatacatgttgatggacgaatcatactgaacttatggcgtctcatgcgtgcagaagttaaacttaataattactccctcgaggctgtagctaatgaagtcttgaggaggaaggtaccattagtaccaactaagatattgaatcgatggtttgcaacaggttctggacgaggaagatatcgatgcatagaatatgttaataagagatcttctctcaaccttgaaatattaaatcaacttgacctggtaaatggaatccccacatttatcttgctggtacatcgtcaagatagagctatttgagattctttgtattttagttgaaatcttttatcaattttgcaacttctccttaacaagctcctagccatgatttatcattacagaaatggagttggttttgttgaaatttcttgcacaagctactgctaaatgttcttctatagccagtttttctcaacaaatattacttgaccatgcaggtaaaccggacatctgaacttgcccgtgtatttggtattgatttcttctctgttctttctcgaggttctcagtttcgtgttgaatctatgctcttgagattggttcatacacaaaactaccttgcaatttcccctggaaatcaacaggtgaaatcactccctccttaccatgctaagatctctctatctgcttcagatatatagtttctcatttgcatttaccacaaattatgtaacatgtactagagatggtgttatggattctactggcaagtgacaagcttgtatatcactacatgatatctctgtgccaaagatggccattttgctctgtggtcagcagggatccaaagaagttacattttgtgtgtaacaaggaaaaaaaagataattaggacatcttttaagattttgatgggactgctcttttaagcaccatgaaaatttaatttccatgtcgggctccttgttttataaatctgtttatcttctggttagttactcacataaagttagaaaattggattttttttttctttgctaaaaaataattaaatatgaatgcataaaatattgatgccagtattttaagtgttcttatgtgcaacttcgcaggttgcttctcagccagccatggaatgcttgccacttgtaatggaaccagagtcagctttctactctgacccagttgttgtattggattttcaatccctttatccctccatgataatagcatataacttatgttattccacatgcttgggtaaagttttcccgtcaaagtcaagtgtacttggtgtcagctcatattcagcagatccacagaaaattgctgacctgaaaaatcagctgctgctgactccaaatggtgtcctgtacgtgcaacctgaggtaatgttcttcttgggtgagctatactgttaccaagcattacggttacaggttttctttatagttgttgtagtacatgcctagcatcattgttgataattgtatcaggtctcatttggatggaccgaaatcccagcctatccacattgggattgtccttttgttctatcagctggattatcagctgtattctggaaagtattgcttagagttgcacttaactgcgatttgatgccctccatttttctgcatatacagcatcccttcgttttgttaggtcttatgctgaactgtccttttgaacacatttttaatgtcattttacaggtcaggaaaggtgtgcttcctcgccttctcgaagagatactatcaacaagaattatggtgaagaaagcaatgaaaaagctgtctgcatctcagaaggttctgcagcgggtattcacttctaaactattttttaagacctctatccatataatattaaagcgtcttattagaagttgatttaatatgtgtattctatatagtgcagtaagctctttcattttaatgcactgtgcttagacagcaatcatgtttctttccctttcatgtccctccttttggggtaaaagaacctttactggctttatcatgttacaaaatgaatagtcttcttttttcagatttttaatgcacgccaacttgctctgaagctgatagctaatgtaacatatggttacacagctgctggattcagtggtcgtatgccctgtgcagagattgcagacagcattgttcagtgtggccgtagaacacttgaaacagctatatcattcgttaaccagcaccctttgtggaaagctagagttgtatatggtgatactgacaggtatacttgtgtctttatcttctatcttcaaatcgttatgtagccatacttacaaacccacctgtttcctatagcatgtttgttcttctaaaagggcgctctagggaagaagcatttcgaataggaaaggagatcgcctcttcaataactgcaatgaatccggatccagtcacattgaagtttgagaaagtctatcacccatgttttcttcttacgaaaaaaagatatgttgggtatagctacgagagtcctgaacagaaagagcccatctttgatgcaaagggaattgaaacagtgcggagagatacatgcccagcagttgcaaagattttagagcaatctattagaataatgtttgaagaacaagacttagccaaagtaaggcgtgcttcttgatcttctctttgcaaggactactttctttggattgtcaaatttggccttcccgccatctgtcaggctatggcttgatagccttttatcttgcaggttaggtcatatttggagcgtcaatggacacggatactatcagggaaaatttctattcaagatttcgtttttgctaaggaggttcgcctaggtacttatagtgcaagggcttcctcgctgccacccgcagcaattgttgcaacaaaagcaattctatctgatcctagggcagaacctcgctatggggagagagtgccatatgttgtaatccatggagaaccaggtgctcggcttgtagatatggttattgatccttatggcctgctagaagttggatctccatatagattaaatgcactatattacataaccaaacagataatccctgcattgcaacgtgtttttggactcgttggtgctgacctgaataagtggtttaatgagatgcctcgcccaataagggaaacacttgctaaacgacagtcagcatctggtcatggtagctttagccgattaggattgaataagaaaggggttggcaaaggaagcaggatagatacttactatatgtcaagccactgtataatttgtggtgaaataattcaaggatcagacacattttgcaacaactgcttgagaaatgaagctgttgtcggcacaatagttgctggcagaacttccaaattggagcgggaaattcagcatcttgctgctgtaagttcatatttctttgataattgtgccaaacaaatgcttgtggtataccctcctacctagttccacaaacataatagcatcttaacttttgtttacataactgtttacctgattacacatacattcggggaggatgaaatcattgcaggaaaaactaaaattcatttatgttctcacttttatgcacaccaatatatgttggttcttaatagattcattcatgaagtttctgtgtaacaacctcacaagaattgaacatcagaaataatgaaattcctccactttcttttggaatatacttactctattttaactgctgcagacttgcacaatttttttatctttactgttcatagagcagatagccttgagataagctgtttcagatgaactgacagtaaaactcgttaacattgcccagatatgtggtcactgcggaggggcagattggattgttgaaagtgggatcaagtgcatttcccttgcatgcccagtgttctttgagcggagaaagattcaaagggagttgaggggtgtttcagaatcagcaatagaagctgggtattatcccttctgttgtccagaactcttctgaatttgcttttttttttgttcatatccctgtatatgctgtaaatttgtaacatgtacaatcaagtgtatttattttgttgtaacattgtacaattgtataacatgtgttgagcaaagaaatttaatgtataataatgcaaatcctcgagggaatttggacagagtccttcgctgtttgttggtgcttcagtctggaccatccccccccccctatgtccctatgctcttcctcgtcacgcagctttattcagcaggtaataattaattatagttgttattcagcagttctctaggaagtccggttttctgatatcattattcagcaggtaataattaattatagttgttattcaacagttctctaagaagtccggtttcattttgacaggcagagatagaaaatcggttggcttgtttgtgttatctttctgatatcattttactggtttcattttggcaggcagagatagaaaatcggttggcttgtttgtgttatctttctgatatcattattcagaaggtaataattaattatagttgttattcaacagttctctaggaagtccggtttcattttgacaggcagagatagaaaatcggttggcttgtttgtgttatctttctgatatcattttactggtttcattttggcaggcagagatagaaaatcggttggcttgtttgtgttatctttctgatatcattttactgaattgtggatggtcaggtcatagggatcaagggccagaggctccagattgtttgtgtaatcgtgttatctttctgacatttttaccgaagtatggatggttaggttgcctttacataatacaggaccagaagctccagctcttacagagcaaggcgcaaccagccatgcaccactggaacgtcgtctatgggggccaaggcactcgatattggtaaagaatcgaatgagctctcattgaacggtaggggatttactgaatcattgatgctcagatcaggaacagaagctgcagatcgtgtagagcaatgtgcagaacagtcatgcaatactggaactactacattggtaagaatcgagtgagttctccttgaacgggcaaatgaccagataaactttgacaaacattgacggcaactgttatgcaatgtgaaatgcagcaggagaaacgctccaaggaggttcagtttgattccatgacataacagtggagcttaattcataaaggtaccgactcttttatttcagtttagaaaggcacaactcatcattatttaagttccatgctgtagtgtacaaaagttcattgcatggaaggctaataactaaactataactagattattgctcgtagtagacaatgatagaatgcacattccgtttccaaaggcgtgctaggctttattcctagaactatgaacagcaccacggcaccatctatagagcagcttggaacagaatctcagccagttcctgtattgagaaatcacatgaaagcaaagttaaaaatgagcaatcatcaacccaaagatatttctattatactatgaagttaaatgcgtatattataattccagttacctgcttgccagatggaacaatgggttcaccccactccagaaccttcttctctagtgtctcgaagtctcctttcccagcctatttgaaaccatgagccaattgttactgtttcaattcaatcatccaagtgtaagaaagcaagagctctaaagtagttgaacattgtacctcaatcaaggcaccgatctcactatcaaaactctggtagcgcttgcgaacaagctcatccagggaaccatcctaacagcagaaagagataaaaagattacatctagatccctgaataaaaactttagaaggctgtaatgttccagttacctcgatcagcttgacaacattccgaaggccgcgggctagggtgtccattcccgatatatgagccagaaacatgtcctcaacatcagtactctccctcctcctgttgacataatagaattccaagtcaattgaaattcagttgaatcagagaccaatttacacacacacaaaaaaaaaaaacaatgtcagcgggaaccaacaatttggcatcaaagttgaatccaccaggtgcaagcccaccctacaaccatatcaaaacattacaactcatgaatagtatcatattgataattacctgaatatatcaaggcaacatattattaattcaactcacattcttaaccacacttgacataaccaaagtagcctctgaaatatctgtaaggaactgatcggtgtcccaacctgtccatatatataagcattgaaatgttatatcctatgtatgtcacaaatcgaaatcaaacaagaatttcaggcataatgtgactttcaggagctaaaggcatgcgcacataccgatctggggatcaccagtgttggcatcaatattcccaagcagaccattaattcttgcagtctcaagctcatggtggcagctgcaaattttccatggagttatgacactgccactgtaagctaccttgaatgacgttagggaagcaagaaactaacctatgtccagatagagtagcgtggttgcattcaacatttatcttgaattctcctgtatatggtgaaaaagaatgtactttagattatttcacaatacacggttaactccagacagacagcagtaaataaaattgttcaaaacactaatggtgttaatacatgaattcctgaaatccaaataacagttcaactttcgaaatcactgtaaacccaataacaaactacatatgtacctgttagaccatatttctgtaggaaagagaatgtggttgcaacatcccaatcgtacctgggagaggacaaacaagggttaggattgtttaatcctgtggacattttgttaatgtaaactaataagcatactggtgttttgtgggttcttgtggtttaggctctatcaagagtgttcctgaaaaataaaaacaaaattcagtattatatccatgtcatacatggaaaaatgtgatatagcagtgacatgtgagtaccattaaatccaatcttcttcttgtagtcaactgcagcttgaagaaaactagcctggatgacaacacggcaaaatgataaatcaaaatggagataaagtgagtggtagtaagtgtaacagaaacagaggaacagtaacaatatgtcaagactcataccaaatggtcaagttctctcttcatgtcagtattaagaagagtttggtaaccctctcttcctccccagaaaacatagttttcaccgcctaggtagtgggtgaccttcaagtggtaaaagccaaatcaagaattgacttatggaaaacctatcacaatgttcagagttcaaagataacccacctctaaagctttcttaacttgagcagcaccataagcatacactttaacctctgggctgcagtaccaatgaaggcttctattagcttcagaacatactccaaatttacatgcaaaatgcagcaaaactgatctacctagtagcagcaccgtgcatgtagcgcgggtgcatgaaaagctgtgcagtcccccacagtggttttatattggtctcctcctgcatgaagttcagatcatatctgagcaaagagcagaaccaatgcatttcgacaaaatgctaacaattttaaggttgcagaaatgtaacctggagtttctttgccagttcaactatctcatccaaatttttatttgtttcctgcaatgtgaaacaagaagcttataaaataccagaccttccactggtggccagagctacatcacacagaaacccagaaattccaaaaatttaacagaaatattccacaggagtaaaacacatcttcaaaagtaaataagaccaaataaaattccaaaaatttaacagaaatattccacaggagtaaagcacatcttgaaaagtacataagaccaaatattatgtgttgttctgaaggtatattcagatataaaggattggagcttttccaatatctaaaatagttttaattaaatagatgattaaaatagttactctgttaaccaagggtaggcatgataaatagctatagcctcgagcttcacaagttcaaaccacattcgaagacaaataataagactattatgcatgaaggcataccgtgagtgttttgccatcaggggcaatatccctgtcatggaagcaccacctgtcaactccaagcttctccatgaactcaaagtgagctctcactgcaataacaattcagacagaagttgttgattaagcaaacgtgcaaattcataatgaactgaacctaaacatgaaaccaggtaatagccatacttcttctcttagccatgtccaacgaatttgtgccatcctcccaaggccaagactttgtaggggcaccaaaaggatctcctccagtaccacggaacgtatgccaaaaggccacgctgaaccgcatccaatcctaaacgcaagcagataaaatacaaaactcagatgtattccatgacgcaaaagggaataaaaggatctgttcaacaagacataattcataaaccctaccttcatcttcttcccaagaatcacttcctcagcattgtaccacttgtaagcaagcgggttcttgctgcttggaccctgcagtgcaattgtgcaacaaagtcttagctcacaagtcacagcagttttagtccaatatataacaatctaaaaatttctaagctttatcaagtaatctaatcaaagagtcacagcagttatagtccaatacaataatataaatttccaagctttatccaataatctaatcaaagctgtaagctttcatggcctccctcacctcatacttgatcttggggatgccagggaagaactccccttcccaatcccctgaagcagcatcaccacacttgctatcgaggtcggccggacaggtttgctgcgtagcgatctgcaaccacaacacagaactgaattacaaccacaaccagaccacatttccaccgtagaaatcaaacatcactaactagtcaggatcacttaccgcagcagatagacatagagatgaggccaccagtaagagcaaaagctttgcccccatcatggcagcagcaggaccagcagcggagcggcgggcctgaagagcagcaaacaaatcagtaaccacagtgaattgacgagtgagagagaaataaataaaagaccagccagaaagtttccgatttgattgcgcacagtaaataaataaaagatcaaagattgaagaactcccaaactaatccaaaccaggtggagtcagtccatcgcccacacaaaaatcaatcgaaatccacaagaaatctccaatctgcgaggagaggatacctgcagcggcggcggcggagggggacgatgaatgggggaggagaggagaggagaggtaatcgcgagggggatgaggaggaggaggagaggaggagggcttaaggagggcgatgtggctggtggtagttgtcgtccctactccggcggtgggtgacgtcactttatttggatttatcctatccatggaccaatgatatactggtatatagtactattatttcattatctttttcgttagattaggacgagactatcgcgcgtgaaaccattatataggccgaagggcaagagattctcgtgaaatcacttgacgcaccgacgaaacgaaacggcagcgactccatatctaatctgtttttgttctgttctggtgtatctaatctgctagtaagaaaattttaatacgtgtagcattgctcccggtaatgtatttcggcgaggctaagcatggcgccatagcgtggtgtactggactctctctctctcttgataagaatcacaactgaaacgtactcctacctttcaactttcatccctcccagataaagcagataaacttctcttcagataaagatttactaccgtgtcaaatttcactaaaactgaattttaaattttaaaacttaaatttaggatttttatgttgcagtttgtttttcttttaacattagcctttgaactgtgaattatacgtatataaaagtttaatctaatttatttttggttgctcatgtgtcgttttatggcttattgtaaaccaaacgatgattctgcaattaatttctagtactatcaatttggattttttttctcaccgtaccattattgttgctacaggtgtcagtcgacacaagaagaacggaactctcaagctgatgacgcatcgcctgccgcacgatctggaaatggacggtccagatcgcacgccactcatcttatccgctcggctcaaggagaaccaaaaaagaaaaaaaaaaagaaaaatctcgctcagctcaaacagccacgaaatggcgccggccgtcgccgtcgtcgccgccgccgccgccttccccttccgcctcttctccgccgaggctcgccgaaacaccaagggctcccggagcaagcgaggctcagccaggcccctcaagccatcccctcctccccgcccatccgcgtcgtcgtccgccgctggcggcggcggcgccaccaccttcaccaggctgccgctccgcaacgcccccgcgtccgtggaggtgacgctggaccgcttccccaccgccaatcccgagcccagagcttccacttttactcgccggaatggcgagcggttgggcgacgacgaggaggatgaggaggaggaggaggatgaggtggagctcggactccgtggggccaccacgtttgctcggctccctctgcgggactcgccggacggcggtgacctcaccattgggcacccccangngggggggcccctcaagagggcntgaggagtcgcgccatttctggtcaattggtcgaacaccttgccaccgtaaagnagaagaagtaggagcaggtgggtttcccccaaancccccagcttggacatcttcgagggagcaaagggcagggaagctcgggctttcttacccgacgaggacgacgaggacgacgacgtcgtggtgttcgacccagagtacgacggctacagcgacgacgaggagttcgtcgctactgctgtcgagcagagtccacgaggcgacgccatcgcagttgcggagcttgaaaagctcaaatacgacaatgacgacgacgacgacgacgacgacgaggttgtcgtgttccacccagacgacgacgaggaagtcgacgtgttcgaggactacgacgacgacgaggaggaggagacgaaggagaagggtgtccccgccgtgatgcggtgcttcgacacggcgaagatatacgccaaggccggcgacggcgggaacggcgtggtggcattccggcgagagaagtacgtgccgctgggagggccctcgggcggcgacggcggccgcggcgggaacgtgttcgtggaggtggacggcgacatgaactcgctgctgccgttccgcaagtcggtgcacttccgcgccggccgcggcgcgcacggccagggcaggcagcaggccggagccaagggcgacgacgtcgtcgtgaaggtgccgccggggacggtggtgcggtccgccgccggcgacgtggagctgctcgagctgatgaggcccgggcagcgcgcgctgcttctccccggcggccgcggcggccgcggcaatgccgcattcaagtccggcacaaataaggcgccaaggattgcagagaaaggggagaaaggtccagaaatgtatgctctcttcttcactccattgaaaagattgttcatgctttttttttttagttagctatggagtgagcttttgacatgatttcccatgttaaattagccatttagcttacacaaatgttagttcaggtttagattgtattgcttgatatacaagttttctttctttgacttacattagctgcattttgggatgattggtggttgttaggtggatagatttggagctgaagctggttgctgatgtggggattgtaggcgccccaaatgctggaaagagcacccttctgactgctattagtgcagcaaagccaactatagccaattacccttttacgacattattaccaaatcttggagtggtctcattggattttgatgctacaatggtagtcgcagaccttcctggattgctggaaggtgctcaccgtggatatggcttggggcatgagtttttaaggcatagtgagagatgttcagtgttggtatgttccttctctctttctctcctttctttaggatctactatgttttaagtccacatctcttatgtcatggttatcttatttctcctcgaatatatgatattagaaatgtatgtgcgatttattggttattgtttatttttctggtttgggtcttaggttcatgttgtcgacggctcaggagaacaacctgaatatgagtttgaggctgttcgtttagaactggagctatttagcccatcattggttgacaaaccttatatagtggtgtacaataagatggatcttccagaggcatcggaaagatggaataagtttcaggagaagctacaggctgaaggaattgagccctattgcatcagtgcaatgaataggcaaggaacagaggatgttgttcttgctgcatacaaggttctacagaaagataggcaaagaatgaaagatgacgaaggtatttctatagcctaaatttttctgtcaaattatagtgtactagtagctaataactgcctaactggtgctcaagcatggaagtgcactttaactgactatagctgttcgcaattttagattaaatgcatatgtgctactttcaccatctatgctaaagtagtgttcttactagcattcgttttacattatcgtggttaacacttacgcataacatttttgcgttttaagatgtttatcttactactgcatgtttctgcagaatggaatggccctgaaaatctgaatcatgtggctgatgcaataaaaagggaaaggagagctcccatgaacgaatttgagatttttcatgataagggcacgaatacatggaacgttgttggagctggaattgaacgttttgttcagatgactaattggcagtaagtagtttctttgtacagtgctcactcgttacactttggaagatcagtctcagaaagcgattttaagactgcattactggtcgtttatctaaattgacctcttttaagattactaattaagtaattgtaatatctgatctctttccaaatgcaggtattcagaatccttgaaacgatttcagcatgctttagaggcatgtggtgtcaacaaaactctaatcaaacgtggagttaaagagggagacacggtagttgttggtgaggtatatattcctatgtcataaacaaaacattggacagtcatcacacaaataaaattatcagatttctaagttaataatttctgcagatggaaatggtttggacagatgagcctagtaagaccaggtcatcaaagacaatgaactcaaaagatgactctgtcagatggcctgaatttggctagatcaaggctcaagcaatggttctgtgtcgcagcagaggcgattttcactgaaatgtttgcacatgcttacaataaaatgctgcactatgacaacaaaaaaactactagtcatcacaacagctagttacacccagcccaaataaaaggaatactattttgtgttaccttcagaatagtgatgtatcacacagcttcgcctacatgctttgaaagttggattatgcaggagtgctatgtactaccttttgtgatagtagatatttgtagatgagatttaggtattctaaaatgatgtacgaaatagtttcttcagcaagattgtataaatgttcacattgattattaatggcttatacgaccgaagaaagacaattgccgttgcatcgaaatctccaaaaagatttgatgtttgagtgaaccttgttcaacactttatactagcattacgaattcaaagattatgcatcaactatctctctcttacgatgcaaaagtaatttgttcccctcaattttctagtggagatagttttcgtccgtttctgatatgttttatttgctagctatgtgggtgtcccctatgcagttgtgctagcatgccatatagggccttaatttgagcttgcttgagtgtgttgagagagtgaatgagctcctccttttatagggctggtataacggttatcctaatgcgtaatgtcagttttgcccttgtaaccgtcgttgagaagtgatcctggatgtccacgtggagcgccgagctgagccgtagcagccagggtacctaggccggcccagcaggcctccagcatcggcagggtcactcacatgtgggtcctctaggcggttgtggcagttaatgtggtttccggacagttacacctgacttgtgggccctcttattcataagcttgctatgtgggtcctttaggcggttgtggcagttaaagcggtttacagacggttacacttgacttgtgggccctcttatccataaaattgcttaggagtgagtttttcttcattttctccttattttatttgataaattcctacaacatattattctccaagtacaagtggaattatattattctggaataaatatgcattgcaagcatagctaattctctattattttagttatattgacaatcgaagtttgtctgtaacgactgtcaacagtcaacaggagggattgacgacgtaggaaaggtggttcagttcgaaagtggattgaactagttagagttgttttaggtttagttttggaaataataattgttatatttaggccggtgcgtaattttcgttttctttttaggagataaatctctgggcggtcgaatcatgtttgaatcggactcagctagattagggatatatattacacggaccttataaggtatcttttgtatacaatttttcacgtgttgccacccttttcggcgagttcttagttttcgaacgaggctagatcggtttaatctccggtgaggaagtaagtttcttcaacttcgcttgtatcaacttaattaggattttctcagtctagtccaatattctaattaagttgctacaatcgtagcccatctaatatatcgactttttattggattgcatttcgaatttatttaaattttttgagcaaatataaaaagaattaagtcatgcttaaaaaatatttgatgatacatcaagccacaataaaacaaataataattatatatttttttaaataagatgaattgtcaaatttataaaaaaattacggagggagtattatatttgcccggtagttagaagcgacacaacgaccgcacgaaatgcatgttattgcgatgtacaggatggattttgttgcgcctcacgcgtacgtacgtacgtatgtgcatgtgtcggataggatcacaagctagcggcgattcggactatttcagcaagcagcgttggaacgataaatccgattccaaaaagaactccggccgactggacataaactactaatccgagtcggatatatctggctagatgagttataataaatagcttactatcagtcactaactctctgagtctgcaattgcaacagtacattgtttcgatcgtggccgacaagctacttgatcgccactttctgcaattggaacagtacattgttctcgatcgtgtccaacaatctgctcgatcgccatggccaccacgctgcagagctgtctcttttcgtgttcgccggcgacggcattgtcgatcaggaggagtccgcttacctcgccggccatctcgccggcggcgagccaacgtaattgctgcctcccaagactgaagacgacgacgcagtcctgcaggataacgacggccgcccgaccgcctctgacggcggtgcagtgccagaaaggcgacggcggcggcgcaccgccggcgccgccgcgacgaccatccgattatctgcaagaggagaaggagaaagtcttgaagcactaccgtgaaatcatctccatagatgatggttgtctggtaagtacatgtacacgtgcaataaatagttcaccattttaaatttctatgtgttatgagcaataaattaattgtgcagtaattttgatgatcttttggtgggaattaattaaatgcagtacgctgaggccacggagaagtcggcgggggtatgcctggcagcaaaggatgctctcgtcatggcttctcgtgtcatggtaactagtatggtggttcgtacagattgcgcggctagcatcattatattttctctcatataataacatatatgtcttctcaacatattatttaaatatattaaaatgacaacataattttaaattttgtactaactttacgaaactactaatgtgtaatattcatattgtattttatatacgtgttagttactaattatttttaatatcaaattttagttatttgtaaattatattcctatatgaactctagactcgtctttcaatatatttattttaattccgaattttcgttatctgtatttgtatatagactctaggctcttcttccaatattatttatttttaactttgaagttttattatttctaattgtttttttatgtagactctaaactcatctttcgatattctttaatttttaatttcgaatttcagttacttataaattatattcctgtattgactttagattcttcttctcatgtttttttttaaattccgaattttagttatttgtaaattgtatttttatacgaaccctaaactctacttttaattttattatatttattctgaattttagttagttttaaattttaaattcctatatggactctatactctacttctaatattccttatttttaattccgaatttctatcgtttctcaattgtatttctatatggactctagtctcctcttccaatattccttattttttaattccgaatttctattgtttctcaattgtatttctatatggactctagtctcctcttccaatattccttattttttaattccgaatttctattgtttcttaattgtatttctatatggactctatactctacttctaatattccttatttttaattccgaatttctattctttcttaattgtatttctatatggaatctatactctacttctaatattccttattttaaattccgaatttctattgtttctccattgtatttctatatggactctagtctcctcttctaatatttcctatttttttaattccgaattttacctatttctaaattgtatttctatgtgggctatgtttttatttttctccgattaatatgggaatttctaggccgtgagtgcgaacgtggagatttctttttctattcctttaataagttaatagagtaaccatctaattaaatattctactgtacctctcactaattactagtactagtattcttcttgattatgcaacacaactcttactctaattaacgtattgctttttccgaaaatttcagcatactgcggagctcaatctcgctgcgccaaacgaaacatctacagaaacagtccacagggtacgtaacgctcctactctagaattttttttttgttttgttgctacttccaccatttcttaatagattacattgttaacttttaaacataagaattaccatccattcaaaacaattatgtagatataaaaagtatatataaattatgtttaaattccctttaatcatgaaacaaattacaacaaaataattgataattatcttttttaaaagaataataaaatacatctaaaagtcaacgactttaattatatcttaaaatgatcgcaaaagcaggattaatatagctagcaaggtttagtcatgatcaattgactaggtggtgttcttttcttctgaagatgaagattaagtttttatgcaaaacgaggtggtattaacatataattgattgagttttaattattacaaacttgaaaaatagactaatatgatattttagagcaactttcatatagaaaattttagcacgaaacgcaccgtttagcagtttaaaaaacgtgccacgaaaatcttcatctaactcttagtttgagaaaagaacgggacctaagattctttttaactcttgtatataatgaacagactgtgaggatgtacgtgaacatcgtgatggcggccgcggacgactcgtacgatcggaaggtgagcaagaagacggtggagtcgtacctgcgagcgctgcgaggcctcgcggcggtgacccacgtcttgctggacgacgccctggaagccgtcagccacagggcgcccatggatagcctcgccgagtacgccttcaactccgacgtcaagcccttgtacgacgacttccaggccgagatgaacacgctcgtccacaagatcgacaaggccttggatccacacatatgcagggtatgtatatatgtaatgtacaacttggatttgttattatcgttgtgttttttttcgtcgataggttaacaattaattaacattttattattgttggtgctttggcagattgcagtgtgggtaatggcgagggcaacgcagattactgggacaattattggactcatggtgtctcgtcggaagagggcactagagaacgcacggagcaaaatggttgcagattcggcgacaatttgagatagctgatagtcatgggggattaagatagtagcctgaaatttttgttattttagtgcagatagtacggactattggcccatggcacaacagtcatcaaatgttttagtgttcgttttgtaattaaggcatgatgaaatctccgccttcaccaccgggttatgtgggctgtacgtgcctaattgtattcatcaaatgcatgatgttcctctatctagctcctttctagtgttgttgtgctaatcctgctgcccttcacctgatcaatgcagcatatttttatactaattagggcctttgaataccgtgaatagaataacagagaagtagaataaacacatgattatgttagaaatgcaatccagctaacaacagccctaacctaaccgatccgtttttctcttttttgaaatttttttatcctcgaaaaaaattgtacgtggttagctattttgtaaaaagctcctcacgtttacaccaaatattgtatacgtcctcaaaccgacagacatccggttatcacttatccataaaacatctcgtcttccaaaaaaaataaaacgtgaataagagaaaattttgcttctaggggtagcgttgtaaaaaaacataggggtttttctaaaaatacatcctaatctcaccccacaatactcaaaccctaccccattccctccccgtctccttcacctcagcgccattgccgcgctaccccgccatccgccatcccccgttgccgtcagtcgttcccccattgctgccgccacctccacctatcgtcacactactaggcgccgccgtcctcgccggcaaatccaaccacctgggggaaggagagggtcgcaagccattccctcatcctccgggagctccctagagcgctcctaggcacccatccgcgtgtacctccacgcgccgttgggcgccctctgctcgccaccgcacatggccccgtccccgcccaccacgcatgcgccatcgctaggagccatcatcgcctcctgcccaaggaggtgctgttgctcgatgcggttcagagcaaggcctacaggggcaggctcgccacggccgagtccgtgatgggtgtaagttcaagtgtcttaatttggttttggtgattaatgacaaatctaactatatgagactaatcatttttatgagcctttctttgactagtctcatttggatatgaaagtaaaaatgatgagcggtatgtattaaacttcaccatattctaacttggtctctcttgtggatccaaaatatagcgtgagcttcctatttgatctttattgattatgtgcatatgcgttccttcatatccatatgtatgcacatcttgagggggagtttattctatattttgtttattataagatttctatcttgatttgaaatcatttttcatctcatatctctatattgtttatatcgggttattatccatcaccaaagagagaaaagattgaaagatcttggattaaacaatttgtgtaattgttactttggtgatagatgataaaccgatgtttatgggattaacctctcttttgcataagttgtctactaggttatttcccgataataagatgtggaagacatgcattcttttgtgatggaccttaatcatgacaaggatgaaatgcatggagataaaacgatatgtaccacttcttatctcctactttttgataggttcatatatatgatttccatgctattgatatataagtgtgagactaatgtttactcgaatgttatcttatttagtctcatttacattgagaacatggagatcatgaaggtatatgttttatgttggtctacatcattactacatatgccttctctatatgtataggataaacccccattggtcattctctaattatgcatacacttgcatctcttgtatatttatttgtatgcatatatttagggggagcaaatcctatacatttattgtgcatgttctagatccatgttgttcacctattatttatattggatatttgcacttgagcttgcatacgagtatatgacacttgtgatgttaatgaatactcaacaaacatatccatatctttcatatgcaaccggttggtcatcaagtgaaggatggcaaccgatttgttgagactaatgttctcctttgatgtgtgaaaaggaataggtcccactacgatgaggctaatgaatgacaccatgggttagtggtcaccaagccaaggacatcgtcatgttggcaataatgaagtcaagcttgtgatgagaataaagtcttgacaaaggatggacaagacctcggcataaacatggttcaaccggatggtcacaagtgttgatctcggctcaagcttgaccccaagatggatggcgcaaggcaaaggtataatgtagctaagaatgttttcttagtcttttcccggtcttggtgtttggtgtagaccggatttgctagataggcgccgtactatcaaaaggagtctatgaagcgagcttgtgaatgatcttgtgccatattagttcatatgcatgtaggtgtatttggtgggcttgtctagccaagtgtgatgagttttctcaagtcctaaaccaagagagaagtgggcatgtccaataggagtgagtgacatcttgtgggtatgtccggtggatgtcctttggagtgtgagccctttatccttgacttaagttgtgtttcttggatggtttttttcatgggttggatggccctttgaataatctttccatagagtccaagaacgccaaattccgagacccgagtcaagagatatcaccgttttactaacggtcggttaagctgaaaagtgacctgcggtctgaccatgggccttaggccggtctgaccgggcctgttagccggtctgaccggcatgataaggcttgtctgaccggccccactggtctgttgtactggtctggtttttggtggcgatacagagtcgccagagccacaaccggtcagaccgagccgatggcggtctgaccggctactacactgcggtcagaccagccaggttgagtgggctcaatgattgccctgtaacggctagttttctagccgttacaaagtagtccggtctgaccggccactctatggcggtctgaccggcagagcacagagttggggatttcgactccaacggctagttttggtggttgggggtatatatacccactccccagcagcaagggcaaggttttggcactccattgcattatcttgaacccttgcaagagctctcacacccttgtgcacttagcttatctagtgaggtgttagagagtgagttaagccaatccaagtgcattgctttattgttttagctagtatggcacttgatcatcctcggcaagcatcctagacttgttactcttggaggttgccgcctcctagacagcttgtataggtgttgcccggtgacctctccgaggagattgtggaggaggcctggcgccgtttgtgagtggtttggagttcaccaccttcagagtgaaggaagaactaccccgagtgatcgaggcttgggtagtcctctccgtgggccggctcccgccttgcccaccccttgacgaagggggcgtgcggtggcttcgtggttgagcggtggagttgggctcgcctcaacggggattaggaaaccggcgagtttccgaacctcggtgaaaaattccttgtctcttgtctcatttatttgttgcatttacatttttgctatttacattcatagagacatatttgagcccatatcacctaggtttgcaaaacttaacttagttgcttagttaaccttgcactttaccttgcctagcaacttaggttagttttgtttaagtgccattaagttttaaaatcgcctattcaccccccctctagtcggcctccttgatcctacaatgggtaggatcgggagagaaaagatgagcaagggtggatgcggcgttcgagtcgtcattctcggtggcggcagcgtccaagttatcgttcccgatggtggcggagttgatgtccaggaggtgacggcggagttgacgtccaggcagcggcggcgttgatggcgtcgatccaggcggcggttggcggaggaccacgaagttgtgccacaatcgatctcgccggaggaggaacacggcggcgccggggggaggggggagagaaacgcggcggcagcgcagaaaaggatggaaagtgtgagaaattccacctgtggcccgtatattcctcccatctattacacttgaaggtatatttttgccctcccacctctcgtctacgcgaggtactgcaacatggacatatttgatacctcgcggtaccaaacactaccagctattggatcgggccagatccaacggccaggatttggtaccgcacggtaccgttagaccataaaaaatctccttatattatgggacgaggaaggaaagtaccaaaaggaaaacaaagagcaggagtaccttgaagcgatgatcatggccgcacacgttgcggcggcggctcctcgactgcttgcttgtagatggaaccgtgtggctcctctacccacttcgccgtcgcgacggcctctccaggcgcaggcggcggcgcgcatggaccgcccgcgccacgccgtcgtcgttcgctgcaagaagaagaagaagggcgccgccgatgagccagccggcgagcccggcctagaggagggtggtgatccccatcaggtatatatatcaaaactaaccgcttccttaatctgtcattagtaattagattagatctaaattgacagcacattaagggcccctttgaatcttagggcccctttgaataaatgatttatttaggaatttcgtaggattcaaatcctatacgaaattttcctatttggccctttgattcaaaggattgaagttttccaaatcctataaaattcctatggaatggcacattgcatgtggattttggaggaaatttggcaagagctccaacctcttggaaaatttcctttgagtctatctctctcatccgattcctgcgtttttcctgcgctctaatcaaacgaccattcctatatttttcctgtgtttttcaatcctttgtttgtcaaaatcctgtgttttcctattcctctgttttttctaccctgcgattcaaaagggcccttagtaatgagaaaacataggaataggaaaaacgcgggattttgataggaatgtaagtgtaaaacagaggattgcaaaacataggaaaaacacagtaatgatcatttgattggaccgcaggaaaaacacaggaattagaggagagataaagactcaaaggaaagtttctaagaggttttaccgcatgttagaattcctccaaaacttgcatggcattagacaatctataggaattttataggattccataagatccatttctttgattcaaatggctacgtaggaaaaatttctataggaataaaatcctttaaaattcctataaatttcctttaaatcacagggggcctaattgttttttcttctattttagtctccatcgtaccagcaatatcgtaagtttcaagacgtaattgaccagctccagcagtgtgcggccgaattaagagctcgtcgatcactcaaaaaggacaatatggtttgttctaagggatgtgcttctgtgctcagcaaaaaaaaaacttgcacgaaagttaaagctaatcagcggctgtgattaaaagggagattagcacttaattatcattagcgaggggtaatttcgtccaaagatttttgagcccatatccagcccagtccatctgaagcgatccctacattctaccagtccaccacggcgccgctcctcaaccgcaccgccgcgccgattttcgccttgccgtcattgctctgccctcttcttcagttaaaaggatacctgagcaggtatggcctgagtgacagtaaattcagtttcagacttaacttgtctcctcaaagatttgccttcaagttacagaacagagtcaatgccttattgctgcaactcgacttgcaaatttggttgtacatatacacatctggcacaagcttcatatttacaagcaccatgaaaacctgatatgcagtctcagcgctgccacttttcaatagaatcgagagaatggcattcgcaataggtgacaatggttgggcggcgccgccgacgcgcgggttgtggaggagcgatggcagtgccgacggtggcggagggaggcaggaagcggcgtggggagggaaccgggcggcaaggcggagttgcaaggggaagaagaaggcagagcagcggcggcaaggcgaaaatcggcgcggcggtgcggttgaggagcggcaccgtggtggactggtgggggtggggatcggactgggctggatatgggctcgaaaatatttggacgaaattacccctcgctaatggtaattaagtgctaatctcccttttaatcacagccactgattagctttaactttcgtgcaagtttttttttttcggagtacagaagcacatctctctattgttctaatcattgtcaccactcaccatctgcctattgctttatctccaatagagaacagcaaccagtcactcacatcgggattgtagttaatgttgactaatcgaaattttgtatatttgtatatagagtatttgtcccaaatagaaacgcctagcacgtacagtacatcatctaagttcaattaacgacaagtgaattatttaaacaaagacaatttagtgaaagacatcttctgaatttagtgcaaatggtaaacaaacacaacgacgaaagcatgcattagtaatgtcaggaatcaagaaacctaagtgatgaaagagaaaatttcaccagattgttcaacaacggaagcagtagtaatgtcaagaaaccaaattgaaaggagcaagctagctaaatattatatagctaatgcaaggcttgcctcgcttgctattgatataatgtaacgtcaaaactgttgcactgttgatttcattgtttctgatgccccttttgttttgcaagcaggacgatacaccattcaattatgagataaacaaaattagagggtactggacggagatacattcagcgaagataagttatttggtcagtactgttcataatatgctggggtttttattttgtttagcactaaaacaggtgaacagtgtccacctattattttgattagaccattggtttttgtagcggcaatcagcaaaaggaagaatcattatatagtcaaaggatacatgtttgttgattctagcaattcctaagtgtgtgttctgtagcgtgggttaggaactaatccccacgcatgggaaatagagtgatagactagcgtataattatttaagtattagctaaaaacttttaaaatatgaattaatgtgattttttaaagcaatttttctatataatttttttcgtaaaagccatattgttttacagttttagaagcgcgcgcacggaaaatgagtgtgtagagggttcggaacctcaacaaacgaaatcagtgtaaggagatgtataggggcttcgaataaacacatcatggttcaataaaaaatgctaatagtagtaatacaaaggaattatgagatggttatgaattgaagctgtttcagtaacactacaatcagaattaaacatgcatttaattatcagcgcatatctaatacaacattggaagtggcatttccactccaagacaaaattctaatcttcagaaatatgctgcaataagcaatttcgtagcggttatataatttaatttagcgcctcaaccttcaactttaggacttgtgaatatgaacgtaaaagttagttgcgttagtgcaaaatcaaaagttttaatcgagataaacaagttcaataataatactacgaactttctttcaaaataaaatatcatatataagacattggagatggatgtgtgagctcttgacattgtggctatgtgctataacttcaaatgtactccctccgtcctaaaaaaaaacccaatcctaggtttgaacttggacaggattgggttttttttatggagggagtataatataaatataaattagtttgttgcaaacttcatccatatataataagcaccgtgaattttactgaaatttaaaattgtaggattatgtcgtaatgttactatgaactttttgtcttgcctgttgcaaaagctgatcatgttttatttggtgagtactgtaggatggacaaggcaggatgttaacaatgactcttctcttaagagctaaagatgctatcgagttggcttctagaattatggtaaatatgctatcttttaatatataatatgttagctgttagatttaattgggtaattgatccatttaaatcaattaaattaaataaattccaaggctcgttatgctaggaatttatgtgaattcattcttttatgggatatcaatgggatgaagagttttgagaattaatccatttgattaaggaattggtaacttatatcaattagtcttaattgatggatggttgatggttgtgtagtggaggatggttcatggctagttgatgacaattagttgctctattcctcttgctattccattggtgatggttgtgtagtggaggatggttgatggctaattgatgagaattagttactctattcctcttcctattccatgactcttactcttcatcttccatttcctcttataaaatgagaatggatttgatctcccgcgaaagaggaagacacactttcatccattttccaaagctgttgctgctacggtaatcccatctcgacgagtgtgtgcacacccgttgggagagtaggcctccgaaaccacgcgttgctgcgacgtttgcacagacgggcgggcgatcaggtttttggggagcgcaaggcgcgactactcactgttcgtcaacatctacttcatcttcaccaacatgtcgaacactggagacaaggagaaggagactcccgtcaacaccaacggaggcaatactgcctcaaactccagcggaggaccattcttggggtataaccttattacattatttcaattagaagttttactgttaatgttcatcgcaatatcaacattgtgtcattatgtgattgttgatgcttattcaacgttaagcatgctcatgttgattacattcaccactatcactggatcaaatcccattgtaaatatcatgtttattatcttgttattttggattaaaatataccgaattattaccaaatttccaacattagcaattttactgaactttgtttaaccaacttctccactcttgtgaaaaacagactgaagctcatttgagagctcaaacgccaagtgaaatttcgctgcatacggtagatcaggtaactcggttatgcttttatttggatgctcttctttgaccgaatcttgaaatcacataattttggaacgtactataaatttctctgaacatgcagaccgtcaggatgtatgtatcgacctttgttaagactgccgaggacacttaccataggaaggttgatagagcaaccattctttcattcctctgtgctcttcaaggtttggctgcagttagccatatcttgtttgaagatgctttggcttttgttcgtagcagtcaaccggattacagtccaaatcatgatgtcgaggtaattaaccgttactatcagcaggagataaaacgtttgataaataactttagggaggcttcaacaaccgaagcacttgaggtatgccactggacagagtctccccttcttttccgataatgttgatcaaattttgatcagatcagatgttgataaaattttgatcttgtatctgcttgacttgcagattcttttttttttgaacggaaaatagcactagagtgtcttttcattgaatagggcaggagaaaatacaacccctaggtgcaacaggaaaaaatcgaggagctgtagctatacactatacataatgcgggattaacttgcgcagccgcttagcccctgctaaagcccaaaggctagcctcttctttgatttttgacaagaggaaactcgttgccacctctttgtggtcaaagattcgccgatttctctccttccagatttcccatacaactagaaggatgagtgatcggagtcctttcttcggaacatttggcgtgtttgcgatgttctcccaccactgttgtactgattgtgcctcctcccattgagccggctcaatttgctgatatcccacccatccagcaacaaggccccacatccttttagtgtatctacaagtggcaacgaggtgcagcgccgtctcagcctcacagcggcacataggacaacatccgttgttttgccaacccctggtcgcaagtcgatctaaggtccaaactctattttggatgatgagccaagcatgaaatttacatttccctggtgcccagactttccagattaaggagttgaagcttgtgctcggcgttccttggcattgcgcatggtaggccgaggaggccgtgtagcgtccactacttgtgaatttccaggtaatctggtctggttctccagtgtctaagtgaacattccggaccgcttcccataagcgactagttgttcgacgaggtgtactgtaataggagagtgggattccaaagccaaatcctaaacccaggcgtcgtcctcctttccatttcgaagatatctccctctattcttagagatcgcgtagaccagcggcataaggtctttaggtctttgcccctcgatccaggcggagtcccagaagcgagtcgtgttcccatctccaattgttatctttgttgaagcggcgaatagactcctgtcaatttcatcacagggcgtttccagtcccacctatggcttggtcaggtccttccattcgtgccataaccatcgtagctgcaaggccctcgtgaatttctccagatttaggactcccaatcctccctgactggttggcaagcacgtctttgtccagttgactttacatttccctccggtaatgtctcccgtgccggcccatagaaagcgacggcgctgcttatctagctgctcgagggattctttcgtggttttcaaggcagtcaggagataaataggctgcgccgtaagcactgatttgatgagcgtggttcttcagctaccgccatgtttttccccatccaatttggacttgcagattcttcatagtacggttaatgatttaacgcagaaagtagcatcttatgttaccaaaatgactactcttcgcaagagcacactagcccatgtccctggtaaatctgttgttcttgtgccagtcctatttgcaccaaaataatattttcactttagcaagttagaattacattgattgttgctatatatggtttgtgtaggccgctccattgcatactgtgatgctgccccaccagatgacaggcaaaatgagtagctgattgattaagttgatgcttcagttgagatgtatcatcctgtctggatgaatccattatccatagcaggcaacgaaaacatgtgcaaaattaagctttcggtcaacaatatgtgtccttttcattggtcttgaatatatataacgttattattcagttattatatatggaaggactactatttgtttcaaaaaaaaaaaaagaagtactaggtttcttttgagcaaaaaaaaactactccccctatattttaatgtatgacaccgttgactttttaaccagcatttgatcattcatcttgttcaattttttttgtataaatataaaaatatttatgttatacttaaagaacatttgatgataaatcaagtcacaataaaataaatgataattacatatatttcttaacaaaacgaatggttaaatgtgataaaaaaatcagattacatatattgtcataacttgatttacatatattgtcataacttctagtccaaaataagggccaatatttgcgctaccgagtagcgacccaatgcatggagccatatgtaaagggattactgattcccaaattatgaaaatggtcaaaaatagagaggaggtgattttctgggaaaaagaaaacctcaccatacgggcctacattagcacggcaagtaaggggttagttttaagtgggtcgagatgggctgggccttacgttccttcccacaatatggcccgtgtattagcacggaaagtacggctagttttaattgggctgacatgggttgggccaaatgttcccacggactccgaagtaaagcccttcttcttcggcgccggccaacttcgctcgccgccgcacaatccatttccataccctcggccgtcgtgagaaacacccttaatctacactgggatcaactcaaccaactctgaagtatacacgactttcgatccagccctaattcgatcgtgtgccgtcgctgatcctttttacttaacaattttttttaacagctgatcgccaccgtaaatcctctttgtctctgttcggctaggcgattcagttgattaacaatgcagccacgaacagagcagcagaagcttcctcatcatgggtaccgagctcgaattcgccctata

SEQ ID NO: 5464 - DNA, 7684 bp, Oryza sativa
tactgcctatagggggtccttggaggttaagcagccgatccatcatcagagttgatgagatttctcctcggcactgaatcttgtcggcaaagaataagtcgattgggagttggccaaatccaagttgtctagccgagctcatcaggtggtaaaattcataagagacttggatgtttctgccctgatgaatgccaacaggaaggatgcatgggctgattgtagctgtaagaacttttcatgattgatgtcttcaaatctgaagtctgatgggagttcaagatctgctgagtcctcgtaaggaaaccaaacccgggcatctttctgaaagccttcataaaagctgcaaaactaatccttaagcagctcagccgacagctttgctctagcatcagttggcatagatgcatattctccatatgacatgcatctacgatgagtgcgttcttctccatcatcttccacaatcggctccaaccttggaaattcagcttctgtcacagatggccgattgacaactttcataactaccaggtttaaccaagtctgcagcaaccaccatggtccacctgccccaaccactgagccgacggctatcttggccgatgcattgttcaacatttggtatagatagcgggcggagatctaaccgggggtgaaatcgcctggggatcgccttgtgcatcggaggaatcgccggagagagagagggcaaagttaacttcggcggtgaaaacggaagaaaacggtgtgagtttctcgggtgcaacggttagtatttaaagcactggaataacggtcgggaaatggcaaaatgcgaaacttgctcggagtcgatacacggcaaatctgaaacattaccaaatattccggactaggggggcatgtgttaacaaccaaatttggtaatatcaccatcggaaaagaggattagattgaagcggagtcaaaggcgaagatcgattcgggaacagagtaaaaatcggctggagtccagatcggctacgattgggatcggctaagtcctagtcagactaggataaatgatacagccgattccgacaatacgacttgtgtacgacatcgggttgagttgatatgcttcaagatgattgccacgcatggatagagtcctgagaaggcaattgtatctattaattaggatattttatataatttccttagagatatgtttgggcaaaaatctgccgtaaagacttatgttatcttagagtttgttagagataagagtcgtgtccgatatggacatagtttgtaattctcgggtataaatagaccccgaaccccatgtaattacaaaaaacacacacgttcaatacaatctcggcgcatcgccaccctttttgtttttgttttatttcgacgagttcttgcttttgggttgagctgcatcggtttcgatcttcaacaagaggtaaaacttgttatgacggcttgcgttcttaggattagtgcttccatctttatgacactctaatcttgtttatgtaattcgttgagttatcatatatcttacataatctctggcattattgttatttaatctacaatcggctaacatatgtcggtagagagcagccgattaggttagatatcaatattgacctagattatataggatatccaccactatatgaaacttccagcggcttgattgtctagatattgttcttctttttatacttaatgctgcatcagttgagtttgatctactaagtcgtgtttagaatatcaatctctagcctgccctctggttgccgattagagtagcgtcggggtttcagccgatcttatctgatttaactacatttgctttatgtgtttcattgacatgttaaatctaccgtttatgtcaagatcttattgcatctaagtatattaagcttctgtttggtatattctgcttgttttaatatcttaacatagagttgtatcagagtattagccaatacatgctagatctatctgatcggctacgctatgaacatatgtagtcttgttgttaatatatatttcgatctaagtgatttatactgtctcggcatggcgaccgatctatcccaatcagttgattcaagtatatatcgacagcaggattatatattgttaatatgtacagccgatcgagtagatttagttctttattatctatttacaaccgccgatcgatttaaacatgacattggctcaaagataaatgatacgtcatcggcatctagccgatcggctatcatttatggatttaactacggtttctttgtctttatttcttgttgattgcatgaccaaatcaactggcatgctagcatacccaaaggcaagttttagacctgcactggagttaagcagatctcctaggcctcatgtttttcatcaacacgcttttggcacgcctggtgggaccgattagaagtcagaagtcctctcatggacggcaaaccgccagcatcatcgtcctcggctagtccgggttctgttaaagagaaggtccagcaattagaccaatctgacgttaatgagggcaacgtcatgaccattactctagacaaattgacacctgatcagaagaaggagtttgaagcaatgatgcagtaagcacggaaccagttcttgaactcctttatgcagacccgcaaggggacagtggtgcaaaagtatcaggtgacagtagtggctgatgtccccgggaccagttcttctaaggatgggggagtgaaacaagctccaaatggctcggctcaaccgagcaacaaaggtgctgcagatgattatcaaggaaatcaaggtgacaactctcagggagctcaaggagttcaaggtgatggtttccaaggagttcaaggtgacggccctaatcaagacagcgatgcaacacagtctagatcagggtgcgccaacctcacgcacgcgaggacgtggcacgccccgatgaagatcccgttggacgtctcctcgccgatcctggccgcgtgcttggaggggatcgcccccatcgctgtggccagctccgcgagcgaccacgtcagcgagaactcgtccgggttcgctgggatggttatcgtgacgccatactcctggcgagttggtgcagaccagtgtacgagacccacaacgaacctcggatctccgacatgttgttctcgagctccgacatccggtggtcgagcccctgcagctgtctctcattgccggccaccagctccctcatctggtttgctgacgcgtggcagctgctcggcgcgctggtttgctgatgccgccgccgccctggtctcctcaatctcatggcctacgccgtgagcaccatcctggaggatgcgctccagctccgcttggagctcccccgaggtgagggcatcggcaggcgggccccgagcaggcacaaggccgacggcggggctactcggcgtcacctcccggtccctagtagcgaccacgacgtctgtcgaggccgtcgcaggggacgcgctggtagttgcaccggtcccaccttgcgtcgccttcgcccgcgccgccctgcgaagagttttctctttctcataaagctaggtgatcaagaattcgtgaataaaaaaacttcaagaacgtctacttacttctcgccgattgtcacatgcctttgcctccgttgaggaggagttgacgcgtccgagggctaagtgagatacgacggtgtgaggtccagtcatttcgacaacgtgttaaaaaacaagagagacttaccgccgggcttggtgccttccgactggtcctgagtacggaggagaatttcctccccttcttcgaaacgtagtttccactcgtggtagcagcagcagcagcgtcggacgcctctttggtgacgccctccttcaacgacgtcgccgtctggtggtccacaagtggcccgatgacgtccgtcagagggagagcctgcataacatgaagtcacaatgcgatcttggggagaaagatgtaaaggagtcatcgagtacactcacgttgatcgcagcctcgcgttcagccggacccttctcccaaagggggacggggacgtcgctcgctgtcgctggggcgctgatcatcacctggccgacgcggcgtgccacggtgtcgctgtccaaacctgtagatcgagaacaggaactcgataagtcaggagaaacaggcattcccagaatgaaatctgaaatacaaggaaaaataccccgaggagagacccgagtcgtgtcctctggcccataatcgaaggccggatggatgcgggcttggagcggttggatccgcctacctacgaagtcggcagcgactttgtaccccgacaacccccgtattcggaggtcatcgatgatgtcgatgaaagactggagggagggagtcagggcgggtttggtggtccactctgggatcttgtctggttgttcttcagggacaacaaggacaagatctgagttctcttgtcagggttacggataaggtataccctatatccttggacatatgttgtatactgatacggtagacccgtgcatatatgaataatttctgtatacgttaaggaaatctatcacgtaatagaaacaggatccacaaatagagggagtcctactcggacaagactgggtctttaccatatcgtgaggggtccgatatctctgagtcctatttggagatcaactgacccgctgtcacgcccagaaattcacgaaccagaatttctaagctgaatgtgcattaatcccctgtccaggaccagccagggtacacaaacgacaattgttgatatacagatccacgtcttacaaaaatatattagattacaaatgtagcggaaaaggtaaaagcgcggcgactccactccacagccaatccttgacagcagcaacgaaaccaacctcaacgagacagctccaactaggaagatcttcagctctggtgtgggggaaaagagagcaagactgagtactacccactatactcagcaagtcataccggaagagaaggtatgatgcaagatataaccaaaggaggctagaggttcatttgcaataaagcaggcatttaaaagaagtagttgaaagctgtaaaaaagttgcagtaattaattaatattaacaaatcactactcaacgctacaccacgttgagacaggcccaaaccaccacttgaactaaccagttccattagctaactaggagtgagactaatcacggtgaatctgattgaccgcccataaccacgggcacggctattcaaatagttttactctgatcagaggtgtacgactctacccacaaaacatagccccatgacatgtttccgtgtgccaacatgccaccatgacatactggaaagaggccgtgacaggacccttcgcataaccccctctaaccgatcgcaccacacctcagggttcgcccccgtccccagcaggcaacgggcagcccgcctctcgtgccacagtgaatctggaagctgatcaaccgaacacccccgaccgacccaactccatcacgcccacccttggctaggtacgtcatctagaggaaagctacactacaagcccagccgttgcccacgctggcttgtggtaagtacgatgaattcttccagggtttcccgcaaaccggtccttaatcgccataggcacgactagcaaaaccatgcacccacagcccaccatgtagtgtattttaattaactaacaccattgcggtggcactaatccaaagctatgccaataatcaaagtctatgcattagtgtgattcccccattgtgtactagttgaactaagcacggctaagcattccctaaaccaacatctagtcattttaaaacccaagttatcaatggcgtaaggtaaacaacatatggctgagtaataggaaccatcccacatgatattgtaaaataatgcaacatttaatagaaatgcgggacatttgtaaattgggtacaatatgatcaattgtaatacatgacttgccttgctctcgcgctgatgagaccacaacaacgtcttcgagaaaccgcggatcgacaaaacgaccgaaatctatgcgacaaacaaagcacacaagcaaaacatgctataagtctactgaaacaggaaacaaatccatttttaatagactctttgcatttttatgaatttactaagacttgaatggacttaaacggagctcgaatgaattagttatgatttttagaagattctctgtgtttttactaataaagaaaaggccttaattgatttattgcgctataatgcccagggctgacgtcatccaagaggggggcggcaagcaggcttatagagcgccggttcaccgtggatcgggaccacgcgggtggtccaccgccagtccacgggaccaacggtccggatcggccgggagccgatcggacggcgcggcggcggccaggcacggctcgccctggcacaaagccgaccggccggccatggcaaggcagcagcggcgcgcggccaccggcggtgcgggagatggcggcgactggcgcgaggacgacggcgtgcacaggaggcggcgacacgcaccggtgaaggagaggaggagaggggggtttctcaccgaggttggccggcgcgagaggagacaacggcgaacgacgccggcaagcagtggacggcgagtcgagcgggtggacgacatccggagtgacctaggaaagcaaaaaaaaaaaggatttagagggagagaggtggttcgcggcaagtggcaacgccggccgaaggcggggaaaatggaggggctcaccggcggcgggggaagacgatttccggtgggatttcagcaacgggaggcggcggccgaggtagcttccgcggcggcgaagctatcagcggcggtggtgcggcgcggcgagggcgctagtggcgacgtcgtgcgaccggagatgggcggcggcggcagagctcagggagagcggcacggcggcggtagagagcacgggaggacgcggcgagagcggaaaaagagagagggggctcgggggaatttttataggcgaagcgggaggctgacgtgaccggggaggggcccaattcgccggcgacgtggggaggtggagagagagagagagttgggggatttcaaatcccccgccatttgcgggctagcgcgcttgcaggagtcgtggggaaggtgggcggcgacgtggagggtgtggagtggagtgcggaaggcggaggaggtgggcggcatcggcggttggggtaggcagcggcggttgccggccggctagaggaggaagaaggggccgacaggtgggccccacctatcggtgaccctgagaggagcggaaggcggcacggactgggccatggccacgggccggcctaagaaggagggggtccgcgcgcgggaggagagttgggccgacggcccaacaaaggaaaaaggaaaaaggaaaagaggaaaaaggaaaaagattttcctggatttaaatattgcacatgttcatttttaattgattaaaattatctccaaggctctgaaaattccactaaaaatcatgttagcatattttgacatgtagaacccaagaaaaattccacatgccatttctgattattatttgcatttattaattaaggaattagctctaggttaattcaacaatttcttcagaccatttatttaacaaattttaaagctagaaag

SEQ ID NO: 5465 - DNA, 13071 bp, Oryza sativa
  unsure (1)..(13071): unsure at all n locations
ctgatgcccagttagccgacttggcttttcagggtatgatccctccaattagggagaaattctcatctgaggattttgaaaacttgtcccatcttagacagaaggtgaccttgcatgaacaaaggtttgtggaggctaggaagaattccaggaaggttaatcatgtatgtccttatatatatggatcggatgatgaagatgatgattctgagatagatgcagccgaatgggtaagaagtaaaatagttacaccatgccaatgggtaaagagttctgaaaagaggaaaggtatgactttgatatcactaaggccgacaagatttttgacttgctactccgagagaagcagattcaacttcctgctggtcacacaattccctgctgaataattgggcaagaaaaggtattgcaagtggcacaattctgggtctcataccactaatgattgcaagatcttcaggcagcagatccaagcggctattaaagggggcaaaatcaaatttgatgactctaagaggtcgatgaaggttgatggaaatccttttcctgttaatatggtgcatacagctggccgaacagccgatgggggccgtgcaagaggttttcaggtaaattcggctaagactatcaacaaatatcagaggaggtatgacaagcagcaggagaagcattatgaagaagatgacgatggctttgatcctcattggggttgcgagttctttagattttgttggaatgaaggtatgaggctgtcgtctattggggactgtcctaggtgcagtgatgttgcggagagctcaagccgatcatatagtaggggcaatcggctaaggtagacaagacttcctgttcatcaaaggccgggtccagtgaaccaagtacatggccaggaggacgatgaaaacagaaaaaatgcatggtgtccttctggtatctttacgaagaatcaaaaaagaagggttcaaagattgaggagcagggagcgctctcaggaagtcgagcaggaaatcaaccatcggctgaagaagacaaagccgaagcaggagtggcgtgttaagaatcaagttcctgtagttgaggaagccacagccgatgaagcaaaaaggttggccaaaggaaaaagtgttgtaactgctccgatcaacatggttttcacgttgcctgccgagtttgggaataagcaagccgatattgacgaagttgaagaagaatcggctaagttgattttgtcaccagagcaggcagtttttgagaagctagaggggacggagaatcggcatcttaagccattgtatataaattgttatgtcaatgggaagccaatgtccaagatgatggtcgacggtggggctgcggtaaatttgatgccttacactacgtttaggaagttgggcagaaatgctgaagatctcatcaagacaaacatggtgctcaaagactttggcggcaatccatcagaaaccaaaggagttctgaatgtggggttgacagtcggcaacaaaaccatccctacaacattctttgtcctcgatgggaagggttcttatagcttgttggttggaagagattggattcatgctaattgttgcattccttcaaccatgcatcaatgcttgattcagtggcaaggcgacaagattgaaattgtgctagccgacaggtcagtcaatgttgccagtgccgatttagctctttgggagatggatggtcttgattgtttacctggaaaagtttgggatggagattttctaaaagtgtccgattctgatatacagccaattgaagatggagaacccaagctattattttgagggcgtcgtggagagttcagaggtctgcaacaaggacacaatagatgatctcgatgacaaacaaagacagggttttatgtcggccgatgatttggaagaaattgatataggtccaggtgatcgaccaaggctgacatttattagtaagaatttaccggcagagtttagaaccaagttgatagagctgttgagagaattcagagattgcttcgcttgggagtattatgaaatgcttggactcagccgatcaattgttgaacatcggctacctatcaaaccaggggttaggaaacaggaacaacctacgaggagatgcaaagccgatatgcttgaacctgtcaaggctgagattaaacgattatatgatgctggttttattcgtccctgccgatatgctgagtgggtttctagttgaagatgcacttaaaccccctagtgggttttggtgattaatgacaaggtggttaaaggtgactaacgtgtttatcaaagttattcacggactttagtcccaaagcgagttgtgatggctaagaatgcaagtagaccccccaattcgaatgttcctaaagtgcaaagtcatcngaggtgattagactaggtttttcactttcgaaattgagtttaggaaaaaccgtactattaagaggggtttcaagtgtggttctagggtatacaaagtgctcttagtcatatccatgagtcaaaagatttttggaatcatttttgatcaatgattttctcccttggacagagagggctacccggaggttctggccggaacttccgggcaccgtttatttgcaaaaaatttcctaagtgctgcccgaaaattcctggcacttttgcccggaacctcctggcaggtttccagttcaaacttgtgagtaacggctagatgacgtcaccttgccgttatatatatggatttcgtccccaggtcaccttttcaccattccacttctgttcattcagtttctagggttttctagccactcccaagcttcctttgcttcctccactcaaatctagagcctatcttgtgagattgagagattagatgagagtgtaggagtgttttggagatggcttgaagattaggtttgattgagcactttggataccttgtgggctgtcacttgggcttattactcttggagatattctcctagacggttaggtgtcgcccctgagcttccaaagatcttgtggctgtcccgggaaagtttgtgaaggttttccacacctccgcaaggaaacgaggtaagtgagtaaagattcttgtgctgagttttcagaggttgtcctaggtagagcaacttgcacttgtggtcttttctagaagaaattttgagttggatcttggtggtcactcaattctagaaaatgacctaaagtgtcgagttgagggatgtggacctcttctgggatctttgcataagtgaggcaaggggttaatcgagacccggctctttggagcacctcaacggagagtaggattcgtgagatccgaactttgggaaaaaatcatctttgtctctcttgtgcatgatctttgtgtgaatctgctgatattctgcgatcttcatcttgttcctctgtgtgcctaaacttctcttgctaggacctggctttcatctcagttttaatttatctctgctgcctagaagttcctggctcaagaactccggaagttccaggctactcatcttgcctggaagttctggtcatcatcactaggaggttccgggccctgtcaatttaaccgatgcgattgttgagaaaaatcaggatagcctattcaccccccaactctaggctacatctctgctcgttcaattggtattagagcgaggtgctcatggttcaagcttcaccgctttaagtgatccatgatgtcgtacttagggggaaagaacggggaaaatggaaatgaagatgaagcaagcagcaagggaactccaccacccaagggagctactataccttttgattacagcaaacttaccattccttctcacaacttcgtctccgtgccttccgggcgtgctcctcaatttgatgggacatattatgccgcttggaagcacatgatgaaggtgcatctaatctctttgcatccaagtatttggaatgttgtctgtacaggtattgatataccccatgatgacatggagctcacttcagagcaagaacaactcatccaccgcaatgctcaagcttccaatgcaattctctccgccttgagtccggaggagttcaacaaggttgatggactagaggaggccaaggagatatgggatactttgcaattgacacatgagggatcacccgccgttcgtgaggccaagattgaattattggaaggaaggcttggaagatttgtgatggatgacaaggagacaccacaagagatgtatgataggatgatgattcttgtcaacaagattaaaggacttgggagtgaggacatgacaaatcactttgtggtcaagagactttttggtccaagaaatcccactcttgtatcaatgatacgggaaaggaaagacttcaagagactcaccccaagtgacattcttggaagaattgtgtctcatgagatgcaagaagaggaaggtcgttgtcatgcccagaaattcccgaatagaattccaagcagaatgtgcattaaaatccccgtctaagaccggccggggtacacaaacgacaatgttgacattcagatccacgtcttacaaacatcataaacgtcttacataaatgcagaggaaaaatgaaagacaacaggagctaagccttgactagaactgtagcgggaacaccactccacaggcatcctcgacggcacggacgaagcatactcctcggagaaacctccatctgacacatactcgtactttggggttgggaaaaatagagcaagactgagtactacccactgtgctcagcaagtcataccggaataggggtatgatgcagggaattatcaaaggagagctagagtggttcatttgcataaagcgagcatttataaacagaagtttaaagaagaaaacagtcataataattaatcaatattaatcgtccactgtccaacgctataccacgttgcgacaggcccaaccatccacctatactatccaatttcaatagactaaactagggtgagactaatcacggtgaatctgattgaccgcccatatccgcgggcatggctattcgaatagttttactctgatcagaggtgtacaactgtacccacaagacacagccccacgacacgttttcgtgtgccgacatgccaccacgacataccggaaagaggccgagacaggacccttcgcataaccccctctaaccaagcacaccacacctcaggtttcacccccactcctcgcaatgcagcgggcagtcccctctcgtgcctaggtgaatccggaagcgacagaggccgtcgcagggcccgccccgctccatcacgcccacccttgcctggatgcgtcagctagaggaaagctacactacaagcccagccgttgcccacgctggcttgtggtaagtacgataagttcttccagggcatcccgtgaaccggtccttaactgtcatgggtgcgaccagcaaaaccatgcacccacagctcaccatgtgatttattttaattaaccaacaccaaagcggtggcactaatccaacaataccattagaaccaacagtctaaacattaataggattttccccactgtgtactagttgaattaagcatggctaagcaactcctagtccaacgtctattcatgttataacccaagataacaaaggagcaaggtaccaaaatagcatggctgtaacaataggtaaacatcccatcataacattataaaacgatgcagtatttgaagaaaaacaatagagcatttgcaatataggatcaacatgttcaggtgacaagcatgacttgccttgctctgctgctggaggaacctcggcgactatttcgaagtacaccggagcgtcggaagaaccggaatctaagcgacatacaaagcaaacaatgcaaacaggctataagactactgaaatagagaacaaaaccatttttaatggattctacacatttttcttgatttactgagatttgaatgggcttaaacggagctcagatgaattagttatgaattttagaagattcattgtgtttattgctataacaaaaagtccttaaataatttattgcgcaacaactcccagggctgacgtcatcaagggggggtggcgccgacgggcgggtcccactggtcagtggctcgggagagaggggaaggggcggcggcacgtgggccccactcggcagcggctcaaggggagggcacggctggcaagcgggccccacggccccggctccacgggccggtgtaccggccaggcccggcatcaagccggccggccggccatggcaaagcggcggcgcgcgcatgcgaccgccggcgacggcaaacggcggcaccgacggcgggcggcggcgcgagcggcgacggccgaacatgacggcaagtgcgcgaagagggcggcggcgcacggggaaaaaagggaaggaaaggaaggggagggagacctcaccggaggggcagcaacggccggcagcggaaaacgagggaggcggcaaagaccggcgatgccgaggtgcggacgagcgacggcgacacctagggaaaaagagaggaggaattaggacggagggaaaccctcacggcgaccatccacgccggccggagtcggaggggagagagaactcaccggcgacatgagggagatggggtttcggtgggattccggcaacgctaagcggcggccgggaaaggtcttgcggcggtgaagctaggagtggcggtggcttagcgtggcgacggctctagcggcggcggcacacggccgtagtgcggcggtgggcggcggcgcaagcggcggcggcgcgagcttggtagggagcacgggatggagcggtgagagcggaaaacgagataggagggcatggggagcattttataggcggagggggaggcggacatggccgggaggtgccccgatttcgccggcgacgtgggggaggagagagagaaggtgggggcgattcaaaatcgaatcccgcccctctcgtgcgcgggcgcggcaggaagacgcggggagagggggcggtgacgtggcgtgggcacgggcgacgctgcgtgggcacagggaaagcggaggagtgggtgcagcggcggcggtttcggcggggtggtgaccggcgcgggcggcgggaggttgggggaggacccgacaggtgggccccacctgtcggcgaccccgggagaggagggaggcgggcgggcctggctgggcctcggcctatggtcggcccagcgggagaaaggggagaaaaaggaggaatgggcgagcggcccattcaaaggaaaagaaaaaaaaagaaaagaaagaaaaaggaaaaagaaggaaaaatgatttttcctgggattaaaattgcatgtgctcaattttaattggttaaaataatttcgagagctctgaaaattccactaaaaatcttgttagcgtatttcgacatgtagaactcaagaaaaattccacttccaattccgattattatttgtattaatttattaaggttttctcttgatttgcaccggcattttcttagggtgatttataaattcaattttaggcttaggaggagaacttcagggtgtgacagtcgtgaagtgagacaaatggtgaagaagtttctttgaaggcaaaacaagaagaagagtcaagttgtgaagaaagtgaagatgaagaaatgacttttattgtcaagagattcaagcactttcttcgcaagagtggctatggcaaagggaggaaggatgatgacaagggaaagaggcaatcaaagagagcatgcttcaattgtggcgaatatggccacttcattgccgattgtcccaagtcaaataaagctaaggcgaagggaggcaagaagaagccggagcgtgctcatgtggcggaggcgcacatggcggaagtgtggtactccagagatgaagaagatcccgaggtcaagcccaagcccaagtcaaaagacaaggttgaaggagaaggtggtgttgctaccgtcgccttcaagtcatcctcttcaagcaaggagcgtctcttcaacaacttgagtgatgacgacgacgactcctatcactactcttgcttcatggcacaaggccgcaaggtgatgactcaaaagccctctgaaacttctcttgatgttgattctagtgatgaggaaagtgataatgaattagatgatgtgcttaagagctttagcaaacccgctatgcaacatttggctaagttaatgagagctttggatagtaaagaacagtcactcgaaaggcaagaagaattgcttattcttgagaagaaaagaaaccttgccttagaggagagcttagctaaagaatgtgctaaaaatgaacaacttgctaatgagcttaatttggctaatggttctttagctagccttagggatgtcaatgaaactcttcaagaaaaatttgctaatttagacaaaagtcataaagatcttgaagttcaatttgccactctttggaatagcacctctcaaccaaatgtggtttctaattcttctaacccttctactagcaatggttgtgctaggtggtacaatattgatttgaactcttatgctactaatattgatgatatgcaagctcttaaaaagagaatgaaaggttgggcacattggtgaaatatggatgcatgaaggcataccattcattagatgccctttacaagaccatcaccgctcatcctaacaaggatggatacaggctcgggttttcgggtggaagtcctgtgtctaagtgtgtaatggtaaatgggaaagaatgcttgatgtttgtgagagaaggtaaagcaccacaagcaagtgaggtgactagtcttgtgagctgccagggacccggaacatccggacaaaccgggagaaacatccgggtgggagtctctgtctctcaaaaattcccaccaggaagttccggccagtttgccaggaagttccgggccaatgaccatgcacaagacatgaccggaagttccgggcacaatgcctggaggttccggaaagagggtctttactatgattcatatgtaatttccaaaaattcatagggcaaagtggttgcctattttaatgggaattacaatgatgagtaccgcacttgtgtgtgggtgccaaaggctttggtaactaacatcaagggacccaaacttagacaagtttgggttcctaaatcccaagcttgattttcttgtgtaggcatactcctccgatggttcaagttgggttgtggacagtggttgcaccaatcatatgactggagagaggagtatgtttacaagtcttgatgagtagaacggaactcgtgagaatattgtgtttggagatgatggtaaaggaaaggtaattggtctagataaaattgccatctccaataatcaatctctctctaatgttcttcttgtcaattcattaagctacaatttattatccgtttctcaattgtgtaagttgggttacaattgcttgtttaccgatgaggatgtgaccgtctttagaagggatgtctcctccgttgcattcaaaggcaatttgaagggtgatctctatcttgtcgatttcgatgtggatagagtgaatccggaaacttgtttgattgctaaatcctccatgggttggctatggcatcgtagactagcccatgttggaatgtggaatttggcaactcttctaaagggggaacacatcctcgggctcactagtgtcacatttgagaaagatcgtgtgtgtagtgcttgccaagccgagaaacaagttgggaatccgcatcctatcaagaacatcatgactacaacacgccctcttgagcttctacatatggatttattcgggcccgtagcctacataagtattggaggtaacaagtatggttttgtcattgttgatgatttttcccgcttcacttgggtgtattttctccatgacaagagtgaggctcaagatgtcttcaagcgtttcgccaagcaagcccaaaacctctatgatctcactatcaagagggtacgaagtgacaatggaggagaattcaagaacacgcaagtggaggaattccttgatgaagagggaatcaagcatgagttctccaccccctatgatcctcctcaaaatagcattgttgagaggaagaaccgaactcttattgaagccgcaagagcaatgcttgatgagtacaagacttcggatatcttttgggtggaggccgtgagcactgcatgccatgccatcaatcggctctacctccataagattctaaagtttcatattttcgtgtctttgggagcaaatgctttattttgagtaagaggccttgctcatctaagttttcacctaaggtggatgagggattcttacttggctataagtcaaatgcacatgcctaccgtgtcttcaacaaaacctccggtattgttgaagttacaagagatgtgacatttgacgaatctaatggctcccaagaagagcaagttgttgtacatgttgtagatgatgcggatcctagacaagcaattggttctaaggctattggagacatacgaccagtcgagacgcaggatgaccaagaagatagggatcaaccttcgtcatcgacatccaatagccctacaacaagtcaagagtcagttgacccggaagttccgggaccagatgatcggaacctccggacctccctaggctaggaagttccgggtccatctcccaggaagttcggggcagaggacagtcaaggcgtgcctacggcacaagtggatgggattgatgccgagggcactgtagagcatcctgatcaggctcaggtcccctcggtgcaccatccaagaatacatcacactgtccaaagagatcatcccgtcgacaacatacttggtgacataagaaagggggtaactactcgttctcgtgtcgctaacttttgtcaacactattcgtttgtttcttctttggaaccaaccagggttgaagatgcacttggtgatccggattgggtgatggctatgcaagaggagttgaataacttcacttgcaacctagtatggacatcggtggagagacccgaccaaaatgtcatcggcaccaagtgaattttctgcaacaagcaagatgaacatggagtggttgtaaggaacaaagcccggttagttgcgcaagggttcacgcaagtcgagggtctcgattttggtgaaacattcgcacccgttgctcgtcttgagtcaatccaaatgcttttagactatgccgcttaccatgatttcaggttatatcaaatggatgtcaagagcgcctttctcaatggacccatcttggagttggtctatgtggagcaaccaccggggttcgaggatccaaagttgccaaaccatgtgtacaagcttcacaaagcgcaaaacgggctcaaacaagccctagagcttggtatgaatgtctccgagattttcttttgaaaaatagttttgaaaatgggaaggcggacactactctcttcactaaaaaggttgaaaatgattattcatttgccaaacttatgtcgatgacataatatttggttctactaatgcctctttttgtgaagaatttagtagtatcatgactaaaaggttcgagatgtctatgatgggtgagctaaccttcttcctcgcgctacaagtcaagcaagcacaagaaggtactttcatctctcaaaccaagtacatgaaggacattctcaagaagtttgggatggaagatgccaaaaccatcaagactcccatgcctaccaatggtcaccgtgatcttgatgaaaatggtaaatgtgtggaccaaaaggtttatcgctccatgataggatccttgctttacttatgtgcatctcgtcccgatatcatgcttagtgtttgcatatgtgctcgctttcaagcggagcctaaagagtgccatttgattgccgtcaagagaattctaagatatttagttattactcctaatcttggcttgtggtaacataagggttgtgactttgagcttttgggctattccgattcggattacgccgggtgtaaggttgatagaaaaagcacaaccgggacttgccaatttcttaggcagtcccttgtttcttggtcctccaagaagcaaaattccattgcattatccaccgccgaagccgaatatgtcgccgccgattcttgttgtgcccaactcctttggatgaaacaaactctaaaagactttggctacaacttcaccaagatcccactcctatgtgacaatgagagtgccaccaaaatagccaataatcccgttcaacactctcgaaccaaacacatagatattcgtcaccactttttgagagatcatgaaaccaaaggagacatatgccttacccatgtgagaaccgagagccaattagccgacattttcaccaagcctttagatgagaaaagattttgtgagcttaggagtgagctcaatatcttagattctcgcaacattaagtgatgggtaattggctaatttatagccaaacatgtatcactaaaatgtaaattaaaaaaaaatgagcttttgtgtcttgagatcacttcttggttgaagatggtcttgataccaggaatttagctcaaacattcccccctttatccaaaaacccttttgtgaatttttttgcaaaatcctttgtgtgccttttattgcgaaaatttggtttttatccccttcttgtggtgtatattgaccattgttatgtaatgttgattgttggctggtcatatgcatcataagtctctgcttgtccatagttccctatttcccctcgttgaattctcgtcttttccttgtttttgggcctgactgccctttatctgtcaggccggaagttctaggcctccctgtccggaacctccgggtgtcggggagtatatatactcaaggggagttagaagccctattctctctcctcatttcttctctctccccgacgccagccctagccgccggcacagtgcttctagtggtgattttcactttcatccaatcaaattcggttcttctccgtggattcatccacattggtggctgggaggttctttctgtgatcgattcgtagtttct

SEQ ID NO: 5466 - DNA, 5709 bp, Oryza sativa
acatgcactggctatttttgagacctctgttcttcatttttgccggccggaagttccggtgttcttgcacccggaacctccgggcgctttctagccagcctgtcattcttgcttctctcaatttttgcctaactactgcactccaaattgttgattcctgttacagtaagcactatgactcatgagaaaagacagaaagcctctcaggatgtgtccggtgatgagagtcctcctattcggttccctcgtggtcgtttgggtaaagagaaagttgttgagggcggcagtggcagtggcactcgtacttctcccaggtttacaaggcaatcaagcaaccgtcctgttcagattagggatgttgacagtggtcaaggaagtgatgcacctaatacaagaggacgggggagaggtggttgtcgcagttctagggctggaagggcatctcatgatttccctgtaggatctcgtgagaatcccgttcggctctacaaaactcttggttttgacaccactcctttgcaccacattggaagacccaagtccaactaccttcatcaacttgccaagtgtagaagagatcgtttgattgatccagagacacagcctgaggagtcacaagatcctcgcttaaggactttcactcaattggattggtataactcggtgattatggctagagaaaatccagtggttgagatgaagtggattgattgggcttacatgaggaagaagaacaatgaagtgttcaaccaagtgatgcaagtgtgccacaacaagaatcttggagatattcttgccttggagtatgattggaatgaggaggtcattgcacagttctatgcgacagcattctttggtactacaaggaagggaaccccttatgtgaagtggttgactgagggtgttaggcacaagatttccatggcacagtttgctgagatgttggggttagatgatgaggatctcaataggcccaacattcatagtgaagcacccctccccatgatcaagaccaagttcatgtatgcaaaggatgctcctaagacttgcatgggatctactcatggattgcatcccaactacaaggtgttgtactccatctttcgttggtctttgcttccaaaggttggaaatactactgctttgctatccaagcatgctcatctttcagtcgcatgcgctacaatcagcctcccttcagtgtgatgaaattgatttggtatgagatcgccaacaccattcttgagcctaagcggggttgcatctatgctcctttcattatgaagatgattgagacagtcaccggggtattctacatcaaagatgggcaccataatccttttcgccctcatgctccaccttcctcttctccagtggtccctcgatctgttccttctacttcagctggttcttctactagtgccccaccaagttcctcgagttcttctcccatcaagaaggcacttcaggcaattttctgtatgtgtgctaagactgccaagaaagtgaagaagatcgaaaggcgtcagaaggaagatagaagattggctgggaaagaagtgtcagatgattctgaggatgaggtctatgttgatccatttgaggcttatgaggcagcccacaacgttgccggtgaaggtctatccaccttcttcaatgaagaatcttcccattctgatgatgatgatgatgatgatgatggtgatgagggtgacaccgaggcagctgctgaggatgctcccactgatgttgatgagggtgtcactgctgctcagtccgatgagtctcatcactccggcgataccgagattgttccctctgatggagatgagtgatcctcttcttctcttcatagtttctcgcctttttggtgcctttatgccaaagggggagaaattgtgaattgaagggggtcatttaaatcctttttgctaccttgactgttgtctggtcatttggccggaagttccgggtcctgtgatctggaggttccggctaggcagatttcctctctattatctctctctatatggacatgtaatcgtattctattatggttggatgtaatgactgttagatgctttattatcctttatgtcagtaagttagaccatatggatgttgcattttgatgtgatgatgtgttcttttcatctatttgagtgattgccaagtcatctagtctttctttttacatcactcatcattcaagcactttcatctgcatctcttctttgataagggtagtgtgaggtttcttttgagctttccttcatcttatgcataatgttttcatttctagttcttgatatgcatatctttagggggagcttcacacttctctcatcattcaaaatttaaattctattatctttttatttactttaaccatgttgtcatcaatcaccaaaaagggggagattgaagatgcacttaaaccccctagtgggttttggtgattaatgacaaggtggttaaaggggactaacgtgtttatcaagtttattcacaggagtttagtcccaaagcgagttgtgatggctaagaatgtaaggagaccccccaattcgaatgttcctaagtgcaaaaatcatcgaaggtgattagactaggtttttcactttcgaaattgagtttaggaaaaaccgtactattaagaggggtttcaagtgtggttctagggtatacaaagtgctcttagtcatatccatgagtcaaaagatttttggaatcatttttgatcaatgattttctcccttggacagagagggctacccggaggttctggccggaacttccgggcaccgtttatttgcaaaaaatttcctaagtgctgcccgaaaattcctggcacttttgcccggaacctcctggcaggtttccagttcaaacttgtaacggctagatgacgtcaccttgctgttatatatatggatttcgtccccaggtcaccttttggccattccactcctgttcattcatgttctagggttttctagccactcccaagcttcctttgcttcctccactcaaatctagagcctatcttgtgagattgagagattagatgagagtgtaggagtgttttggagatggcttgaagattaggtttgactgagcactttggataccttatgggctgtcacttgggcttatttctcttggagatcttttcctagttgttaggtgtcgcccgtgagcttccaaagatcttgtggatgtcccgggaaagtttgtgaaggttttcctcacctccgcaaggaaacgaggtaagtgagtaaagattcttgtgctgagttttcaaatctttgtgtgaatcttctgatattctgcgatcttcatcttgttcctctatgtgcttaaacttctcttgctaggacctgtttttcatctcagctttaatttatctctgctgcccggaagttcctagctcaagaactccggaagttctggggtactcatcctacctagaagttccggtgttcatcaccaagaggttccgggccctgtcaatttaaccgctacgattgttgagaaaatttcaggatagcctattcaccccccccccttctaggctgcatctctactcgttcactagtatagttcttgttatcaagaaaaacggtaaggtcagggtgtgcattgatttccaaaacttgaataaagctaccccgaaggacaaatatgcaatgccggtagccgatcagctggttgatgctgcgtcagggcacaagattttgagttttatggatgaaaacacaggatataatcagatttttatggcccaagaagacattcataagacagcttttagatgtcctggtgcaattggcttatttgaatgggttgtgatgactttcggcttgaagagtgctggagctacatatcaaagagtcatgaattatatataccatgatctaatcggctggttggttgaggtctacattgatatgtggttgttaaatctaaggaaatagaggaccacatagctgatttaaggaaagtttttgagagaaccagaaaatatggcctgaagatgaacccgacaaaatgtgcttgtggtgtatcagctggccagtttttggggtttcttgttcatgagagggggatcgaagtgactcaaaggagtgttaatgcgatcaagaagattcagcctccagagaacaagacggaactacaagagatgatcggcaaaataaattttgttagaatgtttatttctaatttgtctgggaggttggaaccttttacaccattgttgagatcgaaagccgatcagcagtttacttggggggcagcgcagcaaaaggctttggataatattaaagaatatcttagctctcctcctgttttgattcctccacagaaagggatacgttttagattgtatctatcagctggtgagaagtcaatcggctcagtcttgattcaggagttggatgaaaaagaacgagttgtattttatctcagtcgtcggctcttggatgctgaaactagatattcccctgtggagaagttatgcttgtgcttatatttttcatgtacaaggttgaggcattatctactatccaacgagtgcactgtcatatgcaaggccgatgttgtcaaatacatgttatcggctccaattttcaaaggaagggttggaaagtggatattctctttaactgagtttgatctgtggaatgagtcaccgaaagagattaaaggacaagctatagccgattttattgtggaacatcatgatgattcaattagctcggttgagattgtgccatggactttattctttgatggatcagtgtgtactcatggttgtggtatcggcttagttataatttcccctaggggggcatgtttcgagtttgcttatactattaaaccttatgcaactaataatcaagctgagtataaggcagtgctcaagggttgcaattactcaacgaaattgaagccgatgctattgaaatcatgggggattctttgctggtaatcagtcaattggcaggagattacaagtgcaagaatgatacattaatggtttataatgacaagtgctaagaattgatgaagtaatttcggctagttactttgaagcatgtatctcgagaatagaatatcgaagctaatgatttggcccaaggggcatcggggtataagccgatgatcaaagatgttaaggttgaagtcgcagcaataacagccgatgattggaggtatgatgtgcatcaatatttacagaatccatctcaatcggcttcttggaaattaagatataaggcgttgaagtatactttattggatgatgagctttcttatcggacgattgatggggtgttgcttaaatgtttgagtgctgatcaggctaaagttgcaataggtgaagttcatgaaggaatttgtggtactcatcaatcggctcataagatgaagtggttacttcggcgtgcagggtacttttagctgacaatgctggaggattgttttagatattacaaaggatgtcaagattgtcagaaatttggagcaattcagcgagcaccagcgtcgctatgaatcctatcattaagccatggccattcagaggttggggaattgatatgatcggcatgattaatccaccatcgagtaaaggacataagtttatattggtggcgaccgattatttcaccaaatgggtagaggcgattcctttgaagaaggttgatt

SEQ ID NO: 5467 - DNA, 14651 bp, Oryza sativa
cacatccttcgtaccaggaaataaattcaatttgcagcgatttctattctgttctggtaaatccaaattcatgttcaattgctaaattaacaacccaagtctaccaagaggtttatacggtgatccaaatacttagtttttgcactctgaatgtgttttgtgtttctgcattttattcacaaggcgagtttgaagtattatcgaccactcctagattgagatgcaatattctcattatggcaagtgaagatgcaagttggcacatctatctaagaggagaagcatgcagaaaacaagaagcacatccaagttgtcaagagagagccttgctcctatctagatcacaaggtgatcaaatttttcggtgaattttgctaacatgatattgttggtatttcttagcgactaattcccagcagtagcactagaaataatcctggtatattatggttacagatatgatccgcaagcgcatggatatatcattgtagcatttcacccgggagtattccaaggtatcgcaagagaagatatgataagagagaactatgctaacaattcatatattacttatatacatcaaagtctatgcaggggttaattcagttcaaagggtagggtgacacacagaagaaagaactaagaactactctcactaaaatatagtttaagctaagtggagaaagaataagaaaaatatcattcctgtacttctagtatacatacatctttagtctatacttgctagtatacagtcatgcaaccaatacctcatacccagtgtcctcctggtgtttcgagaagccacccctgactgccgagttccttacgacagcccgtcatgaccatacaaccggggctaaatacggaggagtaccctccccaggaaattaacttaggacaatatacacatgcagaggacacccgtactaagctgtcaccatcagcggccagcatctgaaccactgtatattaccccaattaatggtatctaataatctaagcaccgcgcttacattactaaatactactctacatccttgcaaccgacatagagcaaccgaataatcggacattaaacccacaccaatacacctatctggaaagctagttacacgactatattgattcaagtataaagtaaagtcggcactcaagtaatatgaatggaataaaataccgaacttgtataaagaagaatattctattaattcaataagtcttacaaaataagaaagtaaagctattaaagccatactagaaatctcctgaagacttgaggactatgaagactattctatttcctactccactagcactagaactactaaacaatacttgagagagctcttgatcttcttcttgaggtgtgtgcttggaatgaaggaagtgaaggggtatttataggtggagatgacttgggagggtggagatcctccatagcatccaacgaacatcttccttctcctcatgccatctgtcctcctgaagtcggtaatagcgcgggaaccggtcataacgaccttaggtagtgagtagcctgtgtaagatgggggctgattgggctcagtggtgggtcggccgaccccttgctggctcttctggccccagctttctccagtagactcccatgttggcccctaaatcagtgacatacattctaggcccatttgtgattgttaaattggacatttaggccttctcatgcaattgcacatcaccggcagactttcgactaattgatcgatatatttcctcctccttctcttcatttatgagtgcttctcctgcatacatgttagtagcatagcatatagtggaagtaattattttatttaggaattatgcattgcaagcatagctagtcttcatatattggataatattgatggtcgaaactggttatcatgagatctaagtacttcgttttgtatacaaaagttcatgattctgctaggattacataaattcatgctagtagactcaagattttatttccatggcgagtttgaagtttgggcatcatgtttcgcgtcgctgcttagttcacacaggtttatactagcagattcaggatttattcccaatggtgagagtatggtctacttcttctgaatcgagggtgttacattatagtcatagagattgtttggcgcacaatgattttatctatgtgagattctttggatattgacaatttttatgctacaagaaaattggtctcaaggtgaagattgttaaacatgtgatccaaatattaggactacagtatatttagattagttttctaataggactctatattataagattagtttcctacttggactttgtgtcttcgcctattaagactcctatatttctcttgtaacccttatgaggagtgtgtgacaacccaatgcatccccctgcgtttgtatccaacttctcaatattgatcattgtcggtcggtgcccgtggttttttcccgcaagggtttttccacgtaaaattcgtgtctccgttgtgcatctattttcataaaaaaattatcccagacggacgacttaaggttcctcccacgaagaaatatcttcgcagacaaagctctaaagatgtccgtctaggataatatactatctttcatgtcggacgtcttaaatctctgcctggaatgatacattttcgtagttaagcctccgccttggacgtttgggagcaaaaatcgtgcatgcatgcttagtgaaaaggacctcgtatgcgaaacattttcctagtagtgatagaggaaacccactcaataatagtatttgggagcactgcttgggatcgatagacctcaaatatagctcgagctcccagttcttcacaatcttatagtcactgaagcctgctgtgcctgctgtcttgaatagatcacgccactcattttcatctcgctgtcgacctttggttacgaccatcataaccacattgatgaggagttgggcttctagaagtggccctgaaggagccccattcactatgtcagtgataatcaccttccatctatattctccgtttggaatagttttgttgcattgggctaggatcttcacgtaatcctcaacattccagtggtgaagcagaagctaccatgcacaaaacagtcaccaaaaaaaattaacaaatgcacaatttggtcaaatgtttctttttattactaatatatatatttggtcaaatgtttgttgtataattagattataatttaaattggtatttaatctatttgatttcttgtctttgctttacatgtgattcgtgaaatattttatcatgttttcttcgtatgctttggaatttagttattcgtaggtttgttttaaaataaatttccatacaactcaagcaatgatcacgacatgatgcaaaagttttaaaaactttgaaaccttaatgctttttcttaactagaatgttacaaacctaccccattaagcaaatcatgtccagtagattaaggtagagttgcaaggttacatggacttatttgtccaagcaaaaatttcgggtattattagtgtagggacatgaccctctaaatagaattgtgaggttacatggacttattcgtccatgcaaaagaaatcaaacatgtgtccagtatacttaaggctggggagaccaagttggttgtgggtgatgttgaattgttattcatctaggatgacttgcatgtttaaagtattccctccatcagcatctacaatcaaagccacacctagagtgcccaggggcactcatctctcaatggaggttacatctaagtggtctcttcaaaatctgaagcaaccgaataaaggtactcaaccccacaatgggtgtcccaaccaaaaaacccagggtgggtgttttcctatactacccctctcttctcccccctctctctcttctcttttttctttgctcctgcttcttcttcgtcgcccctcctcttcttcttttcttcgcctcgtctcacttccttcgcccgtcgccgtcctcccgggagtctcgcgccgcaccgccacagacaccgccgtcgcctccctcctcgtctagacaccgccgccttactccctctccatctctctccctccgcctccgctcgcctctttctctaacccgtagccggcggctggaagggcgatgaggagggccgccgccgccgctggagcaacgccgttgctggtggccgacgacttatgagcgcggtggtcaacggtgagcagcgcatggatctggcatgccggcaaccggatctggcgtaacggcagccggatccgccgctcgtctccctctcctctcaccggcacacaacgcgtcgttccgctgcatgcccctgccaaaagcgagcgagggacgtgtcccccagcagaggcgcgcgttccatcgcctcgggcgaaacggctaacggcttcggacggagggtgctagggggacgacctggggctacgcattgaacatggcctaagtgattttacatattgaaattttacataagcaagccggacacattaactcacatgaaacattcaacagaagttttacacgtattaattcacaaaaccaagcttgacatagatcacatatataacaatttgtttcagaaaatatgcccttccttcctttattcacttagatcacatcctccacagaggggacccacacaattagtgttggaaccactgctatgggtagacctcaaagacgcctcgagctcccagtttcttcacaatattgtagtcactgaagcctgctttgctgaagagatcacgccaatcattctcgtctcgctgtcggcctttggtcaccaccatcatagccacatccatgaggagctgggcttctagcagcagtcctgaaggagcaccaataactatatctatgatgatcaccttccctccatcttctcgggttggaatagctttcttgcaattagctaggatcttcacacaatcctcgtcattccagtggtgaagcacaagctaccatgcacaaaaaagtcatagaaaagttaacaaatgcgcaatttgaattacacacttcgtggcgcactagtcgttaactgttcttctatataggaaatggattctaattaattactcaagactcaagacgatgtcttccgtatttgcatgttatcctaatattataaaaaaaataacaagatatatcgatatatgatatatgactttaaaaacatccaaattcaaattcaatcatcacaagttataaaaaataataaatcaaactctcactggtatatatacgtgcgctgaaaatcacttttaattttaatttatttcagttaatactacctggagcatcacagcttgagcaggtgggatctcacggaacatgtcgcccgctacgtagttcaccacaccagttcgtgtctcgccaatcacccggggaaagtccagcacggtgaacttgatgtgtgggaaggcctcgacgatggccttcgccgccctgccgtcaccaccgcggcaatcggtgagcgactccaccccctggaacacctcacggcactcccggagaaccgtggggaagtctgagtggtcgtgcgccgctagagcttcgttgaacatcgagtcagactccgggtcaaggttcgccatgctctcgtcgaacagcgcggcgccgtgcacctcctcgaacggcgacggcggcgccgaggacgacggcggcaggtccttcccgaaccagtccgcgagccccatcgccgcctccacgaagtgcctggacgtcgcggcgagcaccacaagcacctggctcgggtggccgtcgacgacgggcgctgcgccttcgccttccaccaggagccacgacagcggggtgaggcggtacatcccggcccacccggtggcggtgtcgtcggcagcggcgaagacgcccgagttgaccagcagccgcatgaggcggcggaggaacgggagcttggcgggcgggagggagagggcggcgacaaggtcgggcagcgaggcggtgccgccggcgcggtggatggcggtggggatgccgagcttgacggcgcactgaaacgccatggacgtgacgaagtagaggctgtggcgcaacatgtcggcctgcgcgtgcagcagctcgtcgtcggtcggtggtgccaacatgttgggaggctgacctgccattaaaaattgaaatctagctagctatctcgatcgcgattaacttctcgcgactgtggtatgtttgttgtattagcatgggtacgagtgacgggtttaaatagagtgaggctcagcgattcaactgtcaactgtggctcgtgttcagcgtggaaatagaaaattgttgtcaatggccgaatggcctacagttagatatggtagtttgatttcgttttttatttgtacacgtgtgcactgttatggcgatacgatagaaaatctgtaggttgatacgtgggtactagttatttagaaaatctaattataacaaggtagcccgtgcacatgcgcgggcatcttgtttaacacgtttaaaatttgagacccactacgattctctctattgatagtagaaagtaatctaatccgttgatcttatttgatcgaatgatttagatctatttatactaccaccctaaatagcagtagttcaaacatggagagacattactataaaaaaagtgcgtaaggggtataattatcatttagtagtcactaaacctagttttattcttgtttggcttatttcgatggaatatgagcgatgccagcacaataaataaccacagattgatcaatctagcccgaaaaaaatatataaatgaaaaggttagccttaatcaatgtattagtaaataacgaatggatcagatcatttctactggtgatataatagtatcagtagagagcatcggatcaccactcaaaattttataacaaatatatatgcgtgagtgatatttttattgaaatatcttttttactctattctaatttatttgggattacgttggaaatgatttttttttctaattacccttgcatcatataaattgtaaactaaaatcatgtgaaatcgtgaagtcttgaatttatttatgagaaaatatggtgtcgcaatcacaaccatggaattggtttgtatgatgttttttatactgtagatgtttttcgattttaggataaattagttgaagatatttgtttattaaacatattgctaatatgactacgtcatctaattaaagatagacttatactctatagaagtcaaattttgtcctaaaatgtttgaagtttattgaatctgaccaatttaccgaatagtttatgatctcaacctaggaattttggtatataagccaacaaatcatccaagtaattggttggaactaatttatttcctttgcgtatatttgtttgtttcttttgcaatgtatttaatttcaaatactacagtaagaattcaaatttaattagtatcttcgatttttgtttactttttacaactgacagctaattatcaagagtgggttttatcatgtggttcaataagttaatttagtatttacaaagaagcctcgctagcaattaagacccggtgattattatgttgttgtcgatgggggacacccgtagaccggatatagagggtattggggtacgctggtacgaggatctacgtaatatgacatcaagctaatagaaaacatggattatattggttcaggccccttggtaggccccttggtaggtaataaccctaaatccagttgatatgggattatatgatggaatcacagattacaaagggaacaatggaactcgatgataccgacgagaccgtagtcaagttggttcgactagatcacccggcgacttggctcctgtaggctccggcttcgtaggctatggtggttgtctcggctgtgagattcgatgccttaggtccttccggtgggtcccttttataccgcaggtaaggtggtttccaagtaggactcggagacatcggaccctacacgatacagtgacgacccagtccgatccgagtaggaacctttccatctgtggactccatgatgaattttcttagcgtatacaaagaacatccgtatacgcgcagatataccatatcgatgtatagcgtatatccaagggtagagggtataccttattcgtaaccctgaaagtagcccctgacttctgcttaaatgaactcatgtaaccgatcgcgacttctgatgtcgggtttgttgtcgttctcgactggtcgatctcggcgtgaggaccgtagagacaaggagtaatcgacgacgccatgcgaagttcaacggtcgtgagtgaatttaaattgaagtccaaaaactgccgcgtgtaacggacccagaaatttccggcggccatctctctcctttccttggaattcgcatcgtcggtagtgcgtctatttaagggagttttggggatccattttggagcccgcctgttgcaaaaacttcctagcctccaagcgctcttcgtcttctccgctcccgcacaaaccctagcttgctcatcttggtccctcctccggtgatctccggcggcaatggacctcgacaagtccacttccaccagcgcgtccctgaagaagttgcaggaggaaggcgctctccccggtcgcgggaccatggagagggaaccaggaggtattgaacctgaacctgtcctgggccgcatggttgcggttgaggactacattctctgcggttttctcccgccgccttctgagtttttccttctcgtcttgaatttctacggtctttctctgctccatctgaaccccaactccatggccttcctcagcatcttttcccatctttgtgaggtctacattggggtagagctgtttcttgatctctttcgtttctactacgagctgcgctggatggaacgtaaaaatgtgtccgggtgtgttagtttccgacttcgggatggcctgaagtcgcgatacatccccttcaagtgcccctcttctcgtagcaaatggcgggcgaggtggttctatcttcagatagaaaatttggatccaatctttgttgtccctgaggaacaactagacaagattccgttttggaccgccaagcctgccttgaccccatcccttcatgtggacccccgtttttataacaggaatctatcgtgtaaacagtaccatttccctggatcaagtagtctagtacacacgagttcatagctgaaataccaaatgcacatacacgagagtctagtgcgaattattacatcataagcccgcaggcatagtctcaaatcatcggaccgagcggtccggaatacattccaaaaacagaagtaggtaaggcagcagagtcaaggcagcggcacgccattgccacaggcaacgaccgtaactaagacctactgagcgccatcgtctccatcaccctcctggtagtaagcgtagggatcctccgaagcttcatctccgacctctgattaagtttgtatattacaagggtgagtaccaaccgtactcagcaagccaccacagcaacaatgcacatgacaggggtattcaaaggatggctatggttcttttgcgcaaagcaagttttgtaattctttttcacaaacctgagacctagcacagactgatcaaattttagtaccagtgttcatattaaacaatgacggttctgtccaccatccattgtgatcccaaggatagcttcccgctattgagtcgtcatggttttctgaggacgtccacattcccgcccctcaggaagtggctccatcagcatagaaatcatcatgcaatatcccatcccacacaagttaagaatttagagtctagccaagtgtaatacatgtcccagtgctcaataaccgcgagcacggctattcgaatagatttggtttactcacactgcagtggatgtacactttacccgcactccgcgactgcccaacacatgagcctcgtcccaacacatgagacgtgttacggcaaagcttttcgataacctcgcattggcagtacccgctccatgaactttacatcctcatgcactctaggcgtacacggtttctagcagtgagaggagttctggtgcacccgggaagggaagactcacacatgcattaagttataattacgtttagattctcacatggcagtcctaccgatggcgacaccactgtagacacccgcctcgcggtcctaccaatggctgccccaccgtagagcccctgcctcacataacaagaaaccactatggatggatactgcctccgctcagctatctactccgcttggtctataccgatacgagaagtgcggttatacgggggtcgtttcatgcttaacttcatggctcggtccttaattgacaggggatggcactagccttttccggataccacccaaatcctccgtccgccccagtcgaaaatagttgtttaatttcatttctcctttcacaaatcatgtcatcaacatcatggcaatgtggcgctcatgtccccacatgctgcatctcaattaccttcccaaaggtaattgcccaagcatatagcatttgataaatatgagtatgcatgattctagaatagcatttctaagcaattgtcataactgagtagggactcatacgtaaatggttacaaaggcataaggggtaaacaagaaccaaggcatggcataatcacaagtaggatgttcatcattgcatgcaatttatttgtaaacaaaataatttcacaattgggatcaacatgttcaaagaatagtgatgacttgccttgctcgaagctttgcgggtcttggtcctcgctcggatccgcaactccctcgggctctaaaattacatgcgaagaaacaatttgaattcggttagaattcaaataaagatccaagtaaatccaagaagatatcgagcgcggaagtcggtttcatacattatctattttcgttcgtgaaatagagctactccgtctatttaactctatccatccccaaactattttgtggcataaatattttattagcacaagtttttaatttaatccgcccgggtattacatccatataataggttagaaatttctatcgcgagctaaatatcggacaaaatcctaaaattatcttataatattgcacgatttaatttagtctatgactaaatgattaaatataatacacggctaaaattcctagtaattaaatccgaatttctaccgtgaatcgattacttatagagattaccgaaaaataatctataattatattaaattttgcaattctacgactataattaatctataattaaattctaattattttaaattttctaaacttccttaatctccctctaatttctatttatttttccttttctttttctctcctcttttctttcttttctttttctcctctttcctttcttttctttttctcttcttctttcttttctttttctccctttcctttcttttctttttctctcctccctcccggcttctttctacctctctctctctcggctcttgctcacccgggcggcaacggcggtgtgcgcgagggggggaggagacggctcaccggcggcggtggtggcggtgacgacggtgacggcggcgcaggacgtggcgcggcactcggtgcggtgcggcgtcaccgaggtcggcggcgtggcggctcaaatgcggcggcgcgaaggcggtggcgtggtggcacaacggcgacacggtgtagtgggtagaggagaggaggagggaatggagtttggagaggggagaatggtgggcttatataggggagagaggggataaggggggagagggaagtgaagggggtgacacgacggtggcgcggcggcgcggggcgcgaggcggcgataggacgcgcgcgcggtgatggaacggcgacagtgacggcgcggcagtggcggcaaggggcgcgaggcggcgatggaacgcgcgcggcgacgggacatcgacggcgacggcgacaacggtggcgcgcggctcggggcgggacgcgacgtgcggcgacgcgacgggcggcgacacgagatcgaggcggcgacagcgacggtgcgacggcgacggcggcacggggctcgaggcggcgacggcgacggcgcgcggcgatggtgacggcgcgcggcgagcggcgatggtgacggcgcgcggcggctcgggtcgcgaggcgacgcgatggcgcgcggtggtagcggcggagcgaggcgacggcgacggtgacggccggcggcggcgcggggcgcaatgacggctaggcgcggtgtggcagaggagggggatggctaggggacgcactcgagcacctagcgtgcaatgaatagtgacttttcctatttatcccgattttagactattttctatttaaatatagccctataaattctaatttttgcataaatgaagtttactcaatatttgtgttattgtaactaaaaattcaccctaaattaatattacccatattttatttttatataatttatttgaatttttaattagggttaattcttgctccatcgcacttaaatttaattattaccattatggtcgcgataatattttatttatttctatcctcacctaatctttattttaaattatatttattttgccaatttatttttagggtttattcctaattaactattctttactcacaactaatgaatttcgaaatcaaatccaaataaaataggcgaatagaatcggcatgatgcaattaatttaaaaagtttttgaaggtccgcatttttagagttttgtttttattggtcgaattttcagggtgttacaaacctaccccccttaaataaatctcatcccgagatttcttatcggatttcgaatagatgcgggtattctgtctccaagaattcttcgctttcccaagtggcttcatcctcagtatgattactccattgtaccttgtacatacgccacactttggtcctagtcctcttttctgcttcatccaatatccggactgggtgttctggatacgtgagatcattgctaatatgaatttcttccaacggagcttgttcctccggcactcgtaagcacttctttaattgagacacatggaaaactgggtgcacatcagcgatattttctggtagctgtaactgatatgcaacttctcctcgtctagcgatgatttggaaaggtcccacatatcttggtgctagtttccctttaaccttaaacatttttgtacctctcatcggagaaaccttcagatatacataatccccttccttaaattctagatctcttctccgggtgtcagcgtaactcttttgtcgtgattgtgccacttttagacggtcacggattaggcgaaccttttcttcggcttcttggataatgtcaggtccaaataccgtccgttctccagtctcggaccacattagtggggtacgacatcgtcgaccaaataatgcctcatttggcgacatctttaggctcgcttggaaactgttgttgtaggagaattcggcgtagggcaaacatttctcccaatccttgctaaaatccaaagcacaagctctcaacatgtcctccaagacctggtttgttctctctgtctggccatctgtttgtgggtgataagctgtgctaaaagcaaggtaacttcctagggcttcatgtactttttcccagaaatgcgaggtaaactgtgtgcctcgatcggatataattctcttaggcacaccatgaagacatactatccttgtcatgtataactcagctagcttggctccgctataatttgtcttgacggggatgaaccttgcagtcttagtgagtcggtccacgattacccaaatggaatcgtaaccagttgcggtcttatgcaatccaacgataaagtccatacctatctcgtcccatttgcattctggaatcctaaggggttgcagcaaacctgccggtcgctggtgctcggccttcaccctctggcatacgtcgcagagtgctacgtattctgctacatcccttttcatgttgggccaccagtatccttccttcaggtcctggtacatcttcgtacttccggggtgtaatgaatatgctgattcgtgagcttcccttagaattaatcccctcagtccaccctgttcgggtacgtaaatcctcttcttataccatagtgtttccttctcatcaattgagaattctttcgcacaaccagcggctatgcgctccttcacctcttggatctctccgttgtccttctgggcttcctctatctgggtcctcaaaaggggctggatgtccaaggtgtttatttgaccataaggaactaaatgtaaattcagttgggctatttcctccttaagttcaggggttatcccttccatcctcagatgattgcaatggctctttcgacttaaagcgtcggccacaatgtttgctttgcctgggtgatagtgaacctctagatcataatccttgattagttccaaccatcgcctttgcctcaagttgagatctgactgggtgaaaatatacttcagactcttgtagtcagtgtagatatcgcaatggtttccaatcaaatagtgtctccaaatctttagctcatgaaccacgactgctagttctaggtcatgggtagggtaatt

SEQ ID NO: 5468 - DNA, 8505 bp, Oryza sativa
gagaggagggagaagaagccgggagggagagaaaagagaaaaggaaagaaaagaaagagaaaaagaaagaaaagaaaagagaaaagagaaaaaaagaaaagaaaagagaaaaagggaaatagaatagggaggttaatagtttagaaaatttaaaataattagaatttaattatatattaattatagtcgtagaattgcaaaatttaatataaattatagattattcttggtaatttctaacagaaatcaattcgcggtagtaatttagatgtaattaataattaaacaattagatgaattcttatagattattatagattatttttgggtaatctctataagtaatcgattcacggtagaaattcggatttaagtactagggattttagccgtgtattatatttaatcatttagtcatagactaaattaaatcgtataatattataagatagaaatttctaacctattatatggatataatgctcgtgtagattaaattaaaaacttatgataacaaaatatttatacccgcaaaatagtttaaatcgaaattgggtttgtgtcacacccagaaattcacgaaccagaatttctaagctgaatgtgtattaaacccctgtccaggaccagccagggtacacaaacgacaattgttgacatacagatccacgtcttacaaaaatataaaagattacaaatgcagtggaaaaagataaaagcgagctgagcctgaagactagactcctgtagcggacgactccattccaaaggcatccttgacggcagcgacgaaaccaacctcttcgagacatcttcactgagaaggacttcaactctggtgtgggggaaaagagagcaagactgagtactacccactgtactcagcaagtcataccggaagaggaggtatgatgcaggatataaccaaagaaggctaggggttcttttgcacaaagctagcatttaaaagcagtagttgaaagcaataaaatagctgtagtaattaatcaatattaaccaatcactgtccaacgctacaccatattgtaacaggcccaaccaaccacctgaactacaccagttcaatagctaactaggggtgagactaatcacagtgaatctggccgaccgcccataaccgcgggcacggctattcgaatagttttactctgatcagaggtgtacaactgtacccacaagacacagccccacgacatgtttccgtgcgccgacatgccaccacgacataccggaaagaggccgtgacatgacccttcgcataaccccctctaaccaatcgcaccacacctcaggtttcacccccactcctcgcaaggcagcgggcagtcccctctcgtgccacggtgaatctggaagccgatcaaccggacaccccggccgacccaactccatcacgctcacccttgcctgggtacgtcggctagaggaaagctacactacaagcccagccgttgcccacgctggcttgtggtaagtacgataagttcttccagggcatcctgcgaaccggtccttaatcgccatgggcacaactagcaaaaccatgcacccacagcccaccatgtagtgtgttttaattaactaacaccattacggtggcattaatccaaagctataccaataatcaaagtctatgtattaatgtggttccccatttgtgtactagttgaactaagcatggctaagcattccctgaaccaacatctaatcattttagtaccccagttatcaatggcataagataaacaatacatggctgagtagtaggacccatcccacatgatattgtaaaagaatgcaacatttaatggaaacgcgggacatttgtaaattgggtacaatatgatcaattgtaatgcatggcttgccttgctctcgcactgatgagaccacagcaacgtcttcaagaaaccgtggatcgacgaaacggctgaaatctacgcgacaaacaaagcacacaagcaaaacatgctataagactactgaaacaggaaacaaaaccatttttaatggattctatacatttttatgaatttactgagacttgaacgggcttaaacggagctcggatgaattagttatgatatttagaagattctctgtgtttattactataacaaaagtccttaaatcatttattgcgtaataagtcccagggctgacgtcatcaaaggggggtcggcgccgacaggcaggacccacatgtcagtgaagcacggggtggccggtctaccgtggaccgggaccacgcgggtggtccaccgccggtccacgagatcgacggcccggatcggcccgggactgatcggacggtgcagcggcgacctggctcggctcggctcggcacaaagccggccggccggccatggcaaaggcggcggcgcgcgcgcgtcgccggcgacggcaaccggcggcgggagacggcggcgcaaaggcgctggcgcacgaccggggcggcggctcgacccgacgcggctaggagggagagggaggggaaaagaggagggggatgcctcaccgagagtggccggcgcggaggaggacgaccgcgaacggcgacggcgagccacaggaggacaacggcggcgggcggacgagctccgagatgccctaagagaggcaaggagagagattagagggagaggggtggaccacggcgagcggaacccatggccgaaggcagcggtagaggtggtgctcaccggagtgcgaggggatgcgggctccggcgacggacctcgacggaggaggtgcggacggggtggaccttggccacgcaaacccgacggtggcgacggcgcgatgtggcggcgagcctagcggcggctagcggcggccggagtagcgggagcggcggcggcggatgggtgcacggcgcgggagcgatggagggcacgagagagttcggcgagatggggaaaaagagagagggggtggcggtggagcttaaataggcgagggggaactcggacgtggccggtaggggcgggattagccggccgacatggggagtgggggaggagagagaggcgggattcaaaattcgaatcccgaccatctcgggcgcaggcgcgagcgggagagagggggaagtgggtgcgggagacgcggcacacgaccggggcggccgacgtggcccggagggggcgggacgtgggcgcggcggcggtttcggcgctggtggcgacgtgggggcggcggccggaggaaggggacaaccccgacaggtggggcccacctgtcggcgtcccggggagagagaggaggcggccggcctgactgggcctcggcccgcggccggcccagcgggaagagggggagggaaaaagagaatgggccggcggcccaagaagaggaaaaggagggaaaagaaaacgaaaaggaggaaaagattttccttgggatttaatattgtactttgcttattttaattggttaaaattatttccaagactctgaaaattccactaaaagtcttgttaatgtattggagcatggggaactcaagaaaaattccaccacgccgaatttgattattaaatgcatttattagttgaggattagctctaggttaattcaacaatttctttaggtgatttatttaacaaattttaaagctggaaaggggaacttcagggcgtgacagtttgccctagttcgtggatagtaaagttaatataaaagaatcgactctcgcattcgacttccatttggatttatttggatttttatttgaattctaaccgaattcaaatcaattttcgcacgtaactatagagcccgagagagttgcggatccaagcgaaggtcaagacccgcaagactttgagcaaggcaagtcatcactattctttgaacatgttgatcccaattgcgaaattatttttatttacaaataagattgcatgcaatgatgaacatcctatttgtgaatataccataccttgattattgtttacccttattcccttgtaaccatgattacgtaggagtccctagtcaagtatgacaaatgcttagaaatgctactctagaatcatgcatactcatatttatcaaatgctaaatgcttaggcaattacctttgggaaggtaattgagctgcggcatgtggagacatgagcgccacattgccatgatgttgatgacatgatttgtgaaaggagaaataaaattaaacaactgttttcgactggggcggacggaggatttgggtggtatccggaaaaggctagtaccgtccccggtcaattaaggaccgagccatgaagttaagcatgaaacgacccccgtacaaccgcacttttcgtatgggtatagacctagtggaatagatagctgagcggaggcagtatccatgcatagtggtttcttgatgtgtgaggcaggggctctacggtggggcagccattggtagaaccgcgaggcgggtgtctacagtggtgtcgccgtcggtaggactgccatgtgagaatttaaacataattataacttaatgcatgtgtgagtctttccttcccgggtgcatcagaactcctctcactgctagaaaccgtgtacacctagagtgcatgaggatgtaaagttcatggaacgggtactgccaatgcgaggttatcgaaaagctttgccgtgacacgtctcatgtgttgagacgaggctcatgtgttgggcagtcgcggagtgcgggtaaagtgtacatccactgcagtgtgagtaaaccaaatctattcgaatagtcgtgctcgcggttattgagcaccgggacatgtattacacttggctaaactctaaattcttaacttgtgtgggatgggatattgcatgatgatttctatactgatggagccacttcctgaggggcgggaacgtggacgtcctcagaaaaccatgatgactcgatggcgggaagctatccttgggatcacaatggatggtggacagaaccgtcattgtttaatatgaacactggtactaaaatttgatcagtctgtgctaggtcttagggttgtgaaaaagaattataaaacttgctttgcgcaaaagaaccatagccatcctttgaatacccctgtcatgtgcattgttgctgtggtggcttgttgagtacggttggtactcacccttgcaaatataaacttaatcagaggccggagatgaagcttcggaggatccctatgcctattaccaggagggtgatgaagacgatggcgctcagtaggtcttagttacggtcgttgcctgtggcaatggcgtgtcgctgccttaactccgctgccttatctacttctgtttttggaatgtattccggaccgctcggtccgatgatttaagactatgcctacgggcttttgatgtaataattcgcactagactttcgtgtatgtgcatttggtatttcagctatgaactcatgtgtaccagactacttgatccagggaaatggcactgtttacacaattgattcctgttataaaaacaggggtccacagctactaggctctgccataataagtaccctacatagctagggtacgggactactagtagctattacagggatttggcatgcatagcaagctagtagtacctccggttttatttactagctaggctagtaccaaaggcaggacttaggcatgctaggtactagctagctatcaggaacaagactatacagtgatacacacagcaaacgtgcgtgatgataatcctagcagcacgcgacatactcgggagaagccggcacgtggggccgcggcatgggggataagtggtataccgttcaacggtataccgttgtgtagtctctctttttttttcttgaaatctccaatatctcatgattggaaatagtatcatgtatctctttgggcatactctaataagaaagaagcacttagcctctctatctgacatatgacatacattgctcatgccattaggccttaattaactaattttaacaaaaggtagtagtaaaaatacaacattaaatcattcacgctaatgctaaaggagcacaaggatagtatcaagcacggaggaaacgtgtaaaaccaatccaggcatccaaaactggagacctgagaattataatcaggattcagggaagtttgataaatttgctgtttctcaaactaaggctgtgtttagatccaaagtttggatccaaaattcagtcattttccatcacatcaacctgtcatacacacataacttttcagtcacatcatctccaatttcaaccaaaatccaaactttgcgctgaactaaacacagcctaaggtggataaatatgtacaatggcatgtacacagcaaaatggtgaaaagttatttacattttatccttacttggttattgtcgcacagcttagctagaaaccttgcaagttaagaagagatgaaacgtggcatatgtacactagtcttgcaggaaaaagaaaaagaaaaagaaaaaggatactgctatattgcttcaggcctcaacctcttcaggtacttgttcatctgttgctgaaacgaactcttctgttatgctcgtatctgggttggcatcctccatgtttctatctggatgggactcctgttgcattatgctttcctttatcattgacatcagagattccaggacattcttgttttcagcgagataacatttaagagcatcctttccatggaaattttgcccgttcaagtgatagaatactcctgattttgttatgaacttgtgtttgaagcctacttcaataatctccaattcacgactcaggcccttaccaaactcaagctcaaggtgtacagtcttaaatgggggtgcatgcttgttcttgacaatcttgacctgaatttgtgtgcctacaacctgttggattgaaactggatcggggttatataatgaaacaagaactgaacatgaaacatctacgaaattacaaaacctattattactaaattcaatatttatttttgtgttacctttttggcaaaatgggacactacatagaaagcaaatattattgatacgattgtgttacctcttctgacttttttataagaccaatccttttggtgttcaagcggacagaagcatagaactttaaggcattccctccacaggttacttctgctggtgctccgaatccactaaatgtgcttaatttcgatcttacctgtacacatacccagaaatgatcactctgttacctctaaataaacatcaaaagttcttttgaactaagtgattaggcttggttagaattacaatactggacataatactaacccataatacaccctgcaaacgcacccaaaaaaacgtcatattgtacaaggaaacaactccactaaactatttcctgtcttagtttgcatacatggttggaggatagtttgagttccgtgtctttgttcttcattatagagttaatatatcctctcttactataaagttatagctcactaattcctaaagcttaacatacaaagatgccacatcatcatccactaataattgttacatttaaacatcatggaagcatgctatattatctataattcaataatctattaaattttagagatttaaaatgtaagcaggttaaatcatcatcccacataattcacataatagttaaatatatctctccatcatttcttttataatatcctatatacctatataattcatcctcacttagttcatattatttttctctctcattaagtcatatcacatcaattgtttttaatccttagatgcttaatctatggttcaaattatctctcttttcttctctcattaaaccatatcatcttactccctccgtttcacaatgtaagtcattctagcatttcccacattcatattgatgttaatgaatctagacatatatatctatcttagattcattcccattaatatgaatgtgcgaaatgctataatgacttacattgtgaaacggaggaagtaatttttttagcccttagatgtatggtctaaattatcttccttcttttgatctctcataaagccacatcattttacttttacatttgaatcatcattctaaatacaatttaaatttaaatcacaacaacttatgtaaacttatgtttatgtaagcttatgttgattaaactatcttacacattatttttctttgttgtatcattgcaaactcctgcagtaacgtgcggggtttcacctagtattacataatttcgtgacaaccgtcaacctgaaaaatgtccgaagcccacgtttgactatgggaaaattttttatataaaaaagcaaaactctggttttttaataatataatagggtggtgttttaggagtgctggaactagagttatcaaggctgacccagccatcaactttctggaggtctaggtcacatgtccaacagctgggtatttatttaaatattgaaataaattaatgggaggaagtgactatttatactttgcgtgcggac

SEQ ID NO: 5469 - DNA, 31098 bp, Oryza sativa
gtgaaaggggtgacacgacggcggtgcggcggcgcgaggcgcgaggcggcgataggacgcgcgcgcggtgatggaacggcgacagtgacggcgcggcagtggcggcaaggggcgcgaggcggcgatggaacgcgcgcggcgacgggacatcgacggcgacggcgacaacggtggcgcgcggctcggggcgggacgcgacgtgcggcgacgcgacgggcggcgacacgagatcgaggcggcgacagcgacggtgcgacggcgacggcggcacggggctcgaggcggcgacggcgacggcgcgcggcgatggtgacggcgcgcggcgagcggcgatggtgacggcgcgcggcggctcgggtcgcgaggcgacgcgatggcgcgcggtggtagcggcggagcgaggcgacggcgacggtgacggccggcggcggcgcggggcgcaatgacggctaggcgcggtgtggcagaggagggggatggctaggggacgcactcgagcacctagcgtgcaatgaatagtgacttttcctatttatcccgattttagactattttctatttaaatatagccctataaattctaatttttgcataaatgaagtttactcaatatttgtgttattgtaactaaaaattcaccctaaattaatattacccatattttatttttatataatttatttgaatttttaattagggtaattcttgctccatcgcacttaaatttaattattaccattatggtcgcgataatattttatttatttctatcctcacctaatctttattttaaattatatttattttgccaatttatttttagggtttattcgtaattaactattctttactcacaactaatgaatttcgaaatcaaatccaaataaaataggcgaatagaatcggcatgatgtagttaatttaaaaagttttcgaaggtccgcatttttagagttttgtttttattggtcgaattttcagggtgttacacttcagtcattcatcgatatcatcaatgacctccgagtacgtgggttgtcggggtatgaagtcgctgccgacttcattggtaggcggatccagccgctccaggctcgagcccacccagcctctgactactctgggtcggaggacgcgacccgggtttctcctcggggtatttttcttgcattctgggttcccttccttatgcatacattcctcctgacttatcaaaatctggttcttgatctataggtttgaacagcgaaaccgtggagcgccgtgttggccaggtgatgatgagcggccccacgatggcgagcaacgtccctgcccctctttgcgagaaaggggcagctgagggcgaagctgcaatcaacgtgagtgtactcgatgaccctttctctttttcttccaggatcgcatcgtgacttcatgtagtgcaggctctccctctaactgacgtcatcgggccgctcgtggaccaccaggcggcggcatcgctgaaggaggacgtcgccaaggaagcgtccgatgttgcccccgttgctgccacgaccagtggcggcaccgttccgaagaaggggaggaagttttcctccgtgctcggtaaccgtcggaaagcacccactccatcggtaagccgtctttggttattgattgcgtagttggaagatgttgtcctcacaccgtactcggtttacttaggcctcggatgcgtctcccccacctccgcgacggcagaggctggtgacacttggcgagaagtaagttgacgagtttgaggtcgtttgattcatcgaattcaggcggctcgtcttgatggccattacgggaatttttcatagggcggtgtgggcgaaggcggcacaagacgggtctggagggaactctagtgcgtctcctgcagtggccttgacagatgtcgtggtcgtgcccaggagccgtgaggcgacgcccagcggccctgccggcgaccttgtgcctgctcgaggcccacccgctgacgtcctcacctgggaggagctccaaatcgagatggggcgcatcctccaggctggcgctcgtggcataggtcgcgagattgcggcggcgagggcggcggcggcttcgtcggcgaacgaacgcgccgacaagttggcgcgttacctggcggaggttcgcgaggacctccagaagatgagggagctggtggccggcaacgagcggcaatggcaggggctcgagcaccgcatgtcgaagctcgagaacaacctgtcggacatccgtggctcgctgcgggttacctacaccggcctgcaccagctcaccggggagtgcagtgtcacgaccaccatcccggtgaatcccgatgagttctcgctgatgacttcgctcgcgaaactagcgatgatgatggaggcgatcccctccaagcatgcggccaggatcggggaggagacgtcaaacgggatctacaccgggacgtgtcacatcctcgcgtgcgtaaggttggcgcaccctgaactcgatctctagaggatcttggatcagggggcggctaacgacgcgcgtaaggatgtgatggaagaagtcggtaatctgggagagtctgttctcccactttttgaagagtaggacttcggttcgcctgtactccttaattaatcatggtttgtaaaacttttgtcggttccaactgcctttgtgcctttgtgtagtcgccgatcgaaagcgtgcatgctcggatgcgcttctcgtggtatcgtcgaagggcctgttggtagctagttactctgacggcaactcattctcgatgttcctcgagaaggttcacatcgtcgcctcgctactcctcctgatcctggcggagtacttctgtacttgtgtactctgatgttgcagttcagtgggaagcatggcttctgagccgtacacgaggaagaaaggtgtctccttgttggacgttgtcggtgtggtgcgcacggcccaaagtaccgaggggagttcttcgacccacttcttgtcatgtgacatgagcctgtcgtagacacgggtcttgattccttgtagtactatgctgtttgccctctcgacttgtccattgctttgagggtgagagaccaaagcgaagcagatcttgactcccagtccaatgtagtaatcctggaagttggcactgatgaactgggagccgttgttagttatgatgcggtgaggcaatccatatctgcaaaatatccctttaatgaatttgatggtgttgtcggccttaatttcccccatgggtgttgcttcgatccatttggtgaacttgtcgatcgccacgaacaggaacttgtagctgccttgtcctcgtgggaatgttccgagtatgtcgagcccccagcacgagaacggccaagtgagggggatggtttgcagtgcttgtgctggtagctttgtgtgtttgctataaaattgacaagcttcacaccgttgtaccatgtcgcaagcttctttgagggcagttggccagaaaaatccttgtcgaaaggcttttccgaccaatgtacgaccggtggcaagtgatccacagatcccttcgtgtatgtcgaggaggaggtgtttgccgtcgtcggacgagacgcatttgagaagtaccctgtttggcgccttcttgtatagatcattgctgatcatacaatagattttggcttgacgggttattttcttggcttctgcattgtcctcaggcagcgcgtcgctacttatgaatttaattagtgggatccgccagtcgtctgtggtctcgatgtcagcaacggtgcattctgcctctgttgccctcgagctgatgtcgggtgcgactgtgctattttcgtcgtttgcttctttcatcgatggttttgtcaggacgtccaggaaggtgtcgggttcgagtggctcccgtctagacgcacgccgtgccagattgtctggttcgatgttgtccttgcggtatacgtgtcagacctcgattccatcaaatcttttttccagcttcctgacttcagcgaggtacttggataactcggggctagagtacttgtagtctttgtgcacctggtttgcgactagttcggaatcccctttcatgatcagtcgcttgactccaagtgcagctgcagctcttatcccagcgagtagtccttcgtactcggctgtgttattggtcgccctgaagttgaggtgaattgcatgcttgaactgatctcccgaaggtgatgtcaagatgaaccctgcccctgctccttggctattgagtgcgccgtcaaacgccattgtccacatttcgttgtcggtttgactgtctaacctgttttaaggcatagtccaatcggctacgaaatcggcgagaacctgggacttgatggctgttcgtggcacaaaatggacatcaaactggcttagcttgactacccatttcgcaatgcggccggcaacatctttgtttctcacgacttcaccaagagggaaggaggaaacaactgtgaccctgtgggcttggaggtagtggcgtagcttttttgacgtcataattactgcatagagcagtttttgaatctgtgggtatcttgtcttcgcgtcatggagagctttgctgacgtagtagactggtctttgcaccttttctctctcgacaacgatgacagtactcatagaatatggcgtggcggcaatatagaggaataattcttcattaggttggggagcaacaagtacaggggggtttgacaggtagcgcttgagtgcgatgaacgcctctttggcttactgtgtccatacaaatttgtcttgttttttcagcagagcgaagaaggtttgtcctcgttctcccatcctagtgacgaacctgcttagtgccgccatgcatccggttagcttctgtacttccttgagccttgtgggcgacttcatgttctcgattgccttgatcttctcgggatttgcttctattcctctgccagagacgaggaacccgagcagcttgcccgatggtactccgaacgtgcacttctcaagattgagtatgaggcgatatcgtcagaggttgtatgtttcccgtagatcgttaatcaatgagtcgcctgtcttggtcttgacaacaatgtcatcgatgtaggcctcgacattattcccaagctgatcgttaagtgccccttggaccgtgcgttgcaaagtgtttcctgcggttatcagtccaaacggcatcttaacatagcagaatacactgaacggcgtgatgaatgctgtcttctcctcgtcctcttttgccatgctgatttggtggtagccggagtaagcgtcaaggaagcttaacaactcacaaccaactgttaagtccaccagttggtctattcgaggaagagggaagtgatccttgggggcacgctttgttgaggtcggtgaagtcgacgcacatcctccacttcccgttggccttccgcaccatgactgggttggctagccactctgggtggagtacctctctgatgaaaccagctttgagaagcttgtcgagctcttctcatatggcctgttttcgatctggtgcaaatcttcacaatttttgttttactggcttggcattgggtcgcaccatgagtttgtactcaatcacctccctaggtacccccggcatgtcggacggctgccaagcgaacacgtctgcattgtcgcggaggaaggtgatgagcgtgagttcctatttctcgcccagtgatgccccgatcttgacggtcttgtcggcgttggcgctggagagcggaacgatcttgattgcaccgtctggtttcggcgtcttgcttgctttgctcactttcttgggtggctcagctgtggcgggtgggctggcagtgtgctcgaccatgtcgaggctccgcttgtcgcattgcaccgccagctttgcattcccttgaatagtgattgttcctttcggcccgggcatcttgagcacttgatacgcgtagtgagatgcggccatgaacttcgcgagtgcatttctcccgatgatggcgttgtatgctgtatcaaattcagcgacatcaaaggtgatatgctccgtttagaagttatttgcttggccgaaagtcacaggcaacgtaattttgcccaatggcttggacgacgactgaggagtaatcccatggaagggttgattggtgggagtcaactcgcttcgtgggattcccatcacatccaaggtgcaggcgaagaagaggttgatggagctgccaccatctatgagaactcgcgcgactttgatgttccgaatagtgggctcgaccacgatcggatatcgtcctgggatgatagcagccttgggatggtcctcatctgagaactcgatcttctgttcggaccacttcatcttgggtgcggccccctgccatgtcgaacaaacttcacgctccattttcttgtattctcgctttgagtagtacgccgtggaacctccgaagatgtgcgagacatggagatcggaatctaggtatgccgagtccaagtcctgagtggttgcctcagtggccttctcgactactcgtactcgcttgcccttctccaatgccagttgcttttccagcgactttttgaagacgaggcaatcatctagagaatgtttgtccgacttgtgtatagggcaccatattctcttcgtgtcgctgccttgtgggtctgggtgcttgggagggcgcttgtattctgacgcgaggacttccgcttgagctttccttttcccacttttgctacttttcttcttgcttggttcaagtgcgtccttggctggtttcttctctccccccaacttcggcttgtcgttcttgcgtcaaagtgcgtcatccgcatgagcgcatcgatcgacgatctcgaaaaatcttcgagtagttgtgatccgtcttgttgccaactcctgggtagtatagcgatttctgacaccggttttgaaagcacgaatcacagaggcatcggtgatttcggggtttgtatttctgcactcattaaagccgattggtttatactggattatattgttatttcattacatcatcatcaaccgattgcctctatatcattatctacattggatatatagccgattgcttaaaccctatcgctatcggctggtatcggcaacggctattatcggctatcggctagaactactccatcggcttgtcagccgatcggctgttttgatctactatttgcatatcttgtcagttgcaggatcaaactgactcgcacgcccgcatctcattaagatttggacctgcacaggagctaagcaggccggtgtgttcgatttttttcgtcaacacaaattggcacgcccagtgggacacgagttttatatccacatgtctgaagaagaagtcaatgccaagatcatggtcacagtggagaatttaacggaggaacaacatcggcttagagtcagcatcggcttcgaagtcttgagattagccgatgagagttgtcaagccgttagttgtcggattcttgctatattcggttaaggaaattgatctactaaaggaagcttatccagaagagaccgagttcaaagagaatgcggcatggcaagttatctattaattaggaatagtttgttagtttccttttatctttaggaaagtgtgtttagtgtgctataaggactttatcttttccttttatctttaggaacgtttctttcttggccgacaaggacttgtatcaacccatgggtataaatatgtacacccggggtctatgtaatcatcgctacgatcaatacaattcggcgcatcgccaccctttttacttctacttttgtttttacgttcaggcggaacttggcacccgacgcggtgctgcattgtcttcgatcaacggcgcaaggataagtccaatgttccgtcggcccaggcaattatatcgtctacgtcggcgtcgttcaaggctgcatcaatacattcgacctcttggattgctctggtttggatgatatatttgcctaaccatttatcatatgtctttgttaatctagtcttagcatatcaatttagctctatcggctgcttctcgttttagggtttctgccggtatcggctaaatcgcgttgctatattagattagtttagacatctaccaccctgaaaatcagtcaacggcttgattgtctggatattatgattcttttcatacttagtgctgcatcagttaagtttgatctactaagtcatacttagaaccataatctctagcctgcttcttgattgccaataagggtttcatcggggtttcagccggtgagttatctgtatgttgcatcggctcataaggattgcatatacatataagttggatttagcccatgacaataaaggtttcactgtttaatctaatcttgtggatttcatgacattggacttccagccgatgtgtgctttaaccttcggatggatgcttatttatcatatcattatttgccgattggtttatactggattatattgttatttcattacatcatcatcagccgactgcctttttatcattatctacattggatatatagccgattgcttaaaccctatcactatcggctggtatcggcatgggctattgtcggctatcggctggaactactccatcggcttgttagccgattggctgttttgatctactatttgcatatcttgtcagttgcaggatcaaactgactggcacgcccgcatctcatcaagatttggacctgcataggagctaagcagatctcccaggccggtgtgttcgatttttttcgtgaacagtagggcgggaggtgcatcagccatgaacgcgcagaacccttcaatgccgtcggtaaataatttgccaacacgttgtcgtctgctccggcagcgtagagtaccgtggagtagacttgaaggaattcttctgggtcagtactcccatcgtacttctctgttgctcctggttagaatctctcaggccatcggacatctcgtagcgaacggttgaaagctctatacccggcgctgggggcggtgggttgtcggcgatcgtctgtccttcgcggatgtctatctgatgatgaggatgaagaggatgatgacgacgacgatgagtcactcggctctggcgtgcgattccgaggatgacgtctgggttctcgggaatcctgtcgtcgtccaccgttgttgtcccggcgtcaatctccgtcatcgtcatcgttatggcggcgtcctcgaccaatatcacccggcatccgctgttcgcgatcatcgcgttcgtggcggttgtggcggttatcacggtctcggttctcgctcgggtgtcctcctcgctcttcgttctctcgacgtcgtgaagagagacgatgtctggaacggttttcgttgtcttgcgcgcgtcatgcttctcgacagccatttaaatggtcacggagatcgctggtgccgcggggtggaggggtggcttgttgaggtgaggcccgctactcaggtggttcgccattggcaccgccagctggcggctattttgggtgtgctgtggcagcggcctcctcgaacgcgttgctgaggttggtcactgattcccgtagccgttctgtccaccgtgcgagatcatcatttagaacaggatcataaggggtttccctcagtattgcgttgatgcccccgatgtgctgagccggtgtaaccacttgattctctgcttccgcatcggcgcgcgcagacgcgctggtcccgccgatagcaaacacatcgcgtggtgtgcttgtcgacgatgaaccctggtcgtcgagcgagtgtaggactgatggctcgtggggatcaatgtcgatcaccccaacgaatcggtctgagatgaccgtcgctcctcgttccttgttcacatctctaggagagatttgtgagtgctggaccttaggaggctacgtcttcatggctttgagaagaatcttgcagcttgagaggtcgtgattctttgtcttgtggataggacaatagacatcatgagttggagaagtacgctaaattccactctctttgcaggcacggatgtcagcttgtgcgttgagaaaaacccagcaagcttgcaaggtgtgtttcctagttttgtgaataggacaccaggaccttgtcgcctcagaagttgtccttgtcagctcgtgattcttgtcggaaggacaagatttggccacactaggatcttcctcgggcttggatgtcgtcgacgttccgttctccgctactgcgggaggatccttcgacatggggtcgtccggggttatggccacgacattctcgcttccggtcattgatggaccagtcgagaccggcaccgtggtgtaaaccgggaagacgatttcaccgacttgagtccacaccagcattgttgtagtcggaactcctaggttgacgctggggtcgacgctgttgttgacgagacttgacgacaatagtagtagaaccttgagcaccaagtccccttacctggggcaccattgttaacgggggatccccgtagaccagatatagagggtattggggtacgctggtacgaggatctacgtaatatgacatcaagcaaatagaaaacagggattatactagttcaggccccttggtaggtaatagccctaatccagttgatatgggattatatgatggaaatcacagattacaaagggaacagtggaactcgatgataccgacgagaccgtagtcgagttggttcgactagatcacccggcgacttggctcctgtaggctccggcttcgtaggctatggtggttgtctcggcggtgagattcgatgccttaggtcctcccgggggtcccttttataccgcaggtcaggtggtttcaaagtaggacccagagacatcggaccatcggacctatacgatacagtgacgacccagtcctatccggataggaatctttccatctgtggactccgtgatgaatttccttagcgtatacagagaacgtcggtatacgcgcagatataccatatcgatgtatagcgtatatccaggggtagagggtataccttatttgtaacctgacagttgtgttatgggcttttcacctaattgcatattatttttttttaagaattatattctttctagtttttaatagatgccgttgttaacttttactaatatatttaaccattcacctcatttaataagttacgtgactatcatttatttattttgttgtaagttggtttatcgttaatggaacttttcacataacctacattttttatactttaaaaaaaatatttgaataaaataaatgatcaaatttatatctaaaaaagtaatagcgtcaatctatgaaaaaccggaggaactaattagtaaaatgtaaagcgtgaagatacatggctcgcactttttttccatttgacaataatcatagtccatacacaccttaaataattgattgaaatgtcaggatattaaaaaataaactaaaaataaatcgactcaacataaagttaaaaattatttgtacgtagtgcatgtccacgcatgcatatatgcttgcatgaagacacttcttgcagctggcagattgggctatatataacgatggaagtctatgcccttggccccgtgaggcgtcttgagagatatgaagtatctaatatactattttaaattactcatgttaacagaataatgctgcaaatcttaattactatagagaaaaaataggagggaggattacacacgcacgcgggtgaggcagaggagacgggcaacggcgccgcgaaagtatgtgtgggcggaattagggtattagttttcttggatagattaatctaatggtttataatagtagacccaccgatttaactgaaattaagggtagattttctgttttttataatttttaagaatttctctaataatttatttgagcgccatgtgacaactcgagagtgttttgagggaaccacgtggcatcttgagagcgtttttgggaggttaatggactgtttagtatataataatagaagataatagatagatagatatttttatgttttgtgtcacttacatgtgggtattagactattgactagtcaatttgaccaagtcgactttgatccctgctccacttgtcaatgataaagacttttaaaccccttggaaaaatatttagcaaattaattagaaaattttataccccttgggaaaatatttagcaaattaattggaaatactttggaaccacctatcagtgactagagttcttttgttttataaaaccaattcggacactaaaagaaaactatgcaaacagtaggttttcacaattgtttgaattaaattaaatttgaatctttaaacacccataactcactcatcctaagtccaaatctagtgaaacttacacctaaattcatctaaaatcaagatctatttattggcaatgattttgtatttttcgcattttaattggtatttattccttgttagttagtagtggaatattttgagttagtcattcgccatctatattacgtttgtgaggaagaacctttttgaccatgaggatgaagttttcatagctgagcaagctagcggggcacgtgcactgaagaatctttgcttctcgtctcgtttcacttttctttcgttcagtctcgctatcgttataaagtggaatcaaaccacacactccgtttggaaagaggatttaacagtcccaaagggcccaggcccagtgaaggaaagaggatttacagtcccatggccaatgcacttccataaccttttaattgcttgatttctatagagtaaatttcatattggaccactatattttacttaagttacaacttggactagggatagaactcagtttttactttggagcagaaaagtttacattaatgtttcactttgggccagttcttccactggcgctgttctcaagtgaatcttgccgacgcgcaccttgtgcgatgctccgatgctcctgttctgttatcttgcttcatctccatttattcttgatgctctagacaaacttcaggtgagaccgtgagagaggggaggctggatgagaagactaagcgcgctcaaactttgttagcgctgcagccacgctcgaccttcgccgagggtcgcgacgatctcgatcgatttgtgatttggaggaaattattaagtcctaggcaaatagaggagagctgacaatgcagtggctctgctccagcaccgttcgtacaatcacccattctcaggctgccctgtgcatgcattgattcaattattcaatctcattgttcttcatcttgtgtgctcgctagcacttgtgcaaggctgtagctggccgtgtaataggagttggagcaggtctgcaggggatagctggccggccgctatatgctggtactggctgaagagacaagctcagctcaccagtgtggatagagagttgggctcagggagttttgaggaagaaggagaaggaagatccaatgacatgtgggccaccggtacaaggtgcaaaattggtaacaatacctagttctaggtgaagaggcttactaatacggtaatgcctggtctaatgtgcaacataggtaactaaacctagcctaaagtggaattcactctttataaatttttatatgattctttgagcaactagcacgaaagccgttgcgcgttaacgcattctccaccacatattattatatgactttctgaagtgtgaagtgctcagaataatccaagtcgttcgacccctggatgtagccactaatgtggttcaccaggttaccaaagagatggttggcttgaagagtttgatgagcatagtcatcgaacttcactattgtcatgacatcttcatctaactgagtcattttgaagaataaatcaggggttttgtgctccttggtattaggcctataatcactttatagataagtgtcaacctcatattgctactaatttggcttgctagcgaggacttggaatttctgcttataatgaaaatggatttacagctaaggttgagtccaccgcccccttattcgaacatgttgaatcaaattgcgaaatgttttgtttgtagataaattgcatagcatgctatgttgaaactgtgttccgatattgttgctcaagcctatccattgatattgattccatgcaatactttatgtccctagtcgattattgacaaaatgccgtagtaatgcttgttaattgatttatattatatgttgaataatagatggtatgggaataatcgctctgggtagggagtagttatgtttatgcatgtggtgaaacgctacttgtgataaacatgtgaaacgtttgcgaaaaaccaaagttaatgaacaaaattgatttcgactgggtgacatggattgatttgggtggttcctttttgcatattggccagacactgatagtggaacccttatatttaacattctggaaaatgtaaagaaaatacccaaaccaatattggttgaacgattttagttgaaccaattccagtggattcacaaaattgttcaccttaattttgtaaattaaaaaggtacgcttacagtacaagaatattcctaaaatttcatgtatgaaatagttaatataaaatatgctccaacttataaaatttgtagaaaattcattttaacttcaaatgagttgaactaaaattatttagaataaaaaaatgatctggactaagacctggagtaactggtacatataatacatccacatttaggtaatatatatgtaaataatcgtcataattaatatgagaacttcaaaaattcacaggaaaatggttccaactccaaatgaggtgatttcagatttgttagattcataatatcacgatcttagttgctttgaattaaaatgtgccacatactgcaatgtaaactgttagggttacggataaggtataccctctatccttggacatacgttgtatactgatacggtatacccgcgcgtatccggataatttctatgtacgttaaggaaatctatcgcgtaatagaaacaggatcaacaaatggagggagtcctactcggacaagactgggtctttaccataacgtgagggatctgatatctccgagtcctacttggagagatcaactaacccgcagtataaaaggaacccctgggcaggacctaaggcatcgaatctcaccggcaacacaaccaccatagcctacgaagccggggccctacaggaaccaagtcgccgggtgatctagtcgaaccaactcgactacggtctcatcggtatcatcgagttccgatatttcctttgtaatatgtggtttccatcatataaccccataccaactagattagggctattacctaccaaggggcctgaaccagtataatccttgtcttttgtttgcttgatgttgtattacgtagatcctcgttccaacgtaccccaataccctctatatccggtctatgggtatcccccgtcaacagtggcgcgccaggtagggggacttggcgctcaaggttctactactacgacttcaaacctcctcgacgacagcgtcaaccccgatatcaaccagggagcttcaacctcaacgatgctggtgtgcactcaagtcggcgaaatcgtcttcccggtctacaccacgatgccgatctcgactggcccagaaatcaccaggatcaagaacgatgtggttacgaccccggtcgactccatgtcgaaggatcctcccacaggagcggagaacggaacatcgacaacgtctgcacctaagaaggattctaacgcggccagttcttatctttccaacaagaatcacgagccgacgaggacaacttccgaggcaacaagaatctggtgtcctattcacaagaccaaagggcacgacttgcaggcttgctcggtttttctcgacgtacaagctgaaatccgtgcctgcagggagcgtggaattcgacgtgcttctcccactcgtgatgttcattgtcccattcacaagacaaggactcacgacctctcgagctgtaaggtctttctcaatgccatgaagacgtcacctcctaaggtccaacagtcaaaaatctctcctagagaggcggacaaggaacgaggagcggctgctgtctcagatcgattcgtcagggtaatcgatattgatccccacgagccatctgtcttacatctggtcgaagatcaggcctcatcatcaacaagtacaccacgcgatgtatacgccatcggtgggactagcacgtctgcaggtggcaacacagaagcggaggatcaattggctacgccggcccaacatatcagaaccatcaacgcaatactgagggaaaccccttatgatcccgtcctgaacgctgatctcgatcagtggacagaacgactacgggaatcagtggccaacttcagtaacacattcgaagaggccgctgccagggcaccaccagaacaaccgccgactggcagcctaacggggaatagcctgaacagcgaatgccgcctcgtcaagccacccctccgcctcgtggcaccagtgatctccacgaccatctaaaaggtcgccgataagtgcggcgcacgcaagacaacaacaattgttcctgacatcgcgtctcttcgcgacatcgcgagaacgaagaccaaggaggacatccgagcgagagccgagaccgtgatgatcgccacaaccaccgtgaacacgctaatcgtgagcaacggatgtcgggcgatactggtcgaggacgccatcgtaatgatgacgacggcggagatcagtgccgggacaacaacggtgggcgacgacaaggttctcgagaacccgaacatgatccttgtaatcgcacaccggaaccgagtgactcgtcgtcatcatcatcatcatcctcatcatcctcatcatcttcgtcatcggacagacatccacgaaggatgtatgatcgccgacaacccactgcccccagcggcgggtgtagggctttcagtcgtgctctacgagatgtccgatggcctgagagattccatagtactctacgctgccggagcagacgacaacgcattggcaaaattatttgccagcggcgttgaagggatctgcccgttcgtggtttgttcacctcccgccctacttgatttcttcatgggcagatttgtggcagcagttcgtcgccagcttctaaggaacatacaagtgccacgcgatcgaggacgacctacatgcgttgacacagaatccggcaaatcattgagggactatattcggcgctttaatgagggcagaaatatgatccccgagatcactgatgcttccgtaattcgtgctttcaaatccggtgtccgagatcgctacaccacccaagagctggtgacgagacggatcacaactgctcgtaagctattcgaaattgtcgatcgatgcgctgacgcatacgacaccctaagacacaagaacgacaggccgaagatagggggagagaagaaaccagccaaggatgcaactgagtcaatcaagaagaagagtcgcaggagtgggaaaaggaaagctcaaacagaagtcctcgcagcagagtatgcggacccgcccaagcacccagacccacaaggcgacgatacggagaaaatatggtgccctatacacaagtcggacaagcactctttggagacttgtttcgtcttgaaaatggcactcgcgaagcaattggcattggagaagggcaagcgagtacgtgtagtcgagaaggccgcagaagcggctactcaggactcagactcagcatatccagactctgacctctatgtttcacacatatttggaggttccacagcgtactcctcgaaacgagaatacaagaaagtggagtgtgaagcttgttcgacatggcagggggctgcgcccaagatgaagtggtctgagcagaagatcgaattctcagaggcagaccaccccaaggctgctgtcactccagggcgatacccaatcgtggtagaacccactattcggaacatcaaggtcgcacgggtcctcatcgatggcggtagctccattaacctactcttcgccagcaccttggacgcgatggggatcccacgaagcgagttgacacctactgatcaacctttccatggaattactcctcatccatcgtccaagccattgggcaagattacgctacctgtgactttcggccaagcaaacaactttcgaacagagtagatcacctttgatgtcgctgagtttgacacagcatataatgccatcatcgggagaattgcactcgcgaagttcatggctgcatctcactatgcgtatcaagtgctcaagatgcctgggccgaagggaacaatcactattcagggaaacgcgaagctagcggtgcagtgcgacaagcggagcctcgacattgtcgagcatactcccaacccgcccgccacagctgagccgcccaagaaagtgagcaaaaccaacaagacgccgaagccagaccgcgcaatcaagatcgttccgctctccagtgccaaccccgacaaaactgtcaagatcggggcgtcactggatgagaaataggaactcgcactcattaccttcctccacgacaatgcagacgtgttcgcttggcagccgtccaacatgccgggggtccccagggaggtgattgagcacaaatcatggtgcgacccgatgccaagccagtaaagcaaaaactacagagattcgcaccagataggaaacaagccatatgagaagagctcgacaagcttctcaaagctagtttcatccgagaagttctccatctagagtggctagccaatccagtcatggtacgcaaggccaacgggaagtagagaatgtgtgtcgatttcaccgatctcaacaagacgtgtcccaaagatcacttcccccttcctcgaatagaccaattggtggactcaacagctggttgtgagttgttaagctttctcgatgcttactccggctaccaccagatcagcatggcgaaagaggatgaggagaagacagcattcatcatgccattcggtgtattctgttacgttaagatgccatttggactgataaccgccggaaacaccttccagcgcatggtccaaggggcacttaatgaccagtttgggaacaatgtcgaggcctacgtcgacaacattgttgccaagaccaagacaagcgactcattgatcgatgacctccgagaaacgttcgacaatctccgacgatatcgtctcatgctcaatccagagaagtgcacgtttggagtaccgtcgggcaagctcctcggattcctcgtctccggcagggggatcgaagcaaatcccgagaagatcaaggcaatcgagaacatgaagtcgcccacaagactcaaggaagtccagaagctaaccggatgcatggcggtattgggcagatttgtcgctaggatagaagaacgatgacaaccctcttcgctctgctgaaaaaacaagacaaatttgtgtggacacaggaagccgaagatgtgttcatcacactcaaacgctacctgtcaaatccccctatacttgttgccccccaacctaatgaagaattattcctctatattgccgccacgccatattctgtgagtatcgtcattgttgttgagagagagaaggtgcaacgaccagtttactacgtcagcgaagctctccacgaggcaaagacaagatacccacagatccaaaagctcctctatgcagtaattatgacatcaagaaagctacgccacttcttccaagcctacagagtcacagttgtttcctccttccccctcggagaagtggtgagaaacaaagatgttgttggccacattgcgaaatgggtagtcgagctaagctagtttgatgttcactttgtgccacgataaccatcaagtcccaggtcctcgccgatttcgtagctgactgggctatgcctgacaccaggtcggacagttagcccgataacgagacatggacaatggcttttgacagtgcactcaatagccaaagagcaggagcagggttcatctgacattacattcggagatcagtcaagcacgcatttcacctcactttatggtgaccaacacacagccgagtccgaagactactcgctgggataagagcagcagccgcagtaggagtcaagcgactaatcgtgaaaggggattccgaactagtcgtgaaccaggtgcacaaagactacaagtgctctagccctgagttatccaagtacctcgcagatgtcaggaagctggagaaaaggtttgatgggatcgaggcccgacatgtatatcgcaaggacaacatcaaaccagacgacctagcacggcgtgcgtccagacgagagccactcgaacctggcaccttcctggacgtcctgacaaagccatcggtaaaagaggcaaacgacgaagatagcacagtcgtccccgacatcggctcgggggctacagtgtcagaacacgtcgtcgccgacatcgagaccacagacgattggcggaccccactcatcaagttcctgagtagcgacgagttgcccgaggatgacacagaagccgagaaaataacctgacaagccaagatctactgtatgatcggcaacgatctatacaaaaaggtgccaaacggggtacttctcatatgcatctcgttcgatgacggcagacatctcctcctggacatacgcgaaaggatttgcgggtcacacaccaccggtcggacattggtcggaaaagctttccgacaagggtttttctagccaaccgcgctcaaagtcgcttgtgacatggttcagcggtgtgaagcctgtcaattccacagcaaacacacaaggctaccagtgcaagcgctccagactatccctcttacttggccgttcttgtgctgggggctcgacacactcggaccattcccacgaggacagggcggctacaggttcctattcgtggcgattgacaagttcaccaagtggattgaagcgacgcccatggggtaaatcaaggccgacaacgccattaagtttatcaaagggatattctgtagatatggactgcctcaccgcatcataacatacaatggttcccagttcatcagtgccgacttctaggactactgcatcggattgggagtcaagatctgctttgcctcagtttctcaccctcagagcaatggacaggtcgagagggcaaacggcatagtactacaagggttcaagacccgtgtctatgacagactcatgtcacacgacaagaaatgggtcgaagaactcccctctgtcctttgggccatacgtaccacaccgacaacgtccaacaaggagacacccttattcctcgtgtatggctcagaagctatgctccccacgaagttgcgacatcagggcacacgagtacagaaatactccgatgaggaccaggaggagcagcgaagcgacgatgtgcacctacttgtggaacatcgagaaagagttgccgtcaaagcagccagctaccagcaggcccttcgccgataccacgagaagcgcatcagagcacacacactttcgatcggtgattacgtcctccgacgggttcaaaaccaagcagggcgcaacaagctctcacccaagtaggaaggtgttaacaaccaaatttggtaatatcaccatcggaaaagaggattagatcgaagcggagtcaaaggcgaagaccgattcgggaacagagtaagaatcggctggagtctagatcagctacgattggatcggctaaattcgagtcggacttgatttggtgaagcagccgattccgacaagacgacttggtgtacaacatcgggttgagttgatatgcttcaagatgattgccacgcatggatagagtcctgagaaggcaattgtatctattaattaggatattttatataatttccttagagatatgtttgggcaaaagtctgccgtaaagacttatggtatcttagggtatgttagagataagagtcgtgttcgatatggacatagtttgtaattctcgggtataaatagaccccgaaccccatgtaattaaaaaaaacacacacgttcaatacaatctcggcgcatcgccaccctttttgcttttgttttatttcgacgagttcttgctttcgggttgagctgcatcggtttcgatcttcaacaagaggtaaaacttgttatgacggcttgcgttctcgggattagtgcttccatctttatgatactctaatgttgtttatgtaattcgtcaagttatcatatatcttacataatctctagcaatatcgccatctaacctacaatcggctaacatctgtcggtagagggcagccgattaggttagatatcaatgttgacttagattatataggatatctaccactctatgaatcttccagcggcttgattgtctagatattgttcttcttttcatacttaatgttgcatcagttgagtttgatctattaagtctgcttagaacatcaatctctagcccgccttatggttgccgattagggtagcatcgaggtttcagccgatcttatctgatttaactacatttgctttatgtgtgttattgacacgttaaatctgccctttatgtcaagatcttattgcatcttagtatattaagcttctgtttggtatattctgcttgttttaatatcttaacatagagttgtatcggagtattagccgatacatgctagatctatcagatcggctacgctatgaacatatatagtcttgttgttaatatatatttcgatctaagtgatttatactgtctcggcatagcgaccgatctatcccaatcacttgattcaagtatatatcgacaccaggattatatattgttaatatctacaaccgattgagtagatttagttctttattatcttttgacaaccgccgatcgatttaagcatgacatcggctcaaagataaatgatacgacatcggcatctagccgatcggctatgatttatggatttaactacgatttctttgtctgtatttcttgttgatttcaggatcaaatcaactggcacgctagcatatccaaaggcaagttttggacctgcactggagttaaacagatctcctaggcctcgtgtttttcatcaacacgcttttggcacgcctggtgggaccgattagaagtcagaagtcctctcatggacggcaaaccgccaacatcaccatcctcagctagtccgggttctgttaaatggaaggtccagcaattagaccaatctgacgttaatgagggcaacgtcatgaccattactccagacaaattgacacctaatcagaagaaggagtttgaagcaatgatgcagcaagcacggaaccagtttttgaactcatttatgcagacccgcaaggggacagtggtgcaaaagtatcaggtgagagtagtggctgatgtccccgggaccggttcttccaaggatggggagtgaaacaagctccagatggctcggctcaaccaagcaacaaaggtgctgcagatgattctcaaggaaatcaaggtgaccactctcagggagctcaaggagttcaaggtgatggtgcccagggagttcaaggtgacggccctaatcaagacggcgatgcaacacagttgcagttcaacaactttagcgaacatggtaaagtcaatggttgatggttcaatggccgagtatcaagctacaggactagtctacttaccaggacgggtgttcccgaattatcggccattaatcatcgataatcaaccagttgtccagccggccattaatccaccatcggttcagccgacggcaccattaccagctcctgcacccgctgtaccaccttcggccccaggccaattggttaatccccgattgttggtgagagaacaaccacaacacagtggacagaatgtgaatcggctaacccaagaccaggttgcatctatgttcttacctcctcaacatgccattgatccaacccagcaacagccgattcagcaaacaccgccaaggcagcaggttgtgcagccgattcaacaaacacccccagtccaacaggttgtgcaaccaattcagcagacgccacagagacggcaggttttgcagccgtaacatcctggaaattcccaataataaaaatcactaaaattttgaactttttaaaacttttgcatcatgctggttgttatgattgctattgcttgccaaaccgtaaatgatcacaaagaaagtaaagaaaagaactacatttaggcaatagatatatttaatcctacaaataattatgcacaagaaagcaagccaaatcaagtataagtcaaatattaatttctactataaatcacagatcaaatattaaatatttgaaccatgctgatggcttgatgccatgattagctaaaagagatagtaaaatcaaatctaattcatttgaatccaatctcacatgaaatataagaacacatgaaatgatgatcaccactataatgatcgcgcttataaataagtaattcaccagaatatatagattgatacttagaacattttaccgagtccctcatgacatgaaaatcactcatataaaataatggtcatataaataaattaagaatatgtgagtgtttaattaaacaattaggttaatgttgtactgagtctcaatttatatttatagaatgaatagacccacgtaaaatgcattgttatacaaataagttcattcaatgtgctattgcaataataatggccacattaggatattttaattaattttagaaccctcgaagcctccaaaattatctaggttaattttataattagacctcatttaaataatgcaatagaaaaatatatataaacataaaatatgggtaatattaaaaattgagtaaactttcatctaaattaacacatctattgggtaaacatcaattgtgtgaaatctagaattttatgggacaagttttaataggaaatatgccctaaaattggataaataggaaaaagtcactgttcattatggcctaggtgctcgatgtggttccatagccctgcccctccactgctgcaccaccctagccggcttcgagccctgcccgcactggcgccaacgctatcccgtcgccgctgccgcgccaccgtcgccgtcatgtcgccgcgccgcccgccattgcgtcgccgctgccgcctgtcacgcgtctccacgcgccgtcgccgtcgctgtcgccgtcgccgacgcgtcccgtctcgcgccccgtgccactgcgcgccgtcgccgacgcgtcccgtcgtcgctccgagccgcgcaccgccgctgccgcgccatcgccgtcgccatcccgctgccaagccgcgcgtcccgccatcgcctcgagccccacccctccgcgcgtcatgtcgtcgtcgccgtcacgtcgtcatcatcatcgcgccgctgcctgccgcgcacctgacccgtcggccctgtgcccctgccccaccgcgcgcctgtcacaccgccgtcgcgtcgccatcgccgtgcgccgtgagccgttgctgtcagcctcgcgccccgagccgccgcgcgcccgtcgctgccgccgcgcgccgctcgccagtcgccatccctcccgtcgtgtcgccgctccgagccccgcgcgtcgcgtcttgtcgccgttgcatcgcgtcgccgcgcatcgttgttgcgtcaccgctcgtctcgagcccctcccctcggcgcgcgctgtcgccgtcactcccgcgtcgcgccccgtgccgcgccgcctcgcgcccctgccgcgccgcgcgcgtcactgtcgcccgtcccgtcgccatcgtgccccacgccgccgcgccgcgtcgccgtcgtcattaagcaccgcccacccttcccctccgcctatataaaccctccccggccgtccattgcttcccacaccaccctcaccacctcccctccctttcccctctctttcccgtccctggcgttgccaccacttcggaagccgccgagcagacgcgcctcgccccgtcgccgcgctgcgcctcgtcgccgcgccgtgctctgccatcgaccccgccgccggtccggtgagcctcccccttccccaccgcttgtcgtcgcgtcgcgccgcccgccggttccagccgagccgtgagagagagaggaagcagagaggtagcggggagagagagaaaaagagaaaggataggagagattagagtgggccccacgtaattggtgaatagtaatccccttcttaatctttattagttgtgtctattatatgtgggtccgggtggttaaaaatctaattatagaagttttatggtctcgagtctatgacatgcgggccctaccgggtttaatggccggtttgaccctagtcaaaggagtcgggactacctgtcatttgcccatatggattccttcagaaagaaaaataaaataaaagaaaagaaaataggaacaccccacctgtcagtcactatagcttgtggataatattgtattaaaaataaatgaattaggaacagtaccatttcgcaattattagaattaattcaaatttgaatctttaaactagcgtaacttatttgttttagctccgattcgagtgaaacttgaacctaaattcatctaaattcataagatttccaatggtatataattcactatttacgaaaatatatttaaattatgaaatagttaataccaagatgatgtataatagttaacttaaaaatgtgctcataaataggattgatattgtacaatagagtagatgtcaaataattgtctttaacacgctttctcactataaaacctatgtaaactaattaggagcattgtttcaaattaattaaagcataggaaatactagtgccatttattaatatatgtgaatatataactatactcatgacgttcaaattgtataaataatgtttagcctcatactttgtgactaaatttgaacacacgtagatgagtcttcaacttgtttatgagggataataacatgtttatgagagataataacagagctagtgtgactaaaatcacccgcacgaagttagttaacggcatttcctatacagtagtatatgtttaggttggaaattgacccttaagttgtatagacggtaacccactcataaagccacttaaaatcacatgtactgagtagcttgtagtaaatagcaactattcaaataaatgattcaatattaagatagatattgtgcatacacatatactgtacatcacattatagctatatggtatagtatcaatttgcttgttgcatgtattaaattaaagggaatatatgataaacatgtatattagataaatactagttataaatcttgatctcatataattatagttcaactgtaaatcagtattatttattgtaaaattatgtgatgagataatccgtaaccataatatgattaacctaaactattctaacatacaaagcatgggtaattgttaaccttttataatttattttgacaagtaaaatatgtacataattaaaataaagcctccatcaataaaataataatacaaatgattcacaataattatttgaccgatcctaaatccatctaacaacagaacctctagtatataaccgtcctatttagatagatgcatacatagccataatccttccatagccatttgatagactaaaccaccgattagccaaatatatatgtatcccataaatgctatgttggttaactcctaaatagaccacgatgacaatagaaagattaagaagccttagccctagcatgattgaaatccattagcaaacacgaatagtatgagcaaccctaggatcaaccccaacaattatcttttgcttgtgcatatttgcttgttgtttgaatattggtttttctcgcgtattatagacctggtgtatcggttagtcgtgaggcaacgtctgcaacttccaggaggtgaaggttgatcaagattatatcgagaataaggactatcctaagtaggcaagtcatcactattccttgaacatgttgatcccaattgcgaaattgttttgtttacaaataaaattgcatgcaatgataaacatcctacttgtgattatgccatgccttgattattgtttacccttaaaatccttgtaaccatgattacgtatgagtccctagtcaattatgacaattgcttaggaatgctattctagaatcatgcatactcatatttatcaaatgctatatgcttgggcaattacctttgggaaggtaattgagatgcggcatgtggagacatgagcgccacattgccatgatattgatgacatgatttgtgaaaggaaaataaagttaaacaactgttttcgactgggcggttggaggatttgggtggtgtccggaaaaggctagtgccgtccctggtcagttaaggaccgagccatgaagttaagcatgaaacgacccccgtacaaccgcacttctcgtatgggtatagacctagcggagtagatagctgagcggaggcagtatccctgcatagtggttttcttttaggtgtgtgatgcggcaagcagtctgctggcggatgcccggttcggatggccaggtggatggcggatgcccgttccggatggtcagaggttggcttggcaatactacataaggatacccataagagaacaatcatgatggactgggttcaacgacaagaagcaacgtaggagtgtgtgtgtttttcccttctcgagagcgccagaactcctctcactgctagaaacatatgacgcctagagtgcatgagggctaaagttcatggagcgggtactgccaatgcgaggttatcgaaaagctttgccgtgacgcgtctcatgtgttgggatgaggctcatgtgttgggcagtcgcggagtgcgggtaaagtgtacatccactgcagtgtgagtaaaccgaatctattcgaatagcagagctcgcggttattgagcactgggacacgtattacacttggctagactcaaaattcttaacttgtgtgggatgggatattgcatgatgattttatgctgttggagccacttcctgagaggcgggaaggtggacgtcctcagaaaaccatgacgactcaatggcgggaagctatccttgggattacaatggatggtggacagaaccgtcgttgtttaatgtgaacactggtattaaaacttgatcagtctatgttaggtcttaggcttgtgaaaagaattgcaaaactagctttatgcaaaagaacctgaagccattccttgaaataccctctatcatatgcatcgttgctgtggtggcttgctgagtacggttggtactcacccttgctatttatatatcttttaggagagtgttgaagagaagcccttgtcggtacacttgcgtatccaacaagatgatcggagtgcggtcttgttctaggtctcgttccctagtcgactgcctgtggcatgttaaccgggcccttatattattttgtcttccgctgttgttctctgatagttgttggcctaccggccctaatgtaagtatttaactcttttagcctgaattcattcgtgatatgttgtgatccaactatgtatgtgtgtactaactactgatccagggattggtacggataaacacagaagatttccgattttcaaaatcgggggtctacagcagccgattgaacagacgccattaaggcaacaagttgttcagccgattcagcagcaaggctcagtgaatgcatcggctgggtttgcctgtgcagcctgtgcagcataccgcaaatcaagttgtcccggagcacttcattcatcacggtacgaccagatggcacactgactcctcagttattcctgagcatttggtgcgcaatattcagccggattttcaaaattaccaggggggcaatttgaattatcagtatcagccgccatcaccgcaagttcaataccggcaggcaggatcggctcaaccccagttcgttcctcaatacaatcagtttgagcccatgtcatagcagcctaagggaacacctcagcaatgaccatgggctgatttgattgcggacgtcatgaaggagcaatttgggcttaggccgaaagatgctggaaatttataccgacagccatatcctgaatggtttgagagagttcctctccctaaccggtttaaagtcccagatttttcgaagttctcagggcaagatagtacatcaacttatgagcatattagccaatttttagctcagtgcggtgaagcatcggctgtggatgccttgagggttaggttgttccgattgtctttgtctggatcggcttttacttggttttcttctttaccgtatggatcgattaacagttggggcgatctggagaagcagtttcacagctatttctatagtggggtacataagatgaagttgtccgatttgacagcaatcaagcaaagacatgatgagcccgtgcatgagtattattcagaggttcagagagatgaggaatatgtgctacagtttaagtttgactgatgctcagttagctgatttggctttgtagggtatgattgctccaatcatggagaaattctcatctgaagactttgaaagcttgtcgcatcttacacagaaggtaactttgcacgagcagtggtttgctgaagctaggaggaattctaggaaggttaatcatgtctgtccttatttgtgtggatcggatgatgaggatgatgattctgaaatagctgtagccgaatgggtaaggagcaaaaaggttgtaccatgccaatgggtgaagaattctggaaaagaggagaaggatgatatttgacattaccaaggctgacaagatttttgatttattcttacgagagaagcagattcaacttcttgccggtcacacaattccatcggttgaggaattgggcaagaaaaggtattgcaagtggcacaattctgggtctcatactaccaatgattgcaaggtcttcaggcagcagatacaagcggctatcgaaggaggcaaaatcaaatttgatgattctaagaggccgatgaaggttgatgg
